United States Patent Application Publication US 2003/0165831 A1 - sequence listing, part 4

SEQ ID NO: 19932 - DNA, 942 bp, Homo sapiens
  misc_feature 889, 902, 909, 942: n = A,T,C or G
acgttcactgtctcatataatcccagcctcctgtgtgatagctggtgtcatctccacttacagatgaggaaactgaggataagcagggttgaataacttgctcgagatcacagagccacgggtggtgaaacaggatacaaacctggttctgtttgactctaagaccattcatctttcctctgaaactcagtattgcacagtgtagaaatgcagtttttaagacctcccaaagtgacgtgctgcgtcactgcccatcattagctagattgagtaaattgctgcttagccccagttgttttgacagaatcaatagcccttgctgaggggccagcagcctacggacacaggagcatgctcatgggcaagaccaccatgcacactcagaggggagccacaaggcaacctccacgccactcagatttgtagggctctgaacacatacaccagatacagaccacctacttattttttccaactgtaatagcaaagcagtaatctctttctgtagggtaaagtttgggggatcattttgatgtctctcagagtaaacttttggtgacagtttcccagcctaacataagaaattcaaacaaaaaaatctctcttatatatgtgtgtgtgtgtgtgtgtgtgtatccacatgtatatatatatacacgtgtatatacacacacacatatttttctctctccttaaaaatacagaatgtaagagctggaaggtagttcagaaaccatcttcccagctttctcagtttatagatgagaaaaccgagctgggcttggtggctcacgcctgtaatcccagcactttgggaggttgaggcaggcagatcacctgaggtcaggactttgagacctgcctggtcaacatggtgaaaccccatctntactaaaaatcanaaattanccaggcatggtggtgcctgctgtagtcccagcn

SEQ ID NO: 19933 - DNA, 944 bp, Homo sapiens
  misc_feature 1, 2, 3, 4, 5, 6, 7, 8, 9, 10, 11, 12, 13, 14, 15, 16, 17,18, 19, 20, 21, 22, 23, 24, 25, 26, 27, 28, 29, 30, 940,941, 942, 943, 944: n = A,T,C or G
nnnnnnnnnnnnnnnnnnnnnnnnnnnnnntaaaagtttttatttcaaaaaataaagctgcagttcatttcacataaatatctggggagggaaggggagtgggatgggtgtgggggcttggcccctacctcctcttctcgtccacacggtatggtaaaagcaaaggggatggctcgccgaaaccagcgggagagccatatctgccttccattgtcatgtgaatcagggagaacttcattgtcaaaaaggagctgccacaatgctgagggtttagcatcaaccggtgaccacaggacccctccggagatggcgtacctcagctctaacagaacatcggacatacttgttcttgcaggacgcttttattcttgtctttgccagaactcagccgctccaggcacaggttcaactgctcatcatagcgatagtagtgggctttagagtggtcaaagctgctgaaggggaggccgaggttgctcagtgctggctcttccccagtgggctgggtgacccggtccaaacctcgggactggtagaattcccgaatccgtttctcttcactgtcttgcaagccaggcaccagcttatacacgatgtcctgcatgacccggtccagtttgaggttgagcagtggctgtgtctcgtggatcttaatgttgcacatggggcagtacttgctagtttggaggtacttcacaatacaactcttgcagaaagtatgaagacactctgtgatggtggtggcatccacgaagtagccggcgcataggcagcaaacaatgtgttcattcaagtctttgatcttcactcgaacctcctcctcgttccgtagcgggtccatcttgtacactgactggagctggttccgaagcctcatcgcgatcgcaatctggcccccctgaggagactcgtgccgaaaggctgatcccagccggccacnnnnn

SEQ ID NO: 19934 - DNA, 4614 bp, Homo sapiens
  misc_feature 1, 2, 3, 4, 5, 6, 7, 8, 9, 10, 11, 4595, 4613, 4614: n = A,T,C or G
nnnnnnnnnnngacgtatatatttcattttattgaaacattcagaaaatactgggagtgaagcctgacttgcaatacagttctctttgctggcaatgagcatctgaaataatgacacttttttctttagtgcatatgaactgtttgtctccagaacagaaaaccaaaagtttaaaaacaagatactcccgttgacatcaagtcttcagaattattcatctgatgcttcctagtttccaaagtttcgcttttttcgatttgcacaggcagctgttgaacgctgatgctacacaaacggttacaattgtttacttaagcaaaaaatgccaccagactgactccatcctcaaaatgcagtcatctggacggggggaggcatcacacttggggagccttgccaggggccagatcataaccctgaggtgacacagggtaggacgcgcaaaaccaccggcgccagggcgtttccgcagggtttcccaaaactcaaacgcagcggctcacggtttgccacgtcccccaggagaatggtagacacagagaggaaatgtggagagggcacaaaccgcaaggtgaagaaaacgaacaaacaccgagttgatacggatagtccccgttcccctgagggccgaccccgtgactcccgatgagcgtccagttgcgccgggcatccctgggcctcccagcgtctttcccggaggttcatcgccgcacggcggaaagcgctctcggttccgctttccggccccagcctcccgggcgccctcgcgcggcggctaacgctggtcctcggccgggcgcgctgacgtcatcgtgcgtcggagtgagcccggatggggcggcgggcttcgggagcgcccgggctgatccgagccgagcgggccgtatctccttgtcggcgccgctgattcccggctctgcggaggcctctaggcagccgcgcagcttccgtgtttgctgcgcccgcactgcgatttacaaccctgaagaatctccctatccctattttgtccccctgcagtaataaatcccattatggagatctcgaaactttataaagggatatagtttgaattctatggagtgtaattttgtgtatgaattatatttttaaaacattgaagagttttcagaaagaaggctagtagagttgattactgatactttatgctaagcagtacttttttggtagtacaatattttgttaggcgtttctgataacactagaaaggacaagttttatcttgtgataaattgattaatgtttacaacatgactgataattatagctgaatagtccttaaatgatgaacaggttatttagtttttaaatgcagtgtaaaaagtgtgctgtggaaattttatggctaactaagtttatggagaaaataccttcagttgatcaagaataatagtggtatacaaagttaggaagaaagtcaacatgatgctgcaggaaatggaaacaaatacaaatgatatttaacaaagatagagtttacagtttttgaactttaagccaaattcatttgacatcaagcactatagcaggcacaggttcaacaaagcttgtgggtattgacttcccccaaaagttgtcagctgaagtaatttagcccacttaagtaaatactatgatgataagctgtgtgaacttagcttttaaatagtgtgaccatatgaaggttttaattacttttgtttattggaataaaatgagattttttgggttgtcatgttaaagtgcttatagggaaagaagcctgcatataattttttaccttgtggcataatcagtaattggtctgttattcaggcttcatagcttgtaaccaaatataaataaaaggcataatttaggtattctatagttgcttagaattttgttaatataaatctctgtgaaaaatcaaggagttttaatattttcagaagtgcatccacctttcagggctttaagttagtattactcaagattatgaacaaatagcacttaggttacctgaaagagttactacaaccccaaagagttgtgttctaagtagtatcttggtaattcagagagatactcatcctacctgaatataaactgagataaatccagtaaagaaagtgtagtaaattctacataagagtctatcattgatttctttttgtggtaaaaatcttagttcatgtgaagaaatttcatgtgaatgttttagctatcaaacagtactgtcacctactcatgcacaaaactgcctcccaaagacttttcccaggtccctcgtatcaaaacattaagagtataatggaagatagcacgatcttgtcagattggacaaacagcaacaaacaaaaaatgaagtatgacttttcctgtgaactctacagaatgtctacatattcaactttccccgccggggtgcctgtctcagaaaggagtcttgctcgtgctggtttttattatactggtgtgaatgacaaggtcaaatgcttctgttgtggcctgatgctggataactggaaactaggagacagtcctattcaaaagcataaacagctatatcctagctgtagctttattcagaatctggtttcagctagtctgggatccacctctaagaatacgtctccaatgagaaacagttttgcacattcattatctcccaccttggaacatagtagcttgttcagtggttcttactccagcctttctccaaaccctcttaattctagagcagttgaagacatctcttcatcgaggactaacccctacagttatgcaatgagtactgaagaagccagatttcttacctaccatatgtggccattaacttttttgtcaccatcagaattggcaagagctggtttttattatataggacctggagatagggtagcctgctttgcctgtggtgggaagctcagtaactgggaaccaaaggatgatgctatgtcagaacaccggaggcattttcccaactgtccatttttggaaaattctctagaaactctgaggtttagcatttcaaatctgagcatgcagacacatgcagctcgaatgagaacatttatgtactggccatctagtgttccagttcagcctgagcagcttgcaagtgctggtttttattatgtgggtcgcaatgatgatgtcaaatgcttttgttgtgatggtggcttgaggtgttgggaatctggagatgatccatgggtagaacatgccaagtggtttccaaggtgtgagttcttgatacgaatgaaaggccaagagtttgttgatgagattcaaggtagatatcctcatcttcttgaacagctgttgtcaacttcagataccactggagaagaaaatgctgacccaccaattattcattttggacctggagaaagttcttcagaagatgctgtcatgatgaatacacctgtggttaaatctgccttggaaatgggctttaatagagacctggtgaaacaaacagttcaaagtaaaatcctgacaactggagagaactataaaacagttaatgatattgtgtcagcacttcttaatgctgaagatgaaaaaagagaagaggagaaggaaaaacaagctgaagaaatggcatcagatgatttgtcattaattcggaagaacagaatggctctctttcaacaattgacatgtgtgcttcctatcctggataatcttttaaaggccaatgtaattaataaacaggaacatgatattattaaacaaaaaacacagatacctttacaagcgagagaactgattgataccattttggttaaaggaaatgctgcggccaacatcttcaaaaactgtctaaaagaaattgactctacattgtataagaacttatttgtggataagaatatgaagtatattccaacagaagatgtttcaggtctgtcactggaagaacaattgaggaggttgcaagaagaacgaacttgtaaagtgtgtatggacaaagaagtttctgttgtatttattccttgtggtcatctggtagtatgccaggaatgtgccccttctctaagaaaatgccctatttgcaggggtataatcaagggtactgttcgtacatttctctcttaaagaaaaatagtctatattttaacctgcataaaaaggtctttaaaatattgttgaacacttgaagccatctaaagtaaaaagggaattatgagtttttcaattagtaacattcatgttctagtctgctttggtactaataatcttgtttctgaaaagatggtatcatatatttaatcttaatctgtttatttacaagggaagatttatgtttggtgaactatattagtatgtatgtgtacctaagggagtagtgtcactgcttgttatgcatcatttcaggagttactggatttgttgttctttcagaaagctttgaatactaaattatagtgtagaaaagaactggaaaccaggaactctggagttcatcagagttatggtgccgaattgtctttggtgcttttcacttgtgttttaaaataaggatttttctcttatttctccccctagtttgtgagaaacatctcaataaagtgctttaaaaaaaaaacaaaaaaaaaaacacaaanaaagggcggccgcaagcnn

SEQ ID NO: 19935 - DNA, 734 bp, Homo sapiens
  misc_feature 1, 2, 730, 731, 732, 733, 734: n = A,T,C or G
nnccgggcgggcgggcggccgtccgggcagggcggcggcggcggcggcagcggcggcggctgaggagggcccggcctgcgagagcctcagtgggagccggctcagccctcggccaccatgtcggcgccgtcggaggaggaggagtacgcgcggctggtgatggaggcgcagccggagtggctgcgcgccgaggtgaagcggctgtcccacgagctggccgagaccacgcgtgagaagatccaggcggccgagtacgggctggcggtgctcgaggagaagcaccagctcaagctgcagttcgaggagctcgaggtggactatgaggctatccgcagcgagatggagcagctcaaggaggcctttggacaagcacacacaaaccacaagaaggtggctgctgacggagagagccgggaggagagcctgatccaggagtcggcctccaaggagcagtactacgtgcggaaggtgctagagctgcagacggagctgaagcagttgcgcaatgtcctcaccaacacgcagtcggagaatgagcgcctggcctctgtggcccaggagctgaaggagatcaaccagaatgtggagatccagcgtggccgcctgcgggatgacatcaaggagtacaaattccgggaagctcgtctgctgcaggactactcggagctgcgtctggagaacatcagcctgcagaagcaagtgtctgtgctcagacagaaccaggtggagnnnnn

SEQ ID NO: 19936 - DNA, 4675 bp, Homo sapiens
tcgccagcgctgccttttctggctgccgggtagtttcgctttcctgcgcagagtctgcggaggggctcggctgcaccggggggatcgcgcctggcagaccccagaccgagcagaggcgacccagcgcgctcgggagaggctgcaccgccgcgcccccgcctagcccttccggatcctgcgcgcagaaaagtttcatttgctgtatgccatcctcgagagctgtctaggttaacgttcgcactctgtgtatataacctcgacagtcttggcacctaacgtgctgtgcgtagctgctcctttggttgaatccccaggcccttgttggggcacaaggtggcaggatgtctcagtggtacgaacttcagcagcttgactcaaaattcctggagcaggttcaccagctttatgatgacagttttcccatggaaatcagacagtacctggcacagtggttagaaaagcaagactgggagcacgctgccaatgatgtttcatttgccaccatccgttttcatgacctcctgtcacagctggatgatcaatatagtcgcttttctttggagaataacttcttgctacagcataacataaggaaaagcaagcgtaatcttcaggataattttcaggaagacccaatccagatgtctatgatcatttacagctgtctgaaggaagaaaggaaaattctggaaaacgcccagagatttaatcaggctcagtcggggaatattcagagcacagtgatgttagacaaacagaaagagcttgacagtaaagtcagaaatgtgaaggacaaggttatgtgtatagagcatgaaatcaagagcctggaagatttacaagatgaatatgacttcaaatgcaaaaccttgcagaacagagaacacgagaccaatggtgtggcaaagagtgatcagaaacaagaacagctgttactcaagaagatgtatttaatgcttgacaataagagaaaggaagtagttcacaaaataatagagttgctgaatgtcactgaacttacccagaatgccctgattaatgatgaactagtggagtggaagcggagacagcagagcgcctgtattggggggccgcccaatgcttgcttggatcagctgcagaactggttcactatagttgcggagagtctgcagcaagttcggcagcagcttaaaaagttggaggaattggaacagaaatacacctacgaacatgaccctatcacaaaaaacaaacaagtgttatgggaccgcaccttcagtcttttccagcagctcattcagagctcgtttgtggtggaaagacagccctgcatgccaacgcaccctcagaggccgctggtcttgaagacaggggtccagttcactgtgaagttgagactgttggtgaaattgcaagagctgaattataatttgaaagtcaaagtcttatttgataaagatgtgaatgagagaaatacagtaaaaggatttaggaagttcaacattttgggcacgcacacaaaagtgatgaacatggaggagtccaccaatggcagtctggcggctgaatttcggcacctgcaattgaaagaacagaaaaatgctggcaccagaacgaatgagggtcctctcatcgttactgaagagcttcactcccttagttttgaaacccaattgtgccagcctggtttggtaattgacctcgagacgacctctctgcccgttgtggtgatctccaacgtcagccagctcccgagcggttgggcctccatcctttggtacaacatgctggtggcggaacccaggaatctgtccttcttcctgactccaccatgtgcacgatgggctcagctttcagaagtgctgagttggcagttttcttctgtcaccaaaagaggtctcaatgtggaccagctgaacatgttgggagagaagcttcttggtcctaacgccagccccgatggtctcattccgtggacgaggttttgtaaggaaaatataaatgataaaaattttcccttctggctttggattgaaagcatcctagaactcattaaaaaacacctgctccctctctggaatgatgggtgcatcatgggcttcatcagcaaggagcgagagcgtgccctgttgaaggaccagcagccggggaccttcctgctgcggttcagtgagagctcccgggaaggggccatcacattcacatgggtggagcggtcccagaacggaggcgaacctgacttccatgcggttgaaccctacacgaagaaagaactttctgctgttactttccctgacatcattcgcaattacaaagtcatggctgctgagaatattcctgagaatcccctgaagtatctgtatccaaatattgacaaagaccatgcctttggaaagtattactccaggccaaaggaagcaccagagccaatggaacttgatggccctaaaggaactggatatatcaagactgagttgatttctgtgtctgaagttcacccttctagacttcagaccacagacaacctgctccccatgtctcctgaggagtttgacgaggtgtctcggatagtgggctctgtagaattcgacagtatgatgaacacagtatagagcatgaatttttttcatcttctctggcgacagttttccttctcatctgtgattccctcctgctactctgttccttcacatcctgtgtttctagggaaatgaaagaaaggccagcaaattcgctgcaacctgttgatagcaagtgaatttttctctaactcagaaacatcagttactctgaagggcatcatgcatcttactgaaggtaaaattgaaaggcattctctgaagagtgggtttcacaagtgaaaaacatccagatacacccaaagtatcaggacgagaatgagggtcctttgggaaaggagaagttaagcaacatctagcaaatgttatgcataaagtcagtgcccaactgttataggttgttggataaatcagtggttatttagggaactgcttgacgtaggaacggtaaatttctgtgggagaattcttacatgttttctttgctttaagtgtaactggcagttttccattggtttacctgtgaaatagttcaaagccaagtttatatacaattatatcagtcctctttcaaaggtagccatcatggatctggtagggggaaaatgtgtattttattacatctttcacattggctatttaaagacaaagacaaattctgtttcttgagaagagaatattagctttactgtttgttatggcttaatgacactagctaatatcaatagaaggatgtacatttccaaattcacaagttgtgtttgatatccaaagctgaatacattctgctttcatcttggtcacatacaattatttttacagttctcccaagggagttaggctattcacaaccactcattcaaaagttgaaattaaccatagatgtagataaactcagaaatttaattcatgtttcttaaatgggctactttgtcctttttgttattagggtggtatttagtctattagccacaaaattgggaaaggagtagaaaaagcagtaactgacaacttgaataatacaccagagataatatgagaatcagatcatttcaaaactcatttcctatgtaactgcattgagaactgcatatgtttcgctgatatatgtgtttttcacatttgcgaatggttccattctctctcctgtactttttccagacacttttttgagtggatgatgtttcgtgaagtatactgtatttttacctttttccttccttatcactgacacaaaaagtagattaagagatgggtttgacaaggttcttcccttttacatactgctgtctatgtggctgtatcttgtttttccactactgctaccacaactatattatcatgcaaatgctgtattcttctttggtggagataaagatttcttgagttttgttttaaaattaaagctaaagtatctgtattgcattaaatataatatgcacacagtgctttccgtggcactgcatacaatctgaggcctcctctctcagtttttatatagatggcgagaacctaagtttcagttgattttacaattgaaatgactaaaaaacaaagaagacaacattaaaacaatattgtttctaaaaaaaaaaaaaacacaaaagaacacaacaccccaagaaacacgaaaaaaaattttgtgggggcccccccccccggagagtttttcaacccccctttgggggcgccgggccccaagtgagagaaaggtgcacggttcccaggagagcctgcggatcagacagaggggcggtgtcttccacccacaaaaaaacagcccggggcggccaaccgggggtttttggaacacccccggataggagggctcggggcgccaatcggcggctaacacaaagggggcacaggagagcaagaaaataatccccacgccccgtcgaggtgaaaacaacatcgacaaaaacgacagccagacatcacgaagccaggcagccacgccgcgacatcgtactaagaacagcaatgacaggaagccaacggaaggtcaggaagcaccacaacagcagcaatgcaacactaggatcaagagaacacaacagaaccacaacaaagtagcgtaccagcagctagcaagacaagcatgagacgtgcaa

SEQ ID NO: 19937 - DNA, 2387 bp, Homo sapiens
aacatgagtcagtatatcagggtgatctttcttaatatgtttattttgatttaatatagtctgcttgttttatccctatttttttcatagcagcaaattcagattttcgttattaaacattttctaactaaaatttgagtcagtatttttttacctggcttgtgcattcaagtagtactgtaactatacaagcaatttttgttgggttttttgttttggttttacattatatgtaaatataagtgaaaagtaaaatgtttaacattttctcgtttaaaagccattcctagggagtagtgactgtgttaatcaaatatcagggaaacttaaactgggaaaagaagtcctagctactttggaaggtcattgggatagtgaagtttttattactgataaaaagactgataattcagaggttttctggaatccaacacctgacattaagcaatggagattaataaggcacactgtaaaatttgaagaacagggagattttgaatcagagaaactctggcaacgggtaactcgagccataaatgccaaagaccaaactgaagctacccaagagaagtatgttttggaagaagctcaaagacaagctgccagggatcggaaaacaaaaaatgaagagtggtcttgcaaattatttgaacttgatccactcacaggagaatggcattacaagtttgcagatacccgaccatgggacccacttaatgatatgatacagtttgaaaaagatggtgttattcagaccaaagtgaaacatcgtactccaatggttagcgtccccaaaatgaaacataagccaaccaggcaacagaagaaagtagcaaaaggctattcctccccagaacctgacattcaagactcctctggaagtgaagctcaatcagtaaaaccaagtacaagaagaaagaaaggaatagaactgggagacattcagagttccatcgaatctataaaacaaacacaggaagaaattaaaagaaatattatggctcttcgaaatcatttagtttcaagcacaccggccacggattattttctgcaacaaaaagactacttcatcattttcctcctgattttgcttcaagtcataataaacttcatgttcaagtagaagttctctaccattgaatcagtgaactagaaagatctgatttggcctgggaccagtgttcaagttggtttggtctttattaaaaatcacaatattccgaaaacaaaaaaacctaggagataaatgtagaggtattgacttttcgtatcttttatcttcacactgaaacaagagctatcctatttgattattaaagtgagctatgtgttaagtgccaggacatttctagcttttgtgagaatgtgtctacatatgagtataataaacccacatgtatacacaattgtctcttatgtactcctacctgacagtagtctttgcattctatagtatgttctgagatataatgttaacattgtccataacaaaaaatgctatcaatcttataaatatatgtaatctattttcttcataaaacaggcacaaaagttttatcagtaaggaattacagattgagaaatgatggaataatagacataattaattcaatacactactgttaaaatcatttgcaaagcactcaactcaattatcttcttagaaagaaagaaaaagtatgaatggtcaaaatgaatacatcgagagagataaatggcaaattgcttttttaaaagtttacataagttttttttaacccctagaatttaatatttgtagatgcaggtaaatatatatacttacgtgtatatcagtataaaaacactggtgtgcaattaattggattgattataataccaccttaagcacttgctgaaaaaagtgtggtcaaaattgattgctgtccttttgtcttatttttgtttttcttaagtcagctggttcataacataggccaaattctagagatgtttatagagcatttgaagtgctgataatttatgttttttcattatgaaaacttattttagctttagactccagtgtgttcagtgaataagtagaatataaaaaaatataaccagtattttacttcaaaagccaaaaagaggcaataagaaaagacactttgtggtggcctttatgtgtgcattaaaattggtttctgtaaaacgtgtaataagttgagtatctacgaagagtatcaagttctgaagtttaatttttttattatcctcctctcttcttagtaacttctttctgtggcaaaaccacaattctttaagattcctattgttcaggctaaggcaaatttttttgtttgtttcttcagtttaatattttgattttgtgtttttacgtaaatatttatattccttgaaagcaa

SEQ ID NO: 19938 - DNA, 1610 bp, Homo sapiens
ccacgcgtccggctttgtttaggcttccatgaaactaagctggaatagaaactacacactagacacagcagtagtcatagtcttcacaggtttaggagctactggaccaacattcttgtttttgcttttgtttttttaaataattctagtctggagctaactgtggagcagccaaatagtagctggcatgttgattcaaaccatgggctgaatttgctcataggctgtgcatcagacaaaagcttgaatatttgtgttgtatgcttgttccaaccaccgcttgtgtgagcatttttgtggcttgtacagaaagtacacttttaaattgtctcttgcatcactaaaatttttttaaaatgagcataacaacgaaaggcatccagctgactttttgattccaagattattgattggattgacttttttgcattaaatttttcccagcaaaataaatcatatggcgagtcagggaataaaaagtcaaaagaaacaaatagaagctttttttttaaaaaaatgtattgcttctgaacttttttctgccactgctccctagccctgtttagtttgttattgctgcttttcttttttctttctgtatctatgcctttttttcacagtagtccttggctctgcacggaataaatgataccctcaaatctaattggatgtgctttcgcctttgcatgtaagtacggtagtaagaaacctttgagatctttctgacttttcaaaattagagaaagcaaatgggatggatagattttttttttcttttcaaggggggcaggaaggtaatggtttgagtagcctttgtttaaaaaaaagactaaatatatttaaaaggccacatttatatttttttcacaagaaccacataataaattccacttcttgacctgaatttggaaatccgaaattactaatccaggccaggtgtggtggctcatgcctgtaatcccagcactttgagaggccgaggtgggcagatcacttgaggcctggagttcaagaccaccttggcgaacacggtgaaaccccgtctctacaaaaaatacaaaaattagccaggcgtggtggcacgtgcctgtagtcccagctacttgggaggctaagtcaggagaattgcttgaacttgggagatggaggttgcagtgagccgagattgcaccactgcattccaacctgggtgatgaagtgagactctccaaaaaaaaaaaaggaattattaatccctgcttgtgctctaaatagcctcatgggcatcattggatagcttcaaaagggcccttgattctggcaggaaaataatgcagaatgagaattaccatcttctactagagaacaccagaagaaaactttatgctaggagtgcttattgacccattgattgtgcaccgtagttaaggctcccccggggtactgtggcgggccctcttttgggttggaggctaatacactggtaccaatctgggtcccgtatacactttggtttgacttgttctaagttggtaatgtggaacgtgtgaattgcaaatagggtccactggctcaagggggtcagccacgggtatagggtatttgtttcacaaattctcatttcttctcta

SEQ ID NO: 19939 - DNA, 2987 bp, Homo sapiens
  misc_feature 1, 2, 3, 4, 5, 6, 7, 8, 9, 10, 11, 12, 13, 14, 15, 16, 17,18, 19, 20, 21, 22, 23, 24, 25, 26, 27, 28, 29, 30, 31,32, 33, 2970, 2977, 2978, 2979, 2980, 2981, 2982, 2983,2984, 2985, 2986, 2987: n = A,T,C or G
nnnnnnnnnnnnnnnnnnnnnnnnnnnnnnnnnttgttatattttttttttttacatcccaaacaggtctttttatttaacataaggccaaagaagctatcaggcgttgctgaatactgtccactaactgtacaaaatattgactgcatgcctcgcaaacaccaaaatatccgctggaatgccatagaaataaataacttctgctataaacacatgaaaacatatcaaactgttatctctttaaacatattgtaaataaaaaaattaccagtacttctacacaataaatattaagaaaccattgacatagttgaaatgcactcatataaattaacaactttaattacattagccaaacagacattggttaaagaactgcatgtagtatgcaaaacaaaacaaaacaaaacaaaaaacaaagtaaaaaaccaacaaaatagaaacaaacaaacaaacaacatcaaccacagaacataaaaagttttaaaataaaacaggcttcagattatcttggctttcataattatatttttcttttaaagaaaaatatcaacccattgtcaatgcactgtttttcaaagcatttaaatagagggtaaaaccctttggaaattaatacagaagaaatgattcactttatgcataaaaaataaataataatatagctgagacatgtggtttgcttctgctcttgaagatgtgaacagcttctaagcattcattttctctgacccatacaacagcttctcagtgatacagggtttaatttaaacacatacaatgtccacccccaaaccttctgcccacatctacaagttttatttattttgtgggttttcagggtgactaagtttttccctacattgaaaagagaagttgccaaaaggtgcacaggaaatcatttttttaagtgaatatgataatatgggtccgtgcttaatacaactgagacatatttgttctctgtttttttagagtcacctcttaaagtccaatcccacaatggtgaaaaaaaaatagaaagtatttgttctacctttaaggagactgcagggattctccttgaaaacggagtatggaatcaatcttaaataaatatgaaattggttggtcttctgggataagaaattcccaactcagtgtgctgaaattcacctgacttttttggaaaaaatagtcgaaaatgtcaatttggtccataaaatacatgttactattaaaagatatttaaagacaaattcttttcagagcttctaagattggtgtgggcagatttttaagagcctagagtttagtcttagagaaagagtgaggagatagtaaggttagatagagccactgagtttcaagaaaaaaacatactactaagaatcccatatgttataatttaaagcctttacttttggcctcatgctgctaggtgaaagagtggttgttcacaggacttgtattttccaagatgattaaagatggtaaaatactatctttcaatgttatcaaaaaatggtagcaacttatacttctatttcaaagccatataaatttaacaaaattaaagtttgtgggtgtttgataacccaatcactcaatatccaattaaaatatggaataagtttcaaataaaatatggaattacatttctctgcttctgataactgtggtcactaatcaacccccatgttatccccgatatgtctaggacttagcttaaaaagatagcagatgtatttgagatgagtgggaactatacatgggtatcagctttcttggtaaatttctgctttttccatggccttgaccatctttgctactgcgcagtgaaccaggacttaatttctcacactgtttctgcaggttccggtaccaaagaagatgcagttcaaaatactgccagttttccaagaaattttgtaaagttgaacatggccatctactcttgccttaaaacttttctcaccacacccaccttcccacatgcatgatatccaaggtcgacagacctggattagaatccactctcaagcttctcatgcagtgcgtattgtattttctgcataagaaagggctgcctctagaacacagtaagtgtatttgcccagtagtgacattgcctacatatagccaagtgttatagtataccaacttagtatatttttcaaggagagctaaaccaccttttgtaatgtttggtttctcactgttatcttcctttcctataattaatttattttaatctacaaattgacatagggctaaaagcttcaatattttacaaaatattaattaatgtaattgttcccaattattagaaacttttttccatttttcaaaatgtttgccaacttcacacaagtgtgtaaaaatagggctctggattttcaaaagcacatacatgaataatttattagctattccaggcaagctaagtactagaataaactagataaaaacttggctttaagcatgtactttgatatttataaaacaaaggtgtttttttttcatttctgcatctgaatcaatacaaatttacacatgaagaattttggctgtaaattaaaattttagagatttttactactgccctcacctctgcctcctcttaactgttctcttccttactctccctctcttaacactttctctcaaattaattatcttttagttagtgatgacattatttttcccagctggtacaggtaatatttctcacaaccaagccttaatcatttttaaaaaatacactcaactctaattctggcctaaatattatttttctgaaaaagcttctgatttaagattgattccaatagacactaagttggaaaaacatcagcccagagttttgattatcatcctgttttccccacaggggataacttgtagaagtgggagggggcacaaaaaagaggaggaaatttcatccctgtacaatgaaagagggccttgctgaatattcactggaatttnccaggcnnnnnnnnnnn

SEQ ID NO: 19940 - DNA, 1889 bp, Homo sapiens
  misc_feature 1, 2, 3, 4, 5, 6, 7, 8, 9, 10, 11, 12, 1887, 1888, 1889: n = A,T,C or G
nnnnnnnnnnnnccgagctcgggcccgcctccgcctccgccagctcctgtgagctgccgagtgctaggcacccgggctcttctgggggctccagaactaagccacccagacaccatcatcccgaaaaccccagcccttctcccatggcaggctacttgccccccaaaggctacgccccttcgcccccacctccctaccctgtcacccctgggtacccggagccggcgctacatcctgggcccgggcaggcgccagtgcccgcccaggtacctgccccagctcccggcttcgccctcttcccctcgcctggccccgtggccttggggtctgctgcccccttcttgccactgccaggggtgccttctggcctcgaattcctggtgcagattgatcagattttgattcaccagaaggctgagcgagtggaaacgttcctaggctgggagacctgtaatcggtatgaactgcgctctggggccgggcagcccctgggtcaggcggccgaggagagcaactgctgcgcccgtctgtgctgtggcgcccgccggccgctgcgtgtccgcctggccgaccccggggaccgtgaggtgctgcgtttgctccgcccgctgcactgtggctgcagctgctgcccctgtggcctccaggagatggaagtacaggctccaccaggcaccaccattggccacgtgctacagacctggcatcccttcctccccaagttctccatccaggatgccgatcgccagacagtcttgcgagtggtggggccctgctggacctgtggctgtggcacagacaccaactttgaggtgaagactcgggatgaatcccgcagtgtgggccgcatcagcaagcagtgggggggcctggtccgagaagccctcacagatgcagatgactttggcctacagttcccgctggacctggatgtgagggtgaaggctgtgctgctgggagccacattcctcattgactacatgttctttgagaagcgaggaggcgctgggccctctgccatcaccagttagaggccaccatggtgtgaggagaccatcacctcgaccagaactccagatggtcacctgccctggcccctcctctgggcagcccctttcctccatgtacactgcaggggacagaaggggggccccatccctaccctactccctggccgcctgcccctgtggttcccaaggaggggtatgtatgagagccgctctcctgctacctcccaccactgtcccagcagtccctcggcacacaggcatatcagctttcacactttccccatgcactctctcccacccccttccagggcctctgctccaaaggaggcctctggaacccaggactctggggttttacaagagggctggggtgtggaagggcaagctgcaccaaagacggtggatatagccaccgcccccccgccgctgcctagcatctgcttggccaattagttcagcctcagaccatggcactttgagggggtctctacctccccatcaacagctgcagggggaccccagtgccaacttcctctcccactagggccctgccttcagctggtgcttgctgcgattcctgtgccttatgtaactgcccttccttcccttgccctaggaaaaaggctgcatctttatatgttacattcatataaactttgtaactttttggaaaacacaaacaaggggggggccaaataaccgcggggccagttacggtcacgcttgttcaagggccccagaggtcaaagagagggcgtaactgacgggagaccaggatgtggcactctggtcgaaccacactgtcacttgtcgttactgttctcgatctaacatcatacaggtgtcagcgacaacgagcacgagtggagaggcagcnnn

SEQ ID NO: 19941 - DNA, 2514 bp, Homo sapiens
  misc_feature 1, 2, 3, 4, 5, 6, 2508, 2509, 2510, 2511, 2512, 2513, 2514: n = A,T,C or G
nnnnnnccggacgcttccggtggaagggagctgccgcggggcttgctgggatcatggcggagaatcactgcgagctcctgtcgccggcccggggcggcatcggggcggggctggggggcggcctgtgccgccgctgcagcgctgggctcggcgccctggcccagcgccctggcagcgtgtccaagtgggtccgactcaacgtcggcggcacctacttcctcaccactcggcagaccctgtgccgggacccgaaatccttcctgtaccgcttatgccaggccgatcccgacctggactcagacaaggatgaaacaggcgcctatttaatcgacagagaccccacctactttgggcctgtgctgaactacctgagacacggcaagctggtgattaacaaagacctcgcggaggaaggagtgttggaggaagcagaattttacaatatcacctcattaataaaacttgtaaaggacaaaattagagaacgagacagcaaaacatcgcaggtgcctgtgaagcatgtgtaccgtgtgctgcagtgccaggaggaggagctcacgcagatggtgtccaccatgtccgacggctggaagttcgagcagttggtcagcatcggctcctcttacaactatgggaacgaagaccaagccgagttcctctgtgtggtgtccaaggagctgcacaacaccccgtacggtacggccagcgagcccagcgagaaggccaagattttgcaagaacgaggctcaaggatgtgagggacacagtattgacagctgaagaaatgatttacgttttcccgagatgtaatgaactgccatgtccaggaagcttggctgtgagaagaaacctgcttttgatcatttttctagagatctgggtgtgaatccttttttgcctctgaggtgggtggtgagagacgggcccagctgtccaaggccagacgtccccaagttgggggagcacggcggccgggtgggcgctgcctcttgggggggcctcgctctgttttttccaagtgccacgtgggactgaggcagacactcccagtcagcccgctcgatcctgaagatcgtgtgaaggaagcgttcttggtgctacacacagtctggaaaagcagcctgggcttcactggcaggaagcggccgcagccgcgtcagtgtccagcacgtcgtggcctctggtccgaccaccaggccctagtctcggtcagggagtctgctctgcctcccaggcgggatcgctggtttctctcgacctcgcagagctcctgacaaaggcggcttctgcgtcgtcactgcttcccggcgccattccgaggccgggccttcttctgacacgggctccaaccccacctgaccaagcccgggacagtcaaggcttctcaatttgtattttccaggcaagagaactttgtaccccttctctgtgtggatagactccccagcgtttttcctctggaaatgcccacagggcttgccgcgtggagactgatctgttccatccgttagcgcgaggtagcagtgtcgcctcgcccctcccactgcgggctcacggggagctggcgtctgtcagtgccttgtcacgcctggcatagaggttgggctggaggcctgtccactggcttctggagctgaaggtctgcgtcacggtgaaaattcgggatgtttacagagcatcacaaatgcctctctctcgccgctctctcattttctttgtataactatgcagccttccctctctttctgggatgtttgggacttcactcgacctgcacgggctctgcccgacatgccgtgggagctgctgggattcctttagaaaccgctgcccgcatgctttgaaaacagacctttctcagctggctgtggggacctgtcagagtctggggactcggcgtgcagggcgggctccaagcgctttgcttccggaactccggcttcccaaggggtactgtgcagactgaccaccggcctcccgcctgcaggtcagaggctctgacactgtctggtttccaatgcttctggagacttcctgcctaggcctcatcctcctctttgccagtcacctgattaaccaattctccagcattaggacttacctccttctttttgtaaggtctcttgtatgttgttaaatgtttggcttaaacaatttataaaagcctttctagaaggcagacttagccccagcagagcctgggaggaaggcggccgctggggctcctgggcatcctctctggggagctgctggccgcttagcgttgtttgatttttgaccttgacatagtagataggcttgtggtttttttaatttaaagatattaagacttaattcactaaaatttattctaaggggatatttatacttttatacttttttaggtatcgtattttatcagcttacagtttaatgcctaagtttcccctggaaatagcaaataaaattgtgtatttatgcaaaaaaaaaaaaaacaaaggccgctctagatctagtggatactgcgannnnnnn

SEQ ID NO: 19942 - DNA, 4018 bp, Homo sapiens
  misc_feature 1, 2, 3: n = A,T,C or G
nnngaaagcatcatttccagtttattcgacttttctgtttagacttattcattatagcccatatatgtgataaggactaagaacccagtcttcaaggtcctgtcgagttcaagtcaagacgtctggaaagaattacccagtcctggcttcgagcagcccattgaaccagagacttgaaacagccccagccaaagacttttctcccaattctgcgcttcctgggttctgctgagtcttccacaggcttttttttttttttttttttttttaagacgaaaaagagattttctgttatcgggggcagaaagactgaagcacaaaaaaaaaaaaaaagaaaagaaaagaaaagaaaaaagaaaagttaatttatttttaaagcataatttttttaagaattagactgaagtgcaacggaaacataaagagaatattagtgaaattattttttaaagtggggaagaatcaaacatttaagactcccctatcctttttaaatgttgtttttaaatttcttattttttttggccggtcgtctcaaattcatctgatctcttattacctcaattttggaaactgcccgccaccgaccctccgggaccacacagacaggctgaggacgactttatgaccaagagctgaacaagatgcattgtgagaggtttctatgtatcctgagaataattggaaccacactctttggagtctctctcctccttggaatcacagctgcttatattgttggctaccagtttatccaaacggataattactatttctcttttggactgtatggtgcctttttggcatcacacctcatcatccaaagcctgtttgcctttttggagcaccgaaaaatgaaaaaatccctagaaacccccataaagttgaacaaaacagttgccctttgcatcgctgcctatcaagaagatccagactacttaaggaaatgtttgcaatctgtgaaaaggctaacctaccctgggattaaagttgtcatggtcatagatgggaactcagaagatgacctttacatgatggacatcttcagtgaagtcatgggcagagacaaatcagccacttatatctggaagaacaacttccacgaaaagggtcccggtgagacagatgagtcacataaagaaagctcgcaacacgtaacgcaattggtcttgtccaacaaaagtatctgcatcatgcaaaaatggggtggaaaaagagaagtcatgtacacagccttcagagcactgggacgaagtgtggattatgtacaggtttgtgattcagacactatgcttgacccagcctcatctgtggagatggtaaaagttttagaagaagatcccatggttggaggtgttgggggagatgtccagattttaaacaagtacgattcctggatctcattcctcagcagtgtaagatattggatggcttttaatatagaaagggcctgtcagtcttattttgggtgtgttcagtgcattagtggacctctgggaatgtacagaaactccttgttgcatgagtttgtggaagattggtacaatcaagaatttatgggcaaccaatgtagctttggtgatgacaggcatctcacgaaccgggtgctgagcctgggctatgcaacaaaatacacagctcgatctaagtgccttactgaaacacctatagaatatctcagatggctaaaccagcagacccgttggagcaagtcctacttccgagaatggctgtacaatgcaatgtggtttcacaaacatcacttgtggatgacctacgaagcgattatcactggattctttcctttctttctcattgccacagtaatccagctcttctaccggggtaaaatttggaacattctcctcttcttgttaactgtccagctagtaggtctcataaaatcatcttttgccagctgccttagaggaaatatcgtcatggtcttcatgtctctctactcagtgttatacatgtcgagtttacttcccgccaagatgtttgcaattgcaacaataaacaaagctgggtggggcacatcaggaaggaaaaccattgttgttaatttcataggactcattccagtatcagtttggtttacaatcctcctgggtggtgtgattttcaccatttataaggagtctaaaaggccattttcagaatccaaacagacagttctaattgttggaacgttgctctatgcatgctattgggtcatgcttttgacgctgtatgtagttctcatcaataagtgtggcaggcggaagaagggacaacaatatgacatggtgcttgatgtatgatcttccatgttttgacgtttgcagtcacacacaacaccttagttcctctaggggctgtacagtattgtggcatcagataatgccaccaaaggagacatatcactgctgctgggacttgaacaaagacatttatatgggtttattttcattctgccaaagtaaaacaatacatcaacaagaagaaactcagatttaacctgttatttctatgaaaatgggatgaattctttgtttatgcactttttccttactgtgcatccgcctgaaagtgttttgccctatatacctcactagccatgctttatgtgggttatcatggaagaaaaggattttggaaactcaaggaaaagttctttcaacctatacaacctaacttatggactgttttgatagatgataattttttttttttaggaaggattttctttttaactttaccaaatgaaatgccaaaggaagttttaaaggccgttggctgtgctgtattttgatataattgtactgtgtttttaaattttgtatgccaatcttaaagacaaattttgcatattctctattttacttttctgccaaaataaacctgttcttccttttttaaaataaaataagttcttaaaaaatttatacttaaaaaatcctgcccaaaatgtgaagcttggttgactgatgttcatgatagaaagaataaaatgtttctctctctctaccttttaaaattgaatagtttatttctgtgaaagaagtatttaaactttcaatattttaactttttgtttttatttcttttagaaaaggccaatatacctatcacactttggaagtaaaaatacacactttcgtgtgtacctaaaaaaaaaatcgttgaaaatcaaggccaaaggtagtgcaattttttcattaagatttaaaaaaaagggaatgatagtctttgaaagaaaacagtaggcatccagcactggacaaaacatgggtatcaaagatgaataatctttggagattctggcagtgttttcccagaacaagtcaagtggaaagtggagaaattatctgtataattttggacacatacaatgcagtttatcaaaggttttgttctgtggcctgaatttactgggtcctacctacacattgaacatgttttgcctgtctttttttttttttcaacttgccagttcactttacatgttagtataatgtttacacgggtgagttggataaattataaaacatataaattcaaaattggcagatagaatcaccaagtatctatcctcttttactttcaaatgaggaattttgtttttctgaattacacagatcatcacttcctatttcctgttctggacctgtataaaaatgtctacacagtagaagtgacatcaaggtttaataagtatatcaatgattggcacatataaaaattgttgaaccacatactctgaacttggctaatttagttactgcaaggcctccattatccagttttattttttacacgattgaccttgccttgtagctggtgctgtgtagacctgtgttgaaaacacaatcggaatatatgaataattgaataaacagcattatggtgaggcagagacacatggagaagtgttaaaaaaaaaatgggcttcctgcctttctgcctcttttttatgcagtcatctatgttacatctatcctgcctaagaaaaagctgcacatcctaccttcagagt

SEQ ID NO: 19943 - DNA, 1010 bp, Homo sapiens
  misc_feature 1, 1006, 1007, 1008, 1009, 1010: n = A,T,C or G
nataggatcgtcaggacgaggccggtgttaatcggcagagcgaggggctggagccgggccggggcgatgtggagcgcgggccgcggcggggctgcctggccggtgctgttggggctgctgctggcgctgttagtgccgggcggtggtgccgccaagaccggtgcggagctcgtgacctgcgggtcggtgctgaagctgctcaatacgcaccaccgcgtgcggctgcactcgcacgacatcaaatacggatccggcagcggccagcaatcggtgaccggcgtagaggcgtcggacgacgccaatagctactggcggatccgcggcggctcggagggcgggtgcccgcgcgggtccccggtgcgctgcgggcaggcggtgaggctcacgcatgtgcttacgggcaagaacctgcacacgcaccacttcccgtcgccgctgtccaacaaccaggaggtgagtgcctttggggaagacggcgagggcgacgacctggacctatggacagtgcgctgctctggacagcactgggagcgtgaggctgctgtgcgcttccagcatgtgggcacctctgtgttcctgtcagtcacgggtgagcagtatggaagccccatccgtgggcagcatgaggtccacggcatgcccagtgccaacacgcacaatacgtggaaggccatggaaggcatcttcatcaagcctagtgtggagccctctgcaggtcacgatgaactctgagtgtgtggatggatgggtggatggagggtggcaggtggggcgtctgcagggccactcttggcagagactttgggtttgtaggggtcctcaagtgcctttgtgattaaagaatgttggtctacaaatacaaaaacgatccatactaccgacaaaaaaaaacccgcttttggggcaaagaacaaggcggtaatttagcccttgagggaacggccaagggtttaaccattacacgccaaaggaggcgcgaaggggaaacacaaagacagaagcgaannnnn

SEQ ID NO: 19944 - DNA, 2182 bp, Homo sapiens
  misc_feature 2170, 2171, 2172, 2173, 2174, 2175, 2176, 2177, 2178, 2179,2180, 2181, 2182: n = A,T,C or G
ccacgcgtccggcctctggcacctggggcagccgcgcccgcggagttttccggcccggcgctgacggctgctgcgcccgcggctccccagtgccccgagtgccccgcgggccccgcgagcgggagtgggacccagccctaggcagaacccaggcgccgcgcccgggacgcccgcggagagagccactcccgcccacgtcccatttcgcccctcgcgtccggagtccccgtggccagatctaaccatgagctaccctggctatcccccgcccccaggtggctacccaccagctgcaccaggtggtggtccctggggaggtgctgcctaccctcctccgcccagcatgccccccatcgggctggataacgtggccacctatgcggggcagttcaaccaggactatctctcgggaatggcggccaacatgtctgggacatttggaggagccaacatgcccaacctgtaccctggggcccctggggctggctacccaccagtgccccctggcggctttgggcagcccccctctgcccagcagcctgttcctccctatgggatgtatccacccccaggaggaaacccaccctccaggatgccctcatatccgccatacccaggggcccctgtgccgggccagcccatgccaccccccggacagcagcccccaggggcctaccctgggcagccaccagtgacctaccctggtcagcctccagtgccactccctgggcagcagcagccagtgccgagctacccaggatacccggggtctgggactgtcacccccgctgtgcccccaacccagtttggaagccgaggcaccatcactgatgctcccggctttgaccccctgcgagatgccgaggtcctgcggaaggccatgaaaggcttcgggacggatgagcaggccatcattgactgcctggggagttgctccaacaagcagcggcagcagatcctactttccttcaagacggcttacggcaaggatttgatcaaagatctgaaatctgaactgtcaggaaactttgagaagacaatcttggctctgatgaagaccccagtcctctttgacatttatgagataaaggaagccatcaagggggttggcactgatgaagcctgcctgattgagatcctcgcttcccgcagcaatgagcacatccgagaattaaacagagcctacaaagcagaattcaaaaagaccctggaagaggccattcgaagcgacacatcagggcacttccagcggctcctcatctctctctctcagggaaaccgtgatgaaagcacaaacgtggacatgtcactcgcccagagagatgcccaggagctgtatgcggccggggagaaccgcctgggaacagacgagtccaagttcaatgcggttctgtgctcccggagccgggcccacctggtagcagttttcaatgagtaccagagaatgacaggccgggacattgagaagagcatctgccgggagatgtccggggacctggaggagggcatgctggccgtggtgaaatgtctcaagaataccccagccttctttgcggagaggctcaacaaggccatgaggggggcaggaacaaaggaccggaccctgattcgcatcatggtgtctcgcagcgagaccgacctcctggacatcagatcagagtataagcggatgtacggcaagtcgctgtaccacgacatctcgggagatacttcaggggattaccggaagattctgctgaagatctgtggtggcaatgactgaacagtgactggtggctcacttctgcccacctgccggcaacaccagtgccaggaaaaggccaaaagaatgtctgtttctaacaaatccacaaatagccccgagattcaccgtcctagagcttaggcctgtcttccacccctcctgacccgtatagtgtgccacaggacctgggtcggtctagaactctctcaggatgccttttctaccccatccctcacagcctcttgctgctaaaatagatgtttcatttttctgactcataaaaaaagaaaaaaaaaaagggggcgcgaaagaacccgcgaggcagtaaacaccggttgggaggggcccagggggttaaagaggggcggaacagggggaacaactgttggcgcctcggggatggcccaagccgaaatatttgacccnnnnnnnnnnnnn

SEQ ID NO: 19945 - DNA, 3083 bp, Homo sapiens
  misc_feature 1, 2, 3082, 3083: n = A,T,C or G
nnacaggtcgagctgccgctggtcttttgggtctgtgcagtttgtgcggcgtgttgcgtgtctccctgagtacgagaggggtataaaacagcagagcagcacaaggccgggtgcgcaaaccgcctgttttgtccccggctcttttctggggggggccccttggtgcccccagccatggggtctgtccgcaagtcccgtgtccgtttgtccctccccgctcgtttgtttagcggccgccgcccgttcgtgttatgtgctccctcttgggtggcccctttcttaaaaaggggggcattccccccccggtattttttcccccccccccccctttttttttttttttttttttttttttttttttttttttttttttttttttttttttttttttttttttttttttttttttttagcagttgaagtgatttatgcttgatttctaaatgcaacttatgtttatacataatttaaaactcaaagaaagcatgcttatacaatcatgtgcaactttaaactttaagaactctggatgaatacatggtggcaacagtccatgacacctgaaaacatcatttgtggagtggcgtagagttcagtgttcgcagtcgcatattacaaccatgtttcacacagccctgctcggtttgattttctccacgtggttgataattgtcttcagttgctgctaagtgattttgcaaatttcatttataatcctcgccctacaattacctaagtactgtttctgcaggttaacctgtatgctacgctcagtcatatacctttcaaagttactaatgcaactgccaaagagggacagtgtcaatatcattgtcttcattagaaggacggctgccccacactgtgagaacactgctgttcctaacagtagtttacttttagagggatgtgagaattagtttgaccttaattccagatgtgcatgcctcaaaagaaaaatcccattctccttccttttggggagcacttttggtggcaccaaggctggtgtggggtagtggagagagcactgagcttagagtcacaaccagatgaaactgctctggtcttcactagctgtgtgacttgggcaagcagcttgcagtctctgagcctctgagatccctgatggacgaggagaacaatgaccccctccccaggctgtgctgagagagggaattgatcttggatatgaaaatgctgccctggcacagaggtaggagctgagcaacactgctggatgaataaacacatgtaatgcagggtgaacagaacatttcatctgcaacagctgaaggcacagcttacctatgcccatggaaagaactgcgtggaaaattcatttgttgcatttttgccaggttgatgtttgcaaagcagggcactcttctccacatttccccaaaaccaatcagagggagactccacattgtttccatctcctcccctcaaacaattatcaaagccatgtagaacaaacggctgtctgccaactggtagaggcaaagcagccaataatctggacaggggtggcaaactgctcctgcagtttaaccctgcctgactctcccaagcaccagactgtgaagcctggagaacagcctgggggagctgaacaaatgcacaacacctcatgctgtcaagccagaggggaaacttactgggaagaagatgtaggaagaagcctggtcagcccacgcctaaagcacacacctggggaaataaattagctatttctattgcacatctacccacagcctggtccagatctaaatctcttcccctcccagcagtgcagcggcggcagccgcaggctcccccagcgccatctcttcagtcaggctcctctccaggtcctccagctcctggcgcacctcctccatgaagctgccaacttcatactcatcggggacctctctgggcagcaggatctccccatcttggtcacggctccccacgaaggtcggcttgcacacatacaccaggctgtggctgtggggctggcagaggaggccactggcacaagggcatcggtccaaggctccatcaggctctagctcccaggtgatgaggtccagaagccggctggcggggtcatggcaaagctcgccctccacgggcaggggtgtgcacacagggaacagcaggcctctctggaaggcacagcacagccccggctggcagtccctctggttgtcacagatggtcccattgctgcccctggtggccattttggtgcagtgaccccagacacacagctggtctccacagcactcactgtcccgggtgcagagcatcctctggccccggcatggctggcaggtgtactggaagctggcaaactggcagtacatgctgggcccacagtcctcgtcgatgatgcactcgtggctccttctgccttcttcgtctcccacagatgtgataactgtctctgaaaagaccatttgtccagtctggttgttggttatcttgtgaatttctcggtgcacatggatggtattatttccaaccttcgtgtctgtgttggtctcattgtgatagctgggaggtaagtttgccaggttcacttctgatgatgctttagcagcagcttcttctgcctccatctcttccaccgcgctgcgcaatttgtgctgcgtgtcctccatcagttcctcaacctcgcggaacatctcattgagggtggcctcctcctgcgggtagctgagagccgggccgggcttgactggagccgaggtcgccgtcggagcgggcgcgggggccgtggggaccgccgccgccagcagcaggcacagcagggtggccccaagccgctgcatctccgctctgcgcccgcagccgccgccccgactggaccgagttgcgctgcgggccggactggatctgctcgctcccgccgggaggccgccgggctgcgggtgcagatgcgggagcggcgcggtgggcgggccgcgggtgcgggagcgcggcggggtgcggcagcgccggtacccgagggagcccgcaagacgcgccccgcccgcccaccaggctccctctccgcccccgcccggacgcgtgggtcgacccgggaattccnn

SEQ ID NO: 19946 - DNA, 2770 bp, Homo sapiens
  misc_feature 1, 2, 3, 4, 5, 6, 7, 8, 9, 10, 11, 12, 13, 14, 15, 16, 17,2736, 2769, 2770: n = A,T,C or G
nnnnnnnnnnnnnnnnngccccaacccacgatggtctgggagctgcgcccaggacttggcgctggcggccccgcaacagcaccgagcgtttcggtcggcgggcggcggtagcgccccctctcagagccccgctcactcccacctcggctcgctccgagtcggcctgtctgtcgggcccgccctccccgctcactccctccgccctcgtgctccgacccacgcgtccggcacagcctcggattcctccctctcgctgctcgagtcagtttccctatcggcggcagcgggcaaggcggcggcggcggcggcggcagccgcggtggcggcgtggggaacatctcggcagccaccgcgcttctcccgctggagcgggcgtccagcttggctgccctcggtccttccctgccacgtttcgggtcgccctgcaccccccacccaggctcgcttctcttcgaagcgggaagggcgccttgcaggatcctgccgcccctccaaccggatcctgggtctagagctccccagagcgaggcgctcgccaggactcctgccccgccaaccctgaccgccggggggtgcccccgggacgtagcgccgcggagaggaagcggcaaaggggaccatgcggcgcctgactcgtcggctggttctgccagtcttcggggtgctctggatcacggtgctgctgttcttctgggtaaccaagaggaagttggaggtgccgacgggacctgaagtgcagacccctaagccttcggacgctgactgggacgacctgtgggaccagtttgatgagcggcggtatctgaatgccaaaaagtggcgcgttggtgacgacccctataagctgtatgctttcaaccagcgggagagtgagcggatctccagcaatcgggccatcccggacactcgccatctgagatgcacactgctggtgtattgcacggaccttccacccactagcatcatcatcaccttccacaacgaggcccgctccacgctgctcaggaccatccgcagtgtattaaaccgcacccctacgcatctgatccgggaaatcatattagtggatgacttcagcaatgaccctgatgactgtaaacagctcatcaagttgcccaaggtgaaatgcttgcgcaataatgaacggcaaggtctggtccggtcccggattcggggcgctgacatcgcccagggcaccactctgactttcctcgacagccactgtgaggtgaacagggactggctccagcctctgttgcacagggtcaaagaggactacacgcgggtggtgtgccctgtgatcgatatcattaacctggacaccttcacctacatcgagtctgcctcggagctcagaggggggtttgactggagcctccacttccagtgggagcagctctccccagagcagaaggctcggcgcctggaccccacggagcccatcaggactcctatcatagctggagggctcttcgtgatcgacaaagcttggtttgattacctggggaaatatgatatggacatggacatctggggtggggagaactttgaaatctccttccgagtgtggatgtgcgggggcagcctagagatcgtcccctgcagccgagtggggcacgtcttccggaagaagcacccctacgttttccctgatggaaatgccaacacgtatataaagaacaccaagcggacagctgaagtgtggatggatgaatacaagcaatactattacgctgcccggccattcgccctggagaggcccttcgggaatgttgagagcagattggacctgaggaagaatctgcgctgccagagcttcaagtggtacctggagaatatctaccctgaactcagcatccccaaggagtcctccatccagaagggcaatatccgacagagacagaagtgcctggaatctcaaaggcagaacaaccaagaaaccccaaacctaaagttgagcccctgtgccaaggtcaaaggcgaagatgcaaagtcccaggtatgggccttcacatacacccagcagatcctccaggaggagctgtgcctgtcagtcatcaccttgttccctggcgccccagtggttcttgtcctttgcaagaatggagatgaccgacagcaatggaccaaaactggttcccacatcgagcacatagcatcccacctctgcctcgatacagatatgttcggtgatggcaccgagaacggcaaggaaatcgtcgtcaacccatgtgagtcctcactcatgagccagcactgggacatggtgagctcttgaggacccctgccagaagcagcaagggccatggggtggtgcttccctggaccagaacagactggaaactgggcagcaagcagcctgcaaccacctcagacatcctggactgggaggtggaggcagagccccccaggacaggagcaactgtctcagggaggacagaggaaaacatcacaagccaatggggctcaaagacaaatcccacatgttctcaaggccgttaagttccagtcctggccagtcattccctgattggtatctggagacagaaacctaatgggaagtgtttattgttccttttcctacaaaggaagcagtctctggaggccagaaagaaaagccttctttttcactaggccaggactacattgagagatgaagaatggaggttgtttccaaaagaaataaagagaaacttagaagttgtctctaaagaaaaaaaaaaaaaaaaaaaaaanagaaaaaggggggcggcctgctagactcagtcnn

SEQ ID NO: 19947 - DNA, 3313 bp, Homo sapiens
  misc_feature 153: n = A,T,C or G
tccgcgatggtagtcgccgtgcctaccatggtgaccactgttgacggggaatcagggttcgattccggagagggagcctgagaaacggctaccacatccaaggaaggcagcaggcgcgcaaattacccactcccgacccggggaggtagtgancgaaaaataacaatacaggactctttcgaggccctgtaattggaatgattccagctccaatagcgtatattaaagttgctgcagttaaaaagctcgctcggtgcgcgtcgtcccgctccatggcgctcttcgtgcggctgctggctctcgccctggctctggccctgggccccgccgcgaccctggcgggtcccgccaagtcgccctaccagctggtgctgcagcacagcaggctccggggccgccagcacggccccaacgtgtgtgctgtgcagaaggttattggcactaataggaagtacttcaccaactgcaagcagtggtaccaaaggaaaatctgtggcaaatcaacagtcatcagctacgagtgctgtcctggatatgaaaaggtccctggggagaagggctgtccagcagccctaccactctcaaacctttacgagaccctgggagtcgttggatccaccaccactcagctgtacacggaccgcacggagaagctgaggcctgagatggaggggcccggcagcttcaccatcttcgcccctagcaacgaggcctgggcctccttgccagctgaagtgctggactccctggtcagcaatgtcaacattgagctgctcaatgccctccgctaccatatggtgggcaggcgagtcctgactgatgagctgaaacacggcatgaccctcacctctatgtaccagaattccaacatccagatccaccactatcctaatgggattgtaactgtgaactgtgcccggctgctgaaagccgaccaccatgcaaccaacggggtggtgcacctcatcgataaggtcatctccaccatcaccaacaacatccagcagatcattgagatcgaggacacctttgagacccttcgggctgctgtggctgcatcagggctcaacacgatgcttgaaggtaacggccagtacacgcttttggccccgaccaatgaggccttcgagaagatccctagtgagactttgaaccgtatcctgggcgacccagaagccctgagagacctgctgaacaaccacatcttgaagtcagctatgtgtgctgaagccatcgttgcggggctgtctgtagagaccctggagggcacgacactggaggtgggctgcagcggggacatgctcactatcaacgggaaggcgatcatctccaataaagacatcctagccaccaacggggtgatccactacattgatgagctactcatcccagactcagccaagacactatttgaattggctgcagagtctgatgtgtccacagccattgaccttttcagacaagccggcctcggcaatcatctctctggaagtgagcggttgaccctcctggctcccctgaattctgtattcaaagatggaacccctccaattgatgcccatacaaggaatttgcttcggaaccacataattaaagaccagctggcctctaagtatctgtaccatggacagaccctggaaactctgggcggcaaaaaactgagagtttttgtttatcgtaatagcctctgcattgagaacagctgcatcgcggcccacgacaagagggggaggtacgggaccctgttcacgatggaccgggtgctgacccccccaatggggactgtcatggatgtcctgaagggagacaatcgctttagcatgctggtagctgccatccagtctgcaggactgacggagaccctcaaccgggaaggagtctacacagtctttgctcccacaaatgaagccttccgagccctgccaccaagagaacggagcagactcttgggagatgccaaggaacttgccaacatcctgaaataccacattggtgatgaaatcctggttagcggaggcatcggggccctggtgcggctaaagtctctccaaggtgacaagctggaagtcagcttgaaaaacaatgtggtgagtgtcaacaaggagcctgttgccgagcctgacatcatggccacaaatggcgtggtccatgtcatcaccaatgttctgcagcctccagccaacagacctcaggaaagaggggatgaacttgcagactctgcgcttgagatcttcaaacaagcatcagcgttttccagggcttcccagaggtctgtgcgactagcccctgtctatcaaaagttattagagaggatgaagcattagcttgaagcactacaggaggaatgcaccacggcagctctccgccaatttctctcagatttccacagagactgtttgaatgttttcaaaaccaagtatcacactttaatgtacatgggccgcaccataatgagatgtgagccttgtgcatgtgggggaggagggagagagatgtactttttaaatcatgttccccctaaacatggctgttaacccactgcatgcagaaacttggatgtcactgcctgacattcacttccagagaggacctatcccaaatgtggaattgactgcctatgccaagtccctggaaaaggagcttcagtattgtggggctcataaaacatgaatcaagcaatccagcctcatgggaagtcctggcacagtttttgtaaagcccttgcacagctggagaaatggcatcattataagctatgagttgaaatgttctgtcaaatgtgtctcacatctacacgtggcttggaggcttttatggggccctgtccaggtagaaaagaaatggtatgtagagcttagatttccctattgtgacagagccatggtgtgtttgtaataataaaaccaaagaaacataaaaaaaagcggacacgagaccaacacaaacctttgcgcgcggcgtgggcctcagagaagctttaacaaccatcccggttgggcgcgcgggccccagtaggatgtgacactcgggccaacagtgcgtcccacaggagacaccggccagcgcaatgggcggcgttccccccataaaaaaaggccggcgagcacccgcggggtcggacaacataccaagaggggtctcgggccatgcggtcatcacacggagccaggggccgtagtacaccccgcccggcatgagagaaccacacgagacgacgcgagcacaagcacaaccacccgaaaaacacagccacgcaccgccaacacgcacgaaccactacacgcagcacagagcgcatcacgagcacgacaga

SEQ ID NO: 19948 - DNA, 10697 bp, Homo sapiens
ccacgcgtccgcaccacaacaaatgcctgtgactattataaatcagccatctgtgaagccagccgctgcaaagccggcccctgcgaaacctgtggctgccaagcctgtggccacaaagacggccactgttagaccccccagtggcgaccaagcctgaggtccctaggccacaggcagccaaaccagctgccaccaagccagccaccactaagcccatggttaagatgtcccgtgaagtccaggtgtttgagataacagagaacagcgccaaactccactgggagaggcctgagccccccggtccttatttttatgacctcaccgtcacctcagcccatgatcagtccctggttctgaagcagaacctcacggtcacggaccgcgtcattggaggcctgctcgctgggcagacataccatgtggctgtggtctgctacctgaggtctcaggctttcctacaactcatgcccagcagcagcaagcagatgtcaaaaatggtgcggctgctgatataatatttctagtggattcctcttggaccattggagaggaacatttccaacttgttcgagagtttctatatgatgttgtaaaatccttagctgtgggagaaaatgatttccattttgctctggtccagttcaacggaaacccacataccgagttcctgttaaatacgtatcgtactaaacaagaagtcctttctcatatttccaacatgtcttatattgggggaaccaatcagactggaaaaggattagaatacataatgcaaagccacctcaccaaggctgctggaagccgggccggtgacggagtccctcaggttatcgtagtgttaactgatggacactcgaaggatggccttgctctgccctcagcggaacttaagtctgctgatgttaacgtgtttgcaattggagttgaggatgcagatgaaggagcgttaaaagaaatagcaagtgaaccgctcaatatgcatatgttcaacctagagaattttacctcacttcatgacatagtaggaaacttagtgtcctgtgtgcattcatccgtgagtccagaaagggctggggacacggaaacccttaaagacatcacagcacaagactctgctgacattattttccttattgatggatcaaacaacaccggaagtgtcaatttcgcagtcattctcgacttccttgtaaatctccttgagaaactcccaattggaactcagcagatccgagtgggggtggtccagtttagcgatgagcccagaaccatgttttccttggacacctactccaccaaggcccaggttctgggtgcagtgaaagccctcgggtttgctggtggggagttggccaatatcggcctcgcccttgatttcgtggtggagaaccacttcacccgggcagggggcagccgcgtggaggaaggggttccccaggtgctggtcctcataagtgccgggccttctagtgacgagattcgctacggggtggtagcactgaagcaggctagcgtgttctcattcggccttggagcccaggccgcctccagggcagagcttcagcacatagctaccgatgacaacttggtgtttactgtcccggaattccgtagctttggggacctccaggagaaattactgccgtacattgttggcgtggcccaaaggcacattgtcttgaaaccgccaaccattgtcacacaagtcattgaagtcaacaagagagacatagtcttcctggtggatggctcatctgcactgggactggccaacttcaatgccatccgagacttcattgctaaagtcatccagaggctggaaatcggacaggatcttatccaggtggcagtggcccagtatgcagacactgtgaggcctgaattttatttcaatacccatccaacaaaaagggaagtcataaccgctgtgcggaaaatgaagcccctggacggctcggccctgtacacgggctctgctctagactttgttcgtaacaacctattcacgagttcagccggctaccgggctgccgaggggattcctaagcttttggtgctgatcacaggtggtaagtccctagatgaaatcagccagcctgcccaggagctgaagagaagcagcataatggcctttgccattgggaacaagggtgccgatcaggctgagctggaagagatcgctttcgactcctccctggtgttcatcccagctgagttccgagccgccccattgcaaggcatgctgcctggcttgctggcacctctcaggaccctctctggaacccctgaagttcactcaaacaaaagagatatcatctttcttttggatggatcagccaacgttggaaaaaccaatttcccttatgtgcgcgactttgtaatgaacctagttaacagccttgatattggaaatgacaatattcgtgttggtttagtgcaatttagtgacactcctgtaacggagttctctttaaacacataccagaccaagtcagatatccttggtcatctgaggcagctgcagctccagggaggttcgggcctgaacacaggctcagccctaagctatgtctatgccaaccacttcacggaagctggcggcagcaggatccgtgaacacgtgccgcagctcctgcttctgctcacagctgggcagtctgaggactcctatttgcaagctgccaacgccttgacacgcgcgggcatcctgactttttgtgtgggagctagccaggcgaataaggcagagcttgagcagattgcttttaacccaagcctggtgtatctcatggatgatttcagctccctgccagctttgcctcagcagctgattcagcccctaaccacatatgttagtggaggtgtggaggaagtaccactcgctcagccagagagcaagcgagacattctgttcctctttgacggctcagccaatcttgtgggccagttccctgttgtccgtgactttctctacaagattatcgatgagctcaatgtgaagccagaggggacccgaattgcggtggctcagtacagcgatgatgtcaaggtggagtcccgttttgatgagcaccagagtaagcctgagatcctgaatcttgtgaagagaatgaagatcaagacgggcaaagccctcaacctgggctacgcgctggactatgcacagaggtacatttttgtgaagtctgctggcagccggatcgaggatggagtgcttcagttcctggtgctgctggtcgcaggaaggtcatctgaccgtgtggatgggccagcaagtaacctgaagcagagtggggttgtgcctttcatcttccaagccaagaacgcagaccctgctgagttagagcagatcgtgctgtctccagcgtttatcctggctgcagagtcgcttcccaagattggagatcttcatccacagatagtgaatctcttaaaatcagtgcacaacggagcaccagcaccagtttcaggtgaaaaggacgtggtgtttctgcttgatggctctgagggcgtcaggagcggcttccctctgttgaaagagtttgtccagagagtggtggaaagcctggatgtgggccaggaccgggtccgcgtggccgtggtgcagtacagcgaccggaccaggcccgagttctacctgaattcatacatgaacaagcaggacgtcgtcaacgctgtccgccagctgaccctgctgggagggccgacccccaacaccggggccgccctggagtttgtcctgaggaacatcctggtcagctctgcgggaagcaggataacagaaggtgtgccccagctgctgatcgtcctcacggccgacaggtctggggatgatgtgcggaacccctccgtggtcgtgaagaggggtggggctgtgcccattggcattggcatcgggaacgctgacatcacagagatgcagaccatctccttcatcccggactttgccgtggccattcccacctttcgccagctggggaccgtccaacaggtcatctctgagagggtgacccagctcacccgcgaggagctgagcaggctgcagccggtgttgcagcctctaccgagcccaggtgttggtggcaagagggacgtggtctttctcatcgatgggtcccaaagtgccgggcctgagttccagtacgttcgcaccctcatagagaggctggttgactacctggacgtgggctttgacaccacccgggtggctgtcatccagttcagcgatgaccccaaggtggagttcctgctgaacgcccattccagcaaggatgaagtgcagaacgcggtgcagcggctgaggcccaagggagggcggcagatcaacgtgggcaatgccctggagtacgtgtccaggaacatcttcaagaggcccctggggagccgcattgaagagggcgtcccgcagttcctggtcctcatctcgtctggaaagtctgacgatgaggtggacgacccggcggtggagctcaagcagtttggcgtggcccctttcacgatcgccaggaacgcagaccaggaggagctggtgaagatctcgctgagccccgaatatgtgttctcggtgagcaccttccgggagctgcccagcctggagcagaaactgctgacgcccatcacgaccctgacctcagagcagatccagaagctcttagccagcactcgctatccacctccagcagttgagagtgatgctgcagacattgtctttctgatcgacagctctgagggagttaggccagatggctttgcacatattcgagattttgttagcaggattgttcgaagactcaacatcggccccagtaaagtgagagttggggtcgtgcagttcagcaatgatgtcttcccagaattctatctgaaaacctacagatcccaggccccggtgctggacgccatacggcgcctgaggctcagaggggggtccccactgaacactggcaaggctctcgaatttgtggcaagaaacctctttgttaagtctgcggggagtcgcatagaagacggggtgccccaacacctggtcctggtcctgggtggaaaatcccaggacgatgtgtccaggttcgcccaggtgatccgttcctcgggcattgtgagtttaggggtaggagaccggaacatcgacagaacagagctgcagaccatcaccaatgaccccagactggtcttcacagtgcgagagttcagagagcttcccaacatagaagaaagaatcatgaactcgtttggaccctccgcagccactcctgcacctccaggggtggacacccctcctccttcacggccagagaagaagaaagcagacattgtgttcctgttggatggttccatcaacttcaggagggacagtttccaggaagtgcttcgttttgtgtctgaaatagtggacacagtttatgaagatggcgactccatccaagtggggcttgtccagtacaactctgaccccactgacgaattcttcctgaaggacttctctaccaagaggcagattattgacgccatcaacaaagtggtctacaaagggggaagacacgccaacactaaggtgggccttgagcacctgcgggtaaaccactttgtgcctgaggcaggcagccgcctggaccagcgggtccctcagattgcctttgtgatcacgggaggaaagtcggtggaagatgcacaggatgtgagcctggccctcacccagaggggggtcaaagtgtttgctgttggagtgaggaatatcgactcggaggaggttggaaagatagcgtccaacagcgccacagcgttccgcgtgggcaacgtccaggagctgtccgaactgagcgagcaagttttggaaactttgcatgatgcgatgcatgaaaccctttgccctggtgtaactgatgctgccaaagcttgtaatctggatgtgattctggggtttgatggttctagagaccagaatgtttttgtggcccagaagggcttcgagtccaaggtggacgccatcttgaacagaatcagccagatgcacagggtcagctgcagcggtggccgctcgcccaccgtgcgtgtgtcagtggtggccaacacgccctcgggcccggtggaggcctttgactttgacgagtaccagccagagatgctcgagaagttccggaacatgcgcagccagcacccctacgtcctcacggaggacaccctgaaggtctacctgaacaagttcagacagtcctcgccggacagcgtgaaggtggtcattcattttactgatggagcagacggagatctggctgatttacacagagcatctgagaacctccgccaagaaggagtccgtgccttgatcctggtgggccttgaacgagtggtcaacttggagcggctaatgcatctggagtttgggcgagggtttatgtatgacaggcccctgaggcttaacttgctggacttggattatgaactagcggagcagcttgacaacattgccgagaaagcttgctgtggggttccctgcaagtgctctgggcagaggggagaccgcgggcccatcggcagcatcgggccaaagggtattcctggagaagacggctaccgaggctatcctggtgatgagggtggacccggtgagcgtggtccgcctggtgtgaacggcactcaaggtttccagggctgcccgggccagagaggagtaaagggctctcggggattcccaggagagaagggcgaagtaggagaaattggactggatggtctggatggtgaagatggagacaaaggattgcctggttcttctggagagaaagggaatcctggaagaaggggtgataaaggacctcgaggagagaaaggagaaagaggagatgttgggattcgaggggacccgggtaacccaggacaagacagccaggagagaggacccaaaggagaaaccggtgacctcggccccatgggtgtcccagggagagatggagtacctggaggacctggagaaactgggaagaatggtggctttggccgaaggggaccccccggagctaagggcaacaagggcggtcctggccagctgggctttgagggagagcaggggaccagaggtgcacagggcccagctggtcctgctggtcctccagggctgataggagaacaaggcatttctggacctcggggaagcggaggtgccgctggtgctcctggagaacgaggcagaaccggtccactgggaagaaagggtgagcccggagagccaggaccaaaaggaggaatcggcaaccggggccctcgtggggagacgggagatgacgggagagacggagttggcagtgaaggacgcagaggcaaaaaaggagaaagaggattccctggatacccaggaccaaagggtaacccaggtgaacctgggctaaatggaacaacaggacccaaaggcatcagaggccgaaggggaaattcgggacctccagggatagttggacagaagggagaccctggctacccaggaccagctggtcccaagggcaacaggggcgactccatcgatcaatgtgccctcatccaaagcatcaaagataaatgcccttgctgttacgggcccctggagtgccccgtcttcccaacagaactagcctttgctttagacacctctgagggagtcaaccaagacactttcggccggatgcgagatgtggtcttgagtattgtgaatgacctgaccattgctgagagcaactgcccacggggggcccgggtggctgtggtcacctacaacaacgaggtgaccacggagatccggtttgctgactccaagaggaagtcggtcctcctggacaagattaagaaccttcaggtggctctgacatccaaacagcagagtctggagactgccatgtcgtttgtggccaggaacacatttaagcgtgtgaggaatggattcctaatgaggaaagtggctgttttcttcagcaacacacccacaagagcatccccacagctcagagaggctgtgctcaagctctcagatgcggggatcacccccttgttccttacaaggcaggaagaccggcagctcatcaacgctttgcagatcaataacacagcagtggggcatgcgcttgtcctgcctgcagggagagacctcacagacttcctggagaatgtcctcacgtgtcatgtttgcttggacatctgcaacatcgacccatcctgtggatttggcagttggaggccttccttcagggacaggagagcggcagggagcgatgtggacatcgacatggctttcatcttagacagcgctgagaccaccaccctgttccagttcaatgagatgaagaagtacatagcatacctggtcagacaactggacatgagcccagatcccaaggcctcccagcacttcgccagagtggcagttgtgcagcacgcgccctctgagtccgtggacaatgccagcatgccacctgtgaaggtggaattctccctgactgactatggctccaaggagaagctggtggacttcctcagcaggggaatgacacagttgcagggaaccagggccttaggcagtgccattgaatacaccatagagaatgtctttgaaagtgccccaaacccacgggacctgaaaattgtggtcctgatgctgacgggcgaggtgccggagcagcagctggaggaggcccagagagtcatcctgcaggccaaatgcaagggctacttcttcgtggtcctgggcattggcaggaaggtgaacatcaaggaggtatacaccttcgccagtgagccaaacgacgtcttcttcaaattagtggacaagtccaccgagctcaacgaggagcctttgatgcgcttcgggaggctgttgccatccttcgtcagcagtgaaaatgctttttacttgtccccagatatcaggaaacagtgtgattggttccaaggggaccaacccacaaagaaccttgtgaagtttggtcacaaacaagtaaatgttccgaataacgttacttcaagtcctacatccaacccagtgacgacaacgaagccggtgactacgacgaagccggtgaccaccacaacaaagcctgtaaccaccacaacaaagcctgtgactattataaatcagccatctgtgaagccagccgctgcaaagccggcccctgcgaaacctgtggctgccaagcctgtggccacaaagatggccactgttagacccccagtggcggtgaagccagcaacggcagcgaagcctgtagcagcaaagccagcagctgtaagaccccccgctgctgctgctgcaaaaccagtggcgaccaagcctgaggtccctaggccacaggcagccaaaccagctgccaccaagccagccaccactaagcccatggttaagatgtcccgtgaagtccaggtgtttgagataacagagaacagcgccaaactccactgggagaggcctgagccccccggtccttatttttatgacctcaccgtcacctcagcccatgatcagtccctggttctgaagcagaacctcacggtcacggaccgcgtcattggaggcctgctcgctgggcagacataccatgtggctgtggtctgctacctgaggtctcaggtcagagccacctaccacggaagtttcagtacaaagaaatctcagcccccacctccacagccagcaaggtcagcttctagttcaaccatcaatctaatggtgagcacagaaccattggctctcactgaaacagatatatgcaagttgccgaaagacgaaggaacttgcagggatttcatattaaaatggtactatgatccaaacaccaaaagctgtgcaagattctggtatggaggttgtggtggaaacgaaaacaaatttggatcacagaaagaatgtgaaaaggtttgcgctcctgtgctcgccaaacccggagtcatcagtgtgatgggaacctaagcgtgggtggccaacatcatatacctcttgaagaagaaggagtcagccatcgccaacttgtctctgtagaagctccgggtgtagattcccttgcactgtatcatttcatgctttgatttacactcgaactcgggagggaacatcctgctgcatgacctatcagtatggtgctaatgtgtctgtggaccctcgctctctgtctccaggcagttctctcgaatactttgaatgttgtgtaacagttagccactgctggtgtttatgtgaacattcctatcaatccaaattccctctggagtttcatgttatgcctgttgcaggcaaatgtaaagtctagaaaataatgcaaatgtcacggctactctatatacttttgcttggttcattttttttcccttttagttaagcatgactttagatgggaagcctgtgtatcgtggagaaacaagagaccaactttttcattccctgcccccaatttcccagactagatttcaagctaattttctttttctgaagcctctaacaaatgatctagttcagaaggaagcaaaatcccttaatctatgtgcaccgttgggaccaatgccttaattaaagaatttaaaaaagttgtaatagagaatatttttggcattcctctaatgttgtgtgtttttttttttttgtgtgctggagggaggggatttaattttaattttaaaatgtttaggaaatttatacaaagaaactttttaataaagtatattgaaagtttaaaaaaaaaaaa

SEQ ID NO: 19949 - DNA, 6837 bp, Homo sapiens
  misc_feature 6836, 6837: n = A,T,C or G
taaaacacccaaagaataacgcctttcacaaatgtttattttgctaggtgtatgaacagttaaagccagcctgaaagataaaaaatactaactcttgatttcgatttcttacattttctgctccaaagtacaaaggaacttaaatttgaagttataaaacggatcccacattgtttctgtaattatcatttcgcagtattggtaataggaataacatctttgtcgaataaccattcctaaaacttacttttagactcattcttacatattaatttgcaaataagcaaatgttaaggacagtatcaaaaaagactttaaaacacatctagtgaacgttctgagttacttctagtttcgaaaattctattgaattccaaggtcacatgtattatgtacattaaacttgtttccctaaataaaagttactgatatgggaaagttgctttaggggaattttcgctagtaaatccataatccttaaaattctaagtgaattaaacattgatactttgcaaatatttacagcagtgtaaatattactttttaaaggtgcgttagtttcaagaatgctggggtcctacaagcatgatgacactttgtaacacatactttttttttggtcttttcctctgctttctaaatctcttaattgccataagtattaaatagaactgatgtcaaggtatcttctgttcaagatggatgtttactaaacatgcaaagtatttttagagatatagattctaatttggaagaagaaaaatagcaacaaattttcttattcatttcttttctcatctttaaaatacaagttaaatcgtaattggaatcccttttcccatcgtgtagtcaagagtctgtgccagacttgaaggctttactttgttagccatgtgtttatgaacccccagcgctttccctagatcttttggctgataatctcaaacatggaggatgcttctgaatcttcacgaggggttgctccattaattaataatgtagttctcccaggctctccgctgtctcttcctgtatcagtgacaggctgtaaaagtcatcgagtagccaataaaaaggtagaagcgaggagtgaaaagctcctcccaacagctcttcctccttcagagccgaaagtagatcagaaacttcccaggagctccgagaggcggggaagtggcggtgggacgcaattccccgcgcggagtcgggcagtggcagcgggagaagcggcagccaggggcgcggcggggccggagagaggcggtcccctgggaggacggggtctcccctcgttgcctttgtagtggagaaggtggacaagtggcagtcggcgtgatcgcagggaagcggggccggcgcgggcggccgagggtccaggcgagcccgcgggcggacgggagatgccgctgctacaccgaaagccgtttgtgagacagaagccgcccgcggacctgcggcccgacgaggaagttttctactgtaaagtcaccaacgagatcttccgccactacgatgacttttttgaacgaaccattctgtgcaacagccttgtgtggagttgtgctgtgacgggtagacctggactgacgtatcaggaagcacttgagtcagaaaaaaaagcaagacagaatcttcagagttttccagaaccactaattattccagttttatacttgaccagccttacccatcgttcgcgcttacatgaaatttgtgatgatatctttgcatatgtcaaggatcgatattttgtcgaagaaactgtggaagtcattaggaacaatggtgcaaggttgcagtgtaggattttggaagtcctccctccatcacatcaaaatggttttgctaatggacatgttaacagtgtggatggagaaactattatcatcagtgatagtgatgattcagaaacacaaagctgttcttttcaaaatgggaagaaaaaagatgcaattgatcccttactattcaagtataaagtgcaacccactaaaaaagaattacatgagtctgctattgttaaagcaacacaaatcagccggagaaaacacctattttctcgtgataaactaaagctttttctgaagcaacactgtgaaccacaagatggagtcattaaaataaaggcatcatctctttcaacgtataaaatagcagaacaagatttttcttatttcttccctgatgatccacccacatttatcttcagtcctgctaacagacgaagagggagacctcccaaacgaatacatattagtcaagaggacaatgttgctaataaacagactcttgcaagttataggagcaaagctactaaagaaagagataaacttttgaaacaagaagaaatgaagtcactggcttttgaaaaggctaaattaaaaagagaaaaagcagatgccctagaagcgaagaaaaaagaaaaagaagataaagagaaaaagagggaagaattgaaaaaaattgttgaagaagagagactaaagaaaaaagaagaaaaagagaggcttaaagtagaaagagaaaaggaaagagagaagttacgtgaagaaaagcgaaagtatgtggaatacttaaaacagtggagtaaacctagagaagatatggaatgtgatgaccttaaggaacttccagaaccaacaccagtgaaaactagactacctcctgaaatctttggtgatgctctgatggttttggagttccttaatgcatttggggaactttttgatcttcaagatgagtttcctgatggagtaaccctagaagtattagaggaagctcttgtaggaaatgacagtgaaggcccactgtgtgaattgctttttttcttcctgactgcaatcttccaggcaatagctgaagaagaagaggaagtagccaaagagcaactaactgatgctgacaccaaaggctgcagtttgaaaagtttggatcttgatagctgcactctttcagaaatcctcagactgcacatcttagcttcaggtgctgatgtaacatcagcaaatgcaaagtatagatatcaaaaacgaggaggatttgatgctacagatgatgcttgtatggagcttcgtttgagcaatcccagtctagtgaagaaactgtcaagcacctcagtgtatgatttgacaccaggagaaaaaatgaagatactccatgctctctgtggaaagctactgaccctagtttcaactagggattttattgaagattatgttgatatattacgacaggcaaagcaggagttccgggaattaaaagcagaacaacatcgaaaagagagggaagaagcagctgccagaattcgtaaaaggaaggaagaaaaacttaaggagcaagaacaaaaaatgaaagagaaacaagaaaaactgaaagaagatgagcaaagaaattcaacggcagatatatctattggggaggaagaaagggaagattttgatactagcattgagagcaaagacacagagcaaaaggaattagatcaagatatggtcactgaagatgaagatgacccaggatcacataaaagaggcagaagggggaaaagaggacaaaatggatttaaagaatttacaaggcaagaacagatcaactgtgtaacaagagagcctcttactgctgatgaggaagaagcattaaaacaggaacaccaacgaaaagagaaagagctcttagaaaaaatccaaagtgccatagcctgtaccaatatctttcccttgggtcgcgaccgcatgtatagacgatactggattttcccttctattcctggactctttattgaagaggattattctggtcttactgaagacatgctgttgcctagaccttcatcatttcagaataatgtacagtctcaagatcctcaggtatccactaaaactggagagcctttgatgtctgaatctacctccaacattgaccaaggtccacgtgaccattctgtgcagctgccaaaaccagtgcataagccaaatcggtggtgcttttacagttcttgtgaacagctagaccagcttattgaagctcttaattctagaggacatagagaaagtgccttaaaagaaactttgttacaagagaaaagcagaatatgtgcacagctagcccgtttttctgaagagaaatttcatttttcagacaaacctcagcctgatagcaaaccaacatatagtcggggaagatcttccaatgcatatgatccatctcagatgtgtgcagaaaagcaacttgaactaaggctgagagattttcttttagatattgaagatagaatctaccaaggaacattaggagccatcaaggttacagatcgacatatctggagatcagcattagaaagtggacggtatgagctgttaagtgaggaaaacaaggaaaatgggataattaaaactgtgaatgaagacgtagaagagatggaaattgatgaacaaacaaaggtcatagtaaaagacagacttttggggataaaaacagaaactccaagtactgtatcaacaaatgcaagtacaccacaatcagtgagcagtgtggttcattatctggcaatggcactctttcaaatagagcagggcattgagcggcgttttctgaaagctccacttgatgccagtgacagtgggcgttcttataaaacagttctggaccgttggagagagtctctcctttcttctgctagtctatcccaagtttttcttcacctatccaccttggatcgtagcgtgatatggtctaaatctatactgaatgcgcgttgcaagatatgtcgaaagaaaggcgatgctgaaaacatggttctttgtgatggctgtgataggggtcatcatacctactgtgttcgaccaaagctcaagactgtgcctgaaggagactggttttgtccagaatgtcgaccaaagcaacgttctagaagactctcctctagacagagaccatccttggaaagtgatgaagatgtggaagacagtatgggaggtgaggatgatgaagttgatggcgatgaagaagaaggtcaaagtgaggaggaagagtatgaggtagaacaagatgaagatgactctcaagaagaggaagaagtcagcctacccaaacgaggaagaccacaagttagattgccagttaaaacaagagggaaacttagctcttctttctcaagtcgtggccaacaacaagaacctggaagatacccttcaaggagtcagcagagcacacccaaaacaactgtttcttctaaaactggtagaagcctaagaaagataaactctgctcctcctacagaaacaaaatctttaagaattgccagtcgttctactcgccacagtcatggcccactgcaagcagatgtatttgtggaattgcttagtcctcgtagaaaacgcagaggcaggaaaagtgctaataatacaccagaaaatagtcccaacttccctaacttcagagtcattgccacaaagtcaagtgaacagtcaagatctgtaaatattgcttcaaaactttctctccaagagagtgaatccaaaagaagatgcagaaaaagacaatctccagagccatcgcctgtgacactgggtcgaaggagttctggccgacagggaggagttcatgaattgtctgcttttgaacaacttgttgtagaattggtacgacatgatgacagctggccttttttgaaacttgtttctaaaatccaggtcccagactactatgacatcatcaaaaagcccattgccttaaatataattcgtgaaaaagtgaataagtgtgaatataaattagcatctgagtttattgatgacattgagttaatgttttcgaactgctttgaatacaaccctcgtaacacaagtgaagcaaaagctggaactaggcttcaagcattttttcatattcaggctcaaaagcttggactccacgtcacacccagtaatgtggaccaagttagcacaccaccggctgcgaaaaagtcacgaatctgactttgtccttctaaaggatatatttgaagaaaaacaaattgttcatgaaaatggaacattaaatcatgctgtataaagcaataacaattgattgaccacatgaaagtgtggcctgcactatattctcaattttaatattaagcactcaggagaatgtaggaaagatatcctttgctacagttttgttcagtatctaataagtttgatagatgtattggatacagtactggtttacagaggtttttgtacatttttgagatcattcatgtgtccagagatcttggaaaatattttttcacccacgatttattttgttattgatgatttttttttaaagtggtggtattaagggagagttatctacatggatgagtcttccgctatagcacagtttagaaaaggtgtttatgtcttaattaattgtttgagtacattctttcaacactacacatgaatgaatccaatcttataaccttgaagtgctgtaccagtgctggctgcaggtattaagtccaagtttattaactagatatttatttagtattgagagtaatttgtgaatttgttttgtatttataaaatttatacctgaaaaatgttccttaatgttttaaaccttttactgtgtttttattcctctaacttccttaatgatcaatcaaaaaaagtaacaccctccctttttcctgacagttctttcagctttacagaactgtattataagtttctatgtataactttttaactgtacaaataaaataacattttttcaaaaaaaaaaaaaaaagtcgtcgcggccgcgccgttagtagtagtaggcggccgctctagaggatccaagcttacgtacgcgtgcatgcnn

SEQ ID NO: 19950 - DNA, 4335 bp, Homo sapiens
  misc_feature 4335: n = A,T,C or G
tatagggagtcgacccacgcgtcccggctgagctgagtctcgctgctcggtgcgaggcggcggagagcgaggcctggtgagcaccgccgaggcgcgggccagctcttcgaggttgtgcgcgggagtggcacggcgggcgggcgagcgaggggctaacttcagcggtggcaccgggatcggttgccttgagcctgaaatcatgaccaccccaggaaaagagaactttcgcctgaaaagttacaagaacaaatctctgaatcccgatgagatgcgcaggaggagggaggaagaaggactgcagttacgaaagcagaaaagagaagagcagttattcaagcggagaaatgttgctacagcagaagaagaaacagaagaagaagttatgtcagatggaggctttcatgaggctcagattaataacatggagatggcaccaggtggtgtcatcacttctgacatgattgaaatgatattttccaaaagcccagagcaacagctttcagcaacacagaaattcaggaagctgctttcaaaagaacctaaccctcctattgatgaagttatcagcacaccaggagtagtggccaggtttgtggagttcctcaaacgaaaagagaattgtacactgcagtttgaatcagcttgggtactgacaaatattgcttcaggaaattctcttcagacccgaattgtgattcaggcaggagctgtgcccatcttcatagagttgctcagctcagagtttgaagatgtccaggaacaggcagtctgggctcttggcaacattgctggagatagtaccatgtgcagggactatgtcttagactgcaatatccttccccctcttttgcagttattttcaaagcaaaaccgcctgaccatgacccggaatgcagtatgggctttgtctaatctctgtagagggaaaagtccacctccagaatttgcaaaggtttctccatgtctgaatgtgctttcctggttgctgtttgtcagtgacactgatgtactggctgatgcctgctgggccctctcatatctatcagatggacccaatgataaaattcaagcggtcatcgatgcgggagtatgtaggagacttgtggaactgctgatgcataatgattataaagtggtttctcctgctttgcgagctgtgggaaacattgtcacaggggatgatattcagacacaggtaattctgaattgctcagctctgcagagtttattgcatttgctgagtagcccaaaggaatctatcaaaaaggaagcatgttggacgatatctaatattacagctggaaatagggcacagatccagactgtgatagatgccaacattttcccagccctcattagtattttacaaactgctgaatttcggacaagaaaagaagcagcttgggccatcacaaatgcaacttctggaggatcagctgaacagatcaagtacctagtagaactgggttgtatcaagccgctctgtgatctcctcacggtcatggactctaagattgtacaggttgccctaaatggcttggaaaatatcctgaggcttggagaacaggaagccaaaaggaatggcactggcattaacccttactgtgctttgattgaagaagcttatggtctggataaaattgagttcttacagagtcatgaaaaccaggagatctaccaaaaggcctttgatcttattgagcattacttcgggaccgaagatgaagacagcagcattgcaccccaggttgaccttaaccagcagcagtacatcttccaacagtgtgaggctcctatggaaggtttccagctttgaagcaatactctgctttcacgttcctgtgtcagaccaggctacccagtcgagtcctcttgtggagcccacagtcctcatggagctaacttctcaaatgttttccataatactgtttgcgctcatttgcttgccttgcgcacctgctctcttacacacatctggaaaacctccggctctctgtggtggaatacccttctaataaaagggtaaccagaacggcccactctcttttacggaaaaatccctaggctttggagatccgcacttacattagagttatgggaatatacacatattaatgtggctccctttttcttgtgggggaataaaagaggactcctcctcattccctttaacatgggggaaaaaactgacattaaaagatgagactaaatctttatcttgaattttacacaactacttacgacaagggagatgtttagacctgttgtgtatacttcagagtacttttcatgagttcttccacagtgaacccttggattacctggtggctttttctagccagatttgcattaatccttactgagattggatggttttctttcctctattggcgccattcttcagatattaaagttaaaccatccactccctcaccttcagccttcagtgaatgtgctttctagttgtcaggaatgctgaagaattaacactttgactcctaaatgtgatactggtttgtagattcccttagagcagaaaggagaggggcacatattaatttgtatcgcttttgcttctctttggtcttttgtgtcttagaatttggaagtggttcatttctgttgctggtatgaggatttcgaatacttagtaatcgaaaaccatatcctgtaatttaataaaaaaaactaaggacgaaaaaaccctccaattttcccaaatgcaatcagtgtaactaggggctgtgtttctgcattaaaataaatgtttcaggctttgtggtcctgatcaaggtcctcattaaaaaattggagttcaccctaggtgcttttcccctctgtgactggcagataacacatacttttgaaagtaactttgggatttttttcttaggtgcagctcgattctaatcttttcatgctgcacacgattcctttaatgtagcatccttatctgaaagaaataaccatcttctcaacatgacctgcttaacccaaataagaacagtgatcttataacctcattgtttcctaatcattttatttcatctcctgctagtactgtgccgcttccccctccccccacacaaaataaaaacagtatctgccttctggctcatttaatgatgactgcaatctgtacctgcaaatggcgcttccagtactgtgttcagtgatccacatttgtgcttggactggaatgaaaaaatacgcttaattgccaagacaactgcaaatgagttcaatacgacttctcggtgctagttggccatcttgactcaatgttgggatacactaccagagaagatttttttgttgatgtgctgttcaaagtgaattctgaaggaaaaggttgctcacctctgtttcagagcatacccttttaaacctttttagacttgtcctcttctagaattcattataaccccaaagtgtaaaaactatttggaagttgcccctgacaagctattatacatctctggtaaatcctgctgaatgtaagggatattcagagcttttcatacctcatcatgatgttatttaagcagccaacttatgtgacctgatttaaacttttaaaaaatccacttcattcaaactagaaagagtcaaagacaaaggacatttatcagccaagagtgtgacgcattcttcgcatctagtctgtagtagtgtctgtgctctgggatggataccgtctgatgtctgtttgttattgatggcgcagccactgcaaaactagtcaactcccatctataactgttactttttctagtgctgctttgtgctgagagaacattttagtttactgcacttgacctgtaaaagactgattctttgtaattttagggataaattaggtggttaatttaaagaagaaatttcaatgttgcctttacatcacattaaaatataacttctttcagaaggataatagaagcactgattcatagtaaaaatcttgtttttagctttgacttttttgtggctgttttttaaaattgtaaattactagtaacatgtcatttctataggatgttttaaattatgtaccttccattggatagttaaaataatttcattttataagccaatttgagtgggaaagatacaaagcacacagttgtctccccacattaggaagagtagtgtgcattcagacttggacgttgctcatcgaatctcggggcattcacagtcttacgcggttatgggcaacaggaatccgccaactcagaaataactgtcttgaaaaaagtccagtaacgagcacagaacacctatactcaccgccacaagcattaacacaataaaacgaaacacgtgtcatctaan

SEQ ID NO: 19951 - DNA, 1383 bp, Homo sapiens
  misc_feature 1, 1375, 1376, 1377, 1378, 1379, 1380, 1381, 1382, 1383: n = A,T,C or G
nagtcgccacgcgtccggggctgccagggaggaggaagatggcggcgggggcgaggtgaggtgttggcagtggaaaggggttcgggctcggggggcggggggacgcggagcgatggcccgcgccggccgcaggggcggataaaaagccgtcgcgctgcgggagtgggcgggagggagagggggtgtccgagggccacaagagtatgacggggctgtacgagctggtgtggcgggtgctgcacgcgctgctctgtctgcaccgcacgctcacctcctggctccgcgttcggttcggcacctggaactggatctggcggcgctgctgccgcgccgcctctgccgcggtcctagcgccgctcggcttcacgctccgcaagcccccggcagtcggcaggaaccgccgtcaccaccggcacccgcgcggggggtcgtgcctggcagccgcacaccaccggatgcgctggcgcgcggacggtcgttccttggagaagctgcctgtgcatatgggcctggtgatcaccgaggtggagcaggaacccagcttctcggacatcgcgagcctcgtggtgtggtgtatggccgtgggcatctcctacattagcgtctacgaccaccaaggtattttcaaaagaaataattccagattgatggatgaaattttaaaacaacagcaagaacttctgggcctagattgttcaaaatactcaccagaatttgcaaatagtaatgacaaagatgatcaagttttaaattgccatttggcagtgaaggtgctgtctccggaagatggaaaagcagatattgtaagagctgctcaggacttttgccagttagtagcccagaagcaaaagagacccacagatttggatgtagatacgttagccagtttacttagttcaaatggttgtcctgatcctgatttagtattgaagttcggtcctgtggacagcacattaggctttcttccctggcacatcagattgactgagattgtctctttgccttcccacctaaacatcagttatgaggactttttctctgcccttcgtcaatatgcagcctgtgaacagcgtctgggaaagtagtggtcattggttgcataatttgatttgaggcttgtggaggaaaggaaccaagtgactctgatgtttacaaagcacctatgaaaccctgtacacacctagttcataatcctcataatttatcaacaaacacaaaaaagtgtcttacttggagctgcactcttgttggtgccgtgcacggtcacagttgctgacggcatgctgtgagaacactaaagcggcactggggcagagacatgatcccacattggaacagggaggtaaaacaacggccatgagaagcgcgcatcaannnnnnnnn

SEQ ID NO: 19952 - DNA, 1757 bp, Homo sapiens
  misc_feature 1, 2, 1753, 1754, 1755, 1756, 1757: n = A,T,C or G
nncgggattgttcacgacagcgtggtttgtcccccgcgcctttttttaattgggtgaggaaacccgcgaccttttcttgcccgcggtttttcttttggggacactcgttttggaccccggtgtcaccgctatacatcatctgggggccccgccgcgcccacaacggaaatgggttctttgagaaagctcttttctccagggggccgaagggcgcgcccgcaactctcgtttctttttttggtttttttttttttttttttgcagacaaagtaaaatttattgagacagacagaaatgcacctactcaggactacagttaagcatttactattaaccaaagagttgtgttcacattccagataagtctacgtggaaaagcattcagaatttactaggtttttgctacatcactatttcatctacaatagggacaacaaactgacactcaggatttgatgggctctcattacaatgctatacatttaacaggaacaaacatcagtgactttgagaaaaagttataaaaagaccaaaaccacccactgtagaatgggctcttggatgttactgtacagcgtggtcaaggtaacaagaagaaaaaaatgtgagtggcatcctgggatgagcagggggacagacctggacagacacgttgtcatttgctgctgtgggtaggaaaatgggcgtaaaggaggagaaacagatacaaaatctccaactcagtattaaggtattctcatgcctagaatattggtagaaacaagaatacattcatatggcaaataactaaccatggtggaacaaaattctgggatttaagttggataccaaggaaattgtattaaaagagctgttcatggaataagaataaaactgttcattaagaacttttcaaaagtgaattagtgaggattcagcttaatacctgtatcaaatgaggaagtggtttattacaatatttttataatcagtattttatgtgtacttggtcactatacaagtgacttcttgtcactggtacaagtggactttttggaggactatttccaagaagaagaaagcaaacattctacttctaaggataaggtaactcattacaatctttagtactcatggaaagtattaaagatctttaaaaaaatcgaatgctgtcatgtcaaagtgaggcatgaaaagtattattaatgtggctccatcgatttgggggttccaatctgaggagggctttttatttaatgttttaatgaatcaaaatatcttcttagaatgtctctgaaaatggcatctcattaccttactgggaactgtctgttgagcactcttctccatcattaagttaatgctaaggatctttaagtgtcatcttaatttgatacttgtcataagataattaggcaaattaaaatcagtggttcaccctgttcctagaagtttttctaagtgaaatcaatttttcaattttaatttgttctcttgtacattttcctaagctcaaaggagatagtaacaatggttttctttgatgatctaaagtgagattttacaatgtcgtgatttttaatatacttcatagtaattttattgcaattaagcacctgttttctaaattatctcagttttgttcaagagagaaaaaaaatattgaaacaaaggtgatggagttgagatcccaaaacagagtttgcctatggtctgtcttcctatggggaaagtaagtacaaaacctcagggttatttacgaagccaaaggacnnnnn

SEQ ID NO: 19953 - DNA, 2874 bp, Homo sapiens
  misc_feature 1, 2, 3, 2864, 2865, 2866, 2867, 2868, 2869, 2870, 2871,2872, 2873, 2874: n = A,T,C or G
nnncgcgtccgtgcgtccgcgccgccgccgcctccgccttggagctcggggtgtttcggggactgcggccacaggcaggaaggcgctcctctcctgccccgccgacgcccggccagcccgcttcgccctgacctgtttcctcatgactgcccccggccctgctgccgacggacgtcgccccggcgtccggatttaacacggaaacccggatcggaggccgcgcggggaggaggagggcgacccggtcggtcctgcgaccctctcggcccggctcggcgcctcggcgggagccatgacctcgctgacccagcgcagctccggcctggtgcagcggcgcaccgaggcctcccgcaacgccgccgacaaggagcgggcggcgggcggcggcgccggcagcagcgaggacgacgcgcagagccgccgcgacgagcaggacgacgacgacaagggcgactccaaggaaacgcggctgaccctgatggaggaagtgctcctgctgggcctcaaggaccgcgagggttacacatcattttggaatgactgtatatcatctggattacgtggctgtatgttaattgaattagcattgagaggaaggttacaactagaggcttgtggaatgagacgtaaaagtctattaacaagaaaggtaatctgtaagtcagatgctccaacaggggatgttcttcttgatgaagctctgaagcatgttaaggaaactcagcctccagaaacggtccagaactggattgaattacttagtggtgagacatggaatccattaaaattgcattatcagttaagaaatgtacgggaacgattagctaaaaacctggtggaaaagggtgtattgacaacagagaaacagaacttcctactttttgacatgacaacacatcccctcaccaataacaacattaagcagcgcctcatcaagaaagtacaggaagccgttcttgacaaatgggtgaatgaccctcaccgcatggacaggcgcttgctggccctcatttacctggctcatgcctcggacgtcctggagaatgcttttgctcctcttctggacgagcagtatgatttggctaccaagagagtgcggcagcttctcgacttagaccctgaagtggaatgtctgaaggccaacaccaatgaggttctgtgggcggtggtggcggcgttcaccaagtaactctgctcggggtgaaccattctcctttctctcaagtaaaccagtagtttttcttctgttgacttctggttttctgtaatttgtactttcccacactataattggcttctgttttacaaaatggtgggtggctttttcttttttgtacgtgtacaggattctgctggtacgagaggccttcctctttctgtttttaaaaaaagttttactgccatattggcattccattccctgttgccatcctcactgttacctgttttgggtttctggtctactttgactttcaaagtacctccagcctcctcatacgcacagcttttggatgacctcagcttgagtttctccatatgtgcatgtacatctagcattctgcctacagttcagacagaagtcacaaaaaggccttcaactcaccaaaggtaaatatctgtatctattaggacattttttacatagacttcagttgagatgtatacttagcaaaattatttttaaattgaaacagcacagtaaatacttaatataaaatgtcccttggattttgcttcccatgtaaatctattgtattattacacttgttataattttaactataaaggtccaattgtttcacagagccagtttgggatgggctgcattccatttatgctgtatatagtttgaattatatataaattaccccttcttctggccacccctgctcccatcttagtattttgcaagatctaatcagttgtacacctggtgcccctcgcttgcttcaatcatggttatttgatggcaaaatcgacctcttgtcgctgaaggagagagaaaagatgtgtgtctgattggtcctgggattttttgagctgtgccatttatggtactctttgcctatgcatcccctttttagattttttttaaattttatcttactgtttttataatttctattgggaagaggcttgtgaccagtaccaatcttgagtttctttttctgtccacaagtaaattaatatctgctctgaaatgtcatttatctactcacacattcttggggaaaaaaatcaaatgtcagtcctagcagatgttgcatgtaaattggtagcaagtaatgattacaacccagaggattaagaattttgtaacagaaagctctatgttttaattttttatatacaattaggataattagcattgtcagactataaacctttgctttttaaagtttatttttactatttctttatcactttattgtatcatcaccattggtttcataatgtaaatactatatgttgaacaaattaaatgtcaaaattttttattaccatagtccatgttaatagtggggctttcaggtgtttagagattttttttgttgttgttaacattcattgcaaaagtactagatggtgtataactctagagttgaattttaagggattccctaatatgtatactatctttttatctgaagtaataaataaacaatgatcttgaaagtgcctgaatcagaaaataaaaaaaaaaaagggggggcgcttttttgggtatataaaaggtgtactatggcggggtgtgacaacaagtatagcaaaggccaagtgaagggaaacaggcacgtggagttaaggagagtgtaaaatgtagaggagagtggaaatatgggaattacatcaggatatgaggnnnnnnnnnnn

SEQ ID NO: 19954 - DNA, 3819 bp, Homo sapiens
  misc_feature 1, 3819: n = A,T,C or G
naatcagccaaatattgtactgtgtgtgtgttttgggggtggggggagacagagttgaggtggcagaggcaatgtaggaggaaaagacaggctgactaaaatacataaatagtacgtgaattctttcgggccagggatctgggcctactttgcctgcatcatattaccagcatctcaattgtgtctggcacatagtaagtttcagtaaacatttgttgcactaagtgaaagaatgaacttttcacttttttcagagatgtgatttgtgattctcggaatcaaccagggtcctaagatgtcctgcaggccgtctccatttctctcggtgagctaaggtgtccgagtggcaccagttctccactctttctgcgaccttcgcccgccgcgcgcctttctcaaatcctccggttattaagcaagctcaggggtccggtggcctgccctggtaactctgcgcccgccccttcctgcccccttcctgccctcacgccccgtcccctcctcttgacgtggcagaggcggcgccagccatgttggccgggcggaggtcttcgctgaggcccggggcggggtggcgccacccctgattgcggtgccacggactgctcctgctgggcggagaggacagattttgcaaagcggaggctgcgacgggtcctgcagggggacagtgaggaaagggccgcctcgtctccgctcctgggggaccgcagaaataagaatcaaactccacaatgacaacctatttggaattcattcaacaaaatgaagaacgagatggagtccgatttagttggaatgtttggccatcaagtcgactggaagctacaagaatggttgttcctgtggcagccctgtttacaccactgaaagagagacctgacttaccacctattcaatatgaacctgttctgtgtagtaggaccacttgccgtgcagttttgaatcctttatgtcaagtggattatcgagcaaaactttgggcttgcaacttttgttaccaaaggaatcagtttccacctagttatgctggtatatctgaactgaatcagcctgctgaacttttacctcagttttctagcattgaatatgtagttctgcgtggtcctcagatgcctttgatattcctctatgtggttgatacttgcatggaagatgaagatttacaagccctgaaagaatccatgcagatgtcattaagtcttttaccacctacagctttggttggacttattacttttgggagaatggttcaggttcatgaacttggatgtgaaggcatttcaaaaagctatgtcttcagaggaacaaaagatttgtctgccaaacaactgcaggaaatgctggggctctctaaagtaccagttactcaagcaacacgtggtcctcaggtacagcagccacctccttccaacagattcttacaaccagtacagaaaatagacatgaatctcacagatcttctgggagaactccagcgagacccttggcctgtaccacagggaaagagacctttgcgttcctctggggtggcactttccatagctgtaggactgctggagtgtacttttcccaacactggtgctcgtatcatgatgttcattggtggtcctgctactcaggggcctggaatggtggttggagatgagttgaagacacctataagatcgtggcatgacattgacaaagacaatgccaaatatgttaaaaagggaactaagcattttgaagcattggctaatcgagctgctacaactggccatgttattgatatctatgcgtgtgcattagatcagacaggtctcctggagatgaaatgctgtcccaaccttactggaggatacatggtaatgggtgattctttcaatacttccttattcaaacaaacttttcaaagagtctttaccaaagacatgcatggacagtttaaaatgggctttggtggtacgctagaaataaagacctcaagggaaataaagatttcaggagctattggaccctgtgtgtcactcaattctaaaggaccctgtgtgtctgaaaatgagataggaacaggtggcacatgtcagtggaagatatgtggacttagtcccactacaaccttagccatatattttgaggttgtcaatcagcataatgctccaattcctcaaggagggcgtggtgcaatccagtttgtgactcagtatcagcattcaagtgggcagagacgcatccgagtgaccaccattgctaggaactgggcagatgctcaaactcaaatccaaaacattgctgcatcttttgaccaggaggcagctgccattcttatggcccggctagcaatatatagagcagaaacagaagaaggtccagatgtgcttaggtggctggacagacagctcattcgactgtgtcagaaatttggagaatatcataaagatgacccaagttccttcagattttcagaaactttctccctttatccacagtttatgtttcatttaagaagatcttctttcctgcaagtttttaacaatagtcctgatgagagttcatattatcgtcaccattttatgcgtcaagatctgacccagtctctaattatgattcagcctatcctgtatgcgtattcttttagtggaccaccagagccggttcttcttgatagcagtagcattcttgcagatcgtattcttctcatggacacattcttccagattttgatttatcatggtgagaccatagcacagtggcggaagtcaggataccaggatatgcctgagtatgaaaatttccgccaccttctgcaagccccagtggatgatgcacaggaaattcttcactccagatttccaatgccaagatacattgacactgaacatggaggcagccaggcccgtttcctcctttcaaaagtcaacccttcacagactcataataatatgtatgcctgggggcaggagtctggagcacctattcttacagatgatgttagtttacaagtgtttatggatcacttgaagaaacttgctgtgtccagtgctgcttgaagtgctaataatgttaaagacacttaagaagatgaaataatattcaaatttcattttttcctttttccatttatctgtggaaaccaacagatattgctctatattttttgtattagtatggtttgagacaacatatggaaaatgttcacatttgtagattaagctggaattataatgagagcaataagaacaaatttattttgcttaccacagtgttatagctggttctagaaatttgaagtctttataacttaattatgtttaataaaaaatagagtctgcctcgtactacagatgtaactcatttgtatattgcagacagacccaaagtggcactgaattttcttgctcaccttttaaaaacttgttccttaattttagccagaaagcaaaaaaacattagtacgaatcaagtgtgacacattcaagctctacgtcgcatcattactggaacaccagccactcatgaatacacactgcacaggacataccaggaaagacacatacaccacacacctggccaacaaaactggaccacaaaagcgcaccagaaggacagaaatggcacgcggcaactcggcacacacgcgcgacgacacggccagggccacaacccaggcccgagacaaggcagtctcaacaagcacactctcaaccgacaaataaagagcccaacaaggacgacgcgagaacaacaccagacacaggactacacaacacagaaagactccaccaagcgacaacaacacgaggagcctgcaggtaccctatcttgaccatcgtacan

SEQ ID NO: 19955 - DNA, 2374 bp, Homo sapiens
  misc_feature 2374: n = A,T,C or G
ccccccccggcgcgctgtgcggcccggctctccggcggcagcgagtgccacgtcccaagtgctacgcggaggattagagcaggcggtgcgctgggggcgggagcagcgcggagcccggctcggccacaccgatcgcccgccgccatgggctcctcgcaaagcgtcgagatcccgggcgggggcaccgagggctaccacgttctgcgggtacaagaaaattccccaggacacagagctggtttggagcctttctttgattttattgtttctattaatggttcaagattaaataaagacaatgacactcttaaggatctgctgaaagcaaacgttgaaaagcctgtaaagatgcttatctatagcagcaaaacattggaactgcgagagacctcagtcacaccaagtaacctgtggggcggccagggcttattgggagtgagcattcgtttctgcagctttgatggggcaaatgaaaatgtttggcatgtgctggaggtggaatcaaattctcctgcagcactggcaggtcttagaccacacagtgattatataattggagcagatacagtcatgaatgagtctgaagatctattcagccttatcgaaacacatgaagcaaaaccattgaaactgtatgtgtacaacacagacactgataactgtcgagaagtgattattacaccaaattctgcatggggtggagaaggcagcctaggatgtggcattggatatggttatttgcatcgaatacctacacgcccatttgaggaaggaaagaaaatttctcttccaggacaaatggctggtacacctattacacctcttaaagatgggtttacagaggtccagctgtcctcagttaatcccccgtctttgtcaccaccaggaactacaggaattgaacagagtctgactggactttctattagctcaactccaccagctgtcagtagtgttctcagtacaggtgtaccaacagtaccgttattgccaccacaagtaaaccagtccctcacttctgtgccaccaatgaatccagctactacattaccaggtctgatgcctttaccagcaggactgcccaacctccccaacctcaacctcaacctcccagcaccacacatcatgccaggggttggcttaccagaacttgtaaacccaggtctgccacctcttccttccatgcctccccgaaacttacctggcattgcacctctccccctgccatccgagttcctcccgtcattccccttggttccagagagctcttctgcagcaagctcaggagagctgctgtcttccctcccgcccaccagcaacgcaccctctgaccctgccacaactactgcaaaggcagacgctgcctcctcactcactgtggatgtgacgccccccactgccaaggcccccaccaccgttgaggacagagtcggcgactccaccccagtcagcgagaagcctgtttctgcggctgtggatgccaatgcttctgagtcaccttaactttgaaccattctttggaattggcgtggtatatttaaccacgggagcgtgtctggaaacgcaaactatcattaatttcatactagtttgtaccgtatctgtaggcatcctgtaaataattccaaggggaaaactaaacgaggacgtgggttgtatcctgccaggttgagtggggctcacacgctagggtgagatgtcagaaagcgcttgtattttaaacaaccaaaaagaattgtaagggtggcttgctgccaggcttgcactgccgttcctgggggtgtgcatcttcgggaaaggtggtggcggggcgtccactaggtttcctgtcccctgctgctccttccgtaagaaaatgaaatattctatgcctaatactcacacgcaacatttcttgtactttgtaagtcgtttgcgagaatgcagaccacctcactaaactgtaaacggtaaagagatttttacttttggtctccgtgagtcgcatctctactaaggtttacacaggaattccacctgaagacttgtgttaaagttctacagcgcgcactgttaactgaacgtctttttcttcagcctatacgcggatccttgttttgagctctcagaatcactcagacaacattttgtaactgctgctgttgctttctacatacaccttataaagtgacatttcaaaagaaataaggtgccacagttttaaaccagaaggtggcactctgtggctccttgtagtattatagctatactgggaaagcatagatacagcaataaagtacagtaatatattttcctgggtacactaaataacccctatgcgggggcataaacaccgaagtgttaacccaggttggcctataagccagtgggccan

SEQ ID NO: 19956 - DNA, 2051 bp, Homo sapiens
  misc_feature 2051: n = A,T,C or G
acatcttccttcaggctcaccttccttcttttcaaagttcctcaagcctgttactcatttgtcaaggctgggcttctcctacaaagccctcaacctgcccagccagcagctgtgaggctgactgaatatttggtgaccatatcaccctttctggtgctgaagctcatgtcagctccattggacagtgttattctgggctcttctcactgtagaggactggagcagaaagggttccttggaaacctgtgctgggaagccctgtttggtctaaggctaagctttggttaactctgggctccagccctttcttcctttaaatagctgatgcacggccagcaggtctccattctcatcctctctttctattctgtttctttggttcagaaatactcttctgctttttttggacgaactcaatggcccgatgttagatattgggtatttttcaatcttctgttttctgacccttccaagaaagtttgaggaagaacatgtactgctttcacgttcatttcgcccattcagatgtcttggcttgaaccttatgactccgtatcaaagtcctcacaacctgtctcagatccctgatgcacaaattaggtcttattaataagtgtgggaaaagagaggagagtccaccttcttggtcaggcccctgaggcatgcatttctaccaaggaatatggacagatgacagaggagaagagcccaaagccaaatttatacatgagtgcaagtggatgcaaatttgttgctccctgcatctgtgtatatgctttctgttaaatacagaaagaaggaacaataggcttgcacacttttctaactacatgtttaagtggcagagtccaggctgtcgagtcacggttgggtttgaatctgactccaccagtaactttggttggaaaaaatcacttatcctctttaagcttgattttatttattttattttatgtaagagtgagacagtagtagcttaatagggttgcttttaaattagagtgaacatgaggcatttattcggtgccagacagataactgcctataacaggatgtgatcagcacaagtaacagaaaattagcctgacggtggcttaagcaatgggaatgtttatctcacatagcaaaaagtctgtaaatagatggttctagagttgggtggaagccaaaatgtcatcaggatttccttggaaccgtctgctttgccatcctcagtattgcagaatggctgctcctgcgccaagcatcattctgcaaatgatggtgtccacagccagagtggacagtagtacaggagccttctcattctgcccttatccgggaataaccgtcagcagctccagcaacctcccccctgtctctttatagagtggggccacgtgcccactcttggaccaggccctggcaaagggggatgggtcgactagtgtatcccctggcactgagcacacttgcccttgagctggggttttgttagtagggaggaagctggagtggcagttggatagacaattcatagtagctgctgccatgttcaaaaaatgctgcaatgtaaaatcataaagtattcatctaggcataactttttaaaatattcagtcaccttttattctactaaaatcaattttaacattttagtgtatattattttattttagattcagcaggtacatgagcatgttagttttgttttgttttgttttgttctgttttgttttttgagatggagtctcactctgtcgcccagtggtgtgatcttggcttactgcagctctgtctcccaggttcaggtgatcctcccgcctcagccccccagatagctgggattgcaggcacatgccaccacacctggctaatttttgtatttttagtagagacgggagtttcaccatgttggccaggctggtctcgaactcctcacctcaagtgatctacctgcctcagcctcccaagtgctgggattgcaggcgtgagccactgcgcccagccacatgtgcgtgtttgtgtatattgcgtactggtggggattgggcttctgtcatacctatcan

SEQ ID NO: 19957 - DNA, 1293 bp, Homo sapiens
agtcgacccacgcgtccggcggccgggccggggcagccgggaagcgggtggggtggtgtgttacccagtagctcctgggacatcgctcgggtacgctccacgtcgtcgcagccactgctgtggtcgccggtcggccgaggggccgcgatactggttgcccgcggtgtaagcagaattcgacgtgtatcgctgccgtcaagatggaggggcctttgtccgtgttcggtgaccgcagcactggggaaacgatccgctcccaaaacgttatggctgcagcttcgattgccaatattgtaaaaagttctcttggtccagattggcttggactacacaactgattgggtggactgactacttgcgtgactgtagcgccatacctacacgactggctgccaacccactcacatgacaggtaacctgcgacacgtacgacaccctacctgccacgccacacacgatcacgacagacgacgcctgggcatggactcgtagcaaggaccaaacgacccgaccggacgccgaggacacctacactacacgacgcgagactaactacgcccgcacgcaactaccatacacaacaactgcacgactgaccatacgtcaaaacccggacaaagcccatcgccgacaataccggacacaccacgagcgccactcgcacctgcaatgcgcaggacacagcaggacgacgacgacactcccccagacaacaacctccaagagggcaccaacgagctagaacatggagcaagcagcatagacatggagtgacaggggggcatcacgcaccgatccccgtggatcctatccacaaacaagccaactcgggcacataacaaggggatgaagcaacagtaaggctcccgccctggcgacagaacgacatgccgtgcacaccgcagacgagacacaaggacaagcacgacccacacgagccagagcccggagcccaccgcaagcagcgcggacgaacatcgaggcggaaaccgaccgcgcgacacgcgcccagggggcaccacaagtccaccaagggggcacacagccagcaccgaccgccgggagaacctatgcacagaccacacgggcagggaggggacaccccgggggagcgtcccagagcaccacgtgaagagcgcaacactgggcggaccgagcacacagcggaggaacaacaacgcgaaccgacatcgtcgcggcgcacagagcacccacagcgggcccgaaccccgcgaccacaggagtcacccgagacagacaccacgccgaggaggacaccaaccgcaggaccac

SEQ ID NO: 19958 - DNA, 2998 bp, Homo sapiens
  misc_feature 2994, 2995, 2996, 2997, 2998: n = A,T,C or G
cgacccacgcgccagccagccctcccgcctgaggcgagtctgggctcagcctagagctctccggcggcggcgcagcttcagggcagcgcgggctgcagcggcggcggcggttagggctgtgtagggcgaggcctcccccttcctcctcgccatcctactcctccctcctcgtcatcctcccccttcgtcctcctcgccttcctcctcctcgtcaggctcgacccagctgtgagcggcaagatggcggcgcccaggccgccgcctgccaggctgtcgggcgtcatggtgccggcgcccatccaagacctggaggccctgcgcgcgctcacggcgctcttcaaagagcagcggaaccgagaaacagcacccaggactatcttccaaagagttctggatatcctaaagaaatcttctcatgctgttgagcttgcctgcagagatccatcccaagtggaaaacctggcttccagtctgcagttaataacagaatgcttcaggtgtcttcgcaatgcttgcatagagtgttctgtgaaccagaattcaatcaggaacttggatacgattggtgttgctgttgatttgattcttctgtttcgtgaactgcgagtggaacaggaatctctgttgacagcttttcgctgtggcctgcagtttttaggcaacattgcctcacggaatgaagattcccagtctattgtttgggtgcatgctttcccagaactgtttttgtcttgcttaaatcatccggacaaaaaaattgttgcctactcttcaatgattttgtttacatcccttaatcatgaaagaatgaaagaactggaggagaacctcaatattgcaattgatgtcatagatgcttaccaaaaacatcctgaatcagaatggccgttcttgattattacagacctctttctgaaaagcccggaattggtacaagccatgtttcccaaactgaacaatcaagaaagagttacactgttagaccttatgatagccaagataacgagtgatgagccactcaccaaggatgacatccctgtgtttttgcggcatgctgagttgattgcaagcacctttgtggatcagtgcaagactgtgctcaagctggcctctgaggagcctcctgatgatgaggaggcactggctacaattaggcttctcgacgtcctgtgcgaaatgactgtgaatactgagctgctcggctatctgcaggttttccctggcttgctggaaagagtgattgatcttttgcgggtgattcatgtagctggaaaagaaaccacaaacatcttcagtaattgtggttgcgtgagagcagaaggtgacatctccaatgtggccaatgggtttaagtctcatctcattcgtctgattggaaatctgtgttacaagaataaagataaccaagacaaggtaaatgagctggatggtatcccgttgatcctggacaactgcaacatcagtgacagtaacccctttctgacccagtgggtgatatatgccatccgaaaccttaccgaagacaacagccaaaaccaagatttgattgcaaagatggaggaacaggggctggcagatgcatccctacttaaaaaagtgggttttgaagttgaaaagaaaggcgaaaagctgatcctgaaatctactagagacacccctaagccatgaatgaactacatccaaatacctgaatttttggaatctgtttcatggatttttcatcttctaccgtatgtgaaattgcaagtgtttgaagatttataagtacaaatttgggaacatacaaatcttttaggtagtagagtttaacgtgtataagctaaaagtgaaagtaactgagtgttctcttgtttctttgcattaatgtaactgtgtggtttgcctttgtccccctggatagaacgtgcatttaaagaatatattgtacttactgtgacagcagataataaaccagtctcttggagggcacaacccttatttgacaaaaaaacaaaaaacaacacaacccaaaacaacacaccaacagcggggcgcccccaaacaacacccagacaggagccaaaacaccaacccagcttttggaccacggcccacataaacgcgcacaacacaacagccggccgcccaaacacctcacgcacaccacgactcgcagaccacgcgcgacacggcacccgcgacacccgcacaaacccgacatgccacccgccgcactgtacacacgaccgcaccggagcctcgcccgcacgggaactcgaaaacgaggcgcgccgcactccagcagcagccacgacagaccacgcaaacacgccgcaacagccgcccgacccccacacacccagcacccacacacgcacaccacggcacccccaaccaccaccgacgagcacgacccaccaacgcacccccgccaccgacgcgcgcccgcatccacccgccgacacgcacaccaagcacccccaccacaccacaacgccgcgcgcgacgacggagcgcgagcgaggacgggcggaccacggacgcagcagaccgacagaatcacggccagagcggcagccacaggggaacgaaggcgacccacaaccacaccgacacccagaccaaccagagaaacgcaggacacgaggcccacagcgacgacccaacgaccacaaacggtgagggccagagagagagcaaacgacaacgcacataagagcggacgaaaaccaacgacgacacacaacaacacgctggccgagagcacgaaacgccacgcaacagcgatgaggcgacacgaccgggcaccgacagagagaacacacgaagcacaaggcgcaacgacccaacgaccagcaaacgaaaaccagaccaagcacaacgcaaggacaacacgacgagacagacaggaacccgagcaggccgacgcacgcgccccaccgaacgcaagcagcaagcgggaccacacgagacagccacacacaaaacacgcacacaacacagagcacacgcacnnnnn

SEQ ID NO: 19959 - DNA, 5010 bp, Homo sapiens
gcgtccgcggtgcggacgggtcaggagcgtagaggcggcggcaaaatggcggcgcctgaggagcgggatctaacccaggagcagacagagaagctgctgcagtttcaggatctcactggcatcgaatctatggatcagtgtcgccataccttggaacagcataactggaacatagaggctgctgtacaggacagattgaatgagcaagagggcgtacctagtgttttcaacccacctccatcacgacccctgcaggttaatacagctgaccacaggatctacagctatgttgtctcaagacctcaaccaagggggctgcttggatggggttattacttgataatgcttccattccggtttacctattacacgatacttgatatatttaggtttgctcttcgttttatacggcctgaccctcgcagccgggtcactgaccccgttggggacattgtttcatttatgcactcttttgaagagaaatatgggagggcacaccctgtcttctaccagggaacgtacagccaggcacttaacgatgccaaaagggagcttcgctttcttttggtttatcttcatggagatgatcaccaggactctgatgagttttgtcgcaacacactctgtgcacctgaagttatttcactaataaacactaggatgctcttctgggcatgctctacaaacaaacctgagggatacagggtctcacaggctttacgagagaacacctatccattcctggccatgattatgctgaaggatcgaaggatgactgtggtgggacggctagaaggcctcattcaacctgatgacctcattaaccaactgacatttatcatggatgctaaccagacttacctggtgtcagaacgcctagaaagggaagaaagaaaccagacccaagtgctgagacaacagcaggatgaggcctacctggcctctctcagagctgaccaggagaaagaaagaaagaaacgggaggagcgggagcgtaagcggcggaaggaggaggaggtgcaacagcaaaagttggcagaggagagacggcggcagaatttacaggaggaaaaggaaaggaagttggaatgcctgccccctgaaccttcccctgatgaccctgaaagtgtcaagatcatcttcaaattacctaatgattctcgagtagagagacgattccacttttcacagtctctaacagtaaggaccacctaagttctgtgaagtgtaatccacgacttcttattctccttgaaggaaagcccagaaaagtttcagattgaagccaattttcccaggcgagtgctgccctgcatcccttcagaggagtggcccaatccccctacgctacaggaggccggactcagccacacagaagttctttttgttcaggacctaactgacgaatgacatttttttcttcctgtcccctcctaccccagtccctaaaagaaatggggaaaaaagaaaacaacagcaagtcagaaaaaaaaaacaagagagagaaattcatattattattattattataatacaatattttttttaaaagactgctgcatccttaggaaggatcagaaaccatgctgcccgtaagagtcacaacctgtgtgtgcgcgcaaggttagcaacaaacgtacccgcttggcaagcccacccttcctgtggcctctgtgcacgcaccttccagtgaacagagactcttcaccttcgatccatccattgtcccagctgggaaggggacattcccactagttctcattcattcttgcttttatgaaaaataaaagtgaaaaacctccatcaaccagctacttgcagcatctcctgaggagatgctgcaagtagctggttgatggacttgcttctcctgcctctggggaagagagggaagagaaagcacagagcagagaagcagagatgttccttgaactgcccacaagttttcaataacttttatttctgttttgtaatgaccaaaggaatgaggctgacataggtatatatatatatttttttcctttatttgataaagagccaattctttaaacccatgagtttatgccctgggctccttagcccacaatagtgtaataaaagtgccccgggctggtttgtgcttatttctgccattgtccctctcacgttcccagagaggtcattctttttggtccaactcttgctgtcctttcttaccacctgtgcaccccacttggagcagtgggaggaaatctgggtttgtggccccacaaaggctgtatatgtaaagatacacctatgtatgtggtggaactcacctttacacacaactgcagcttttccttggagtctgtaccaggtggtggttatggggtctgaaccaaaggatagcagctcttcattcctcttctgacatgtgcatgctgctccccccagccctgggctttcctgaattgccaagcctggtgcctttccaaaggactagcagggcctgtggtggagccagcagaaccacaggagagtgccctgcctgtctcagtggaagtgtattattgttttaaggatagaaccagaggccttgaagggagccaagacagaactcccagcctgtgtaatctattggaaggcacattttcatttctgatgcagccaccttctggaggcagcttttatcctttctctctattgctatgttgaagtaatagggttttttttaacctctggatgtctcgtctgtggttgagtttatggtaatgggtacatgggtcaggccatgtattaacagatgccagtgcgctctgacaagtattccaaagtgttccgtagctagactggtgcaggctcgttgtaccactgcaaccgactgacgttactgtagttcctagaatgctgtgagggcaggggggttcagatcaacataaagcctaacttgctggagttgtagtctcaaggctttctctcttgcttaactaaaacctaaggaccactgtttttggtagcaattatatggttactatccactgcagtcctcagttgttggggtaaatcccacatggcagagtaaggcaccccacagaaattaacttggagagcctgagaaattcccagtggccttggcatagctgtctagaacaccatctctaggaaaatttaattctgtccctggccagctattgttcttccacttcgttttctgctgtcccaaggccagatgagtggaatcaccatctgactgttgtcagtaaaatgtatctggcgtgaacagcaggataacccatgttctccacataaggataaccttacgtgaaaccttcctgctgacaaccatgcagaggaatttttccacttaagtcagagccttcctccccatctggaattcacagctgttccctggcagcacacaggagggtattaaggacctttgtgaggctaggtacactgtccacacctctttggggaagttacgattttttttttccatcataattcagtctcttcttattctacagtgtgcactttatgcctctcgccttttgataatagttgttcagtgaaggaagtcagctgccagaatattaagaagggtctccctttatgtcagtacaactgttagggcggccttcccatttactttaggtttcaagaggattcaccggaagcacatgccccggtctagtcccatttgaaacagttctgctttactgagaccctaggccggtctccttgctgaccctagcgctgctgcctaggtgccatttcctttcctcctcagtcaaatacaggctgcacattttgtcacttaatgccagtacaatctgtgttactcctaaggacttttgggattttgatgagacctgcgagggagaagacactgagaagccagtgatctgcaagcatttgctcttgtttccacatcacctctgggatatttcagctgttgtttccaaatggcaaatcatcaactaaaagcacttgtttcaagttttgttctgcactcccacgactgaagttgtagattgagccgaataaccatgggaagtgaccaagcaaagacactcgattggagtcagttgaatatttgtaccctcagtggagcccttctggtcttttcttccacttctgcagaatttcctctagcaaatacttctttctccttgcttgcctccaccatgatatttgaataagagatggccagaggataacacttgtctcttaaaaactaagctaaaaagaacctagaaccttcaattgagcagttgtgaaaattgctaatggtgccaaggccaagcaaagagtttcagaaaatgactgagaaggagcgataacccccagaatgcaaaatcaggggcatcattatccggtgcttgaacaaggagctccgctctacaactggtttttttaggacttgtgaggaacacagcaacggaaatccatccacaaaggatgcagtgccccaacttgtactgcgcctgaatagtcatgtgataatttactgaagaaatctagtgtactttaaatttttttcataaaagtttacattgtattgtaggttaacattaaatgttttatagcaaaaacttcataacaggctgtggatctttctgtgtgggaccgatgtggtagataattttctatgtgtgaaggagaggttgaaaaacaccgggagggaacagcatggcatggcattgccaagaaggaagggagagtcaaagagaaggatggagttaggtcttctctgttgtatccctgtggaaaaatagcaacttagtatgatggagagagagagcagacaggcctgggttcaaatttgggctctctagtttgtcaggtttgcaacctcgggcaaattctctagcttccctgaacttgaatttccccaactataaatgaagataatgccatccacctcaggataggtttatagattcaatcaagtaaatgtatatgaggctcctgatatgtagatgtcattaagtgtttgttccccttctatgggagtgtattttgtaagaatattttcttggaataaca

SEQ ID NO: 19960 - DNA, 2566 bp, Homo sapiens
  misc_feature 1, 2, 3, 4, 5, 6, 7, 8, 9, 10, 2562, 2563, 2564, 2565, 2566: n = A,T,C or G
nnnnnnnnnnagcagtttctccggaaatgtgggcccttttctcggtgacccatggcagtcagtccttcgtgaacacctcggtcaaaagatttggagaaccgcgcacatattaaaccctgtggtgtgtagagctaggttgccctcgcaccgctgtctgggaggaagaaaggtcatcacccaacctggattaaccaaggggcacaacaaaggcatgccacagtggctggatccagaggacatggaactcacaacaaaccattgagaactttgggagtttccaaattcgaactggaagggaagaaacctttcattcagagcccccaagctaggaggatgcaggtctggagctatcagctgtcatggctccaaatgcacggcgaaggctcatgtgcagcaggaggaaaggaagccaacaaagaggcctggttgagtctgcttgttgtctcccaatggccattcttcccccactcctttttactagcagaatctccttcctcagagttttggctgcccaagtagaaactaaatttacagcctcctttgttgctaactgtggccacatggcaagacagtaggaacctgggtgcctgatgacatcatggaccagccccttgcctggcctggaccagctgactatcactgcactgttatgggagagagaaataaacttccatcttgtcgaagctatgtattttggtggttttatgtataaacattttaaaaataacaaactagaaaggagttctagatggaactagtggcaatgattacatacagctgttttgttttgcaaaccccacaactggatattaagtcaggatagctcctgctaaattctaacctcaaggctgaactgttctgccctattcacttacagatcagagcattaggcaaggacaaccttcttagcccctcacttctgaatcttccttctaagctaagaggtcagagcagaacgaggaaatgttgtgctatttggccagaaggagatggtaagaacagccctagtaacttcatttactcctgaggctctgtgcccacaaactgattctaagagcccttcctgtatatatgcgaattagctctaagtacagacattttggtgtgaattgtggagtttatggcaaatacagggtaggctgaatggttctaggccaggaagcaagagttcacaaatgcggtgtcttcaatgaaataaggtaagtaccttgaagcaaggagtaaccacctgactaatgcatccacatgagagactcaaatctaacacttggcaaaattacaatctgggatactgaggtccccacttttagtgaaagccaaaggccctaggtcaaaatgctaaaaagtcttttactaactatcctaggacagctaaggtcattttgggaagaagagagaaacactattcacccctcccttcaagttttaatagacaacaggaatctgggctctgaaaagtcacaaacacctttcccaagatgatgagcaactgcaacaactggccaaatgtgttagcagcagaaaagctgggcattacctgtgtgagaggcgctcagcatgggcagtgaatggccgtgagcagcgcaccagctacatagcctccacaccggaagggtgctgctgctctgcaggtccgtttcaggcgggatccagccatccacaggaccaaggggctggagtgttgggaacagatgattctgtgttccacagataatggtacaaagtgactgttcatagataaggtgtaagcacagcatttgaagacagctcctccagatggtctgtctgttagtgaattcttaagcacttagagccttgaagattgagaaattctaaagaaattttttaaaaggaggagggtggtagatgtcaaagacacaaaagctctttgtaggtgctgactggctcactttgtccccaggttcatcttagagctcaagcagattcaagacatgaggcagagatgctagacttgcgtcaggggcaaaaacttctggtagtagctcttggtgacgtcaatcatcagctcctgagtgcactccgggagctcccctgagaagagtcctggcagcctgagaagacagtgaatggtggaaccacagtttctggaggtaatactgtgttgtcaagaattttgcagcagtctttcaacacacatcggcgcccaatcacacagttcttcccaacatgaacataggaaccaatctgtgctgcgttgaccacacaatcttcctcaataaagacatggtctccaatatgtaaaggaaagaatgcaacacctttgctgaacttcttgaatggtggccttatgacactacgacttttcacaacacaatgacgtccaactcttacatttgccagatcccctcggataatacagtcattcatcacaatggtcttgccattgagaacgatgttctggcttccacacaacactgactggcgactgactttgttcccagatgccgtctcgatgtactcagacttgttgtagagcagctcgcccaactccatggccgccgcctccttccctcagccccggatcctgtcagagtcggccgnnnnn

SEQ ID NO: 19961 - DNA, 1045 bp, Homo sapiens
  misc_feature 1043, 1044, 1045: n = A,T,C or G
ggtgtcgacccacgcgtgcggtgatgcggaccccgggcgggcgcagggcgcgggctccggcgccgccgctgcgtcctccccggccgcgggcgagccgctgcagagggagcgtcgcgccggggcggagtgcgggcttgcgcggcaagtgtcgcggccctgaggtcacgaaatggattggagtgaaccggagaccccgaaaacggaagcgcagggagaaggaagaggtgtttgaaaagcttcttccagaccagctggtcttgcttctggagcatctcttggagcagaagactctgagcccccgaactctgcaaagcctccagaggacataccacctccaggatcaggatgcagaggttcgccatcggtggtgtgaactcattgttaagcacaagttcacgaaagcctacaaaagtgtggagaggttccttcaggaggatcaggccatgggtgtgtacctctacggggagctgatggtgagtgaggacgccagacagcagcagctcgcccgtaggtgcttcgagcggaccaaggagcagatggataggtcctcagcccaggtggtggccgaaatgttattttaacgaggaaagaccacagcaagattctttcattcgtctcctcctagcctgggggaccaggctcgaactgaccctggacatcaaaggagggattatgtggctgctaaagccatcggccacaggcctgttcacgtcttggtggcttctctttcccagaaggcttggtcccaggccagggacacaacaaaggcagaattctcgtaaacgcaggctcccttccctggagggttgactcctggcctggaatcttggagtggagcgcccgaggattggaggtcctctgcgagaatgatacattttcccggaaattgggaaacctggtggacattaattggctggccgagcagggcgagggggttttaatcaaagcacggccctggagaagggggctaaagaggagacacgaattaacagggtttggaacaaaaatgggggccatatggcggagaacagagagtaagcgcnnn

SEQ ID NO: 19962 - DNA, 926 bp, Homo sapiens
  misc_feature 1, 2, 3, 4, 925, 926: n = A,T,C or G
nnnnaagagtcgcgcccccggggagggagcagcactggcccattctgcagatggggacatcgagtcacgggctggctacgaactcctcgggggcgaaggtggcggagagggatgggttccaggacgtcctggcgcccggggaaggctcggcgggacggatttgcggtgcgcagccagtgccgttcgtccctcaggtgcttggcgtgatgatcggggccggagtggcggtggtggtcacggccgtgctcatcctcctggtggtgcggaggctgcgagtgccaaaaaccccagccccggatggcccccggtatcggttccggaagagggacaaagtgctcttctatggccggaagattatgcggaaggtgtcacaatccacctcctccctcgtggatacctctgtctccgccacctcccggccacgcatgaggaagaaactgaagatgctcaacattgccaagaagatcctgcgcatccagaaagagacgcccacgctgcagcggaaggagcccccgcccgcagtgctagaagctgacctgaccgagggcgacctggctaactcccatctgccctctgaagtgctttatatgctcaagaacgtccgggtgctgggccacttcgagaagccactcttcctggagctctgacgcacatggtcttccagcggctgggcaggggtgactacgtcttccgagcgggcagccagatgccaggtctacgtggtgcaggacgggcaatgatggagacccaggactgccaagggccctgaacgggaaggagaagcagagaaaaacggaaaggatacacggagagacaggggtacaagaacctcactagaatacatggaagcatacaacagggcagcaaaatccaaagggacgggtataccacgagccgaggactacacaacgaatgatgacaagann

SEQ ID NO: 19963 - DNA, 2850 bp, Homo sapiens
  misc_feature 1, 2, 3, 34, 2843, 2844, 2845, 2846, 2847, 2848, 2849, 2850: n = A,T,C or G
nnncacgaggttttgtagtcacttgacttttttnttttatttaaatgaaatttaatttgaaaatagaaaataaaattaggtaaatatgactggcaacctgaatttgagttgggattctttgtgtatttttcccccttgaggttattgtttcttcctaatttatatttcagatacatagtgtagaacaggaatttgcagaagccatttaagttatcttttgaggtaagctctgatttagcatttattctgataaaatctaatacatcatgggatatatataaagcaacttaattcttgtggtgtagtcttaatagttttgaatgttgactgaatgtctataaaattgtgagtttgtctttgttacattccagtgtttctgcctcttggcatgcttaaagcacggcttacttcatctgctccttacacactaaaatgctgttagtgtgctcaactacagaaatagccgctgctaagtgatgtagattttctacttgaatatttttatgttgtaggaacctcaggaggtcagtgtttactgttttatatatgccttctttttcctgtttgagcttctctctttgaaggattctaacagaacaaagctgctgatcaacctaagttggaaacagaaagtgtaattaatataacttaaatgcatgtttggcagttccatgttacagtccattagcgagtgaacttagtgccacaggtattcatttattcaggaaagaattttgctttttgtattgtctaatctcttcaatgacttcatactgtgtaaaaaaaaatcactttttaatattttttggttggttatttcccaaataatcaacatgtaaataatcttttaagagccagttctgatgctttacattattgctacttgattttgttatgcaagttagatttcagaagaatagattttaaaacacttaaccaagccattacatcttaaaaacaaaacaagtagcatacattttgtaattaacattgataaacactgtgatttttttggttaagactttttcattgatctgaattgcttaaattgcatatattgtaaaataggatcagatgtatattttaaactaatttcaatggattttcctcttgaaatgctttgtctactcagttataaaatattcagatacaagttttatctcaggtgaatactcttgtattgtttttgctttggtgacatgcttataaagggtcatcctagttacattctttgttttttaagtgtatttcattgagaatctttccatttagtctgatttttttcctaatattctagcaggctggggtggtataaagccctcctgacaagccttttgcctacaggtttacctgaaaatgagctacatatggtcgtcattttcttcaaactctcaaaataggaaagtggaaatttttctcccctatataaaattattctgcctagcagaaatgccagaaataaattaattgcatcttagtctaaatttaagtcctttgccatgaggaaaaagtggttttttgcttcatatggtaaatctatattattcatattgaatgtattaacagataatggtgcaaaagcattcttcccaggggaagagtgtatcatgcataactgcaatttaagtccttcctttgataatacttcaaaacatacacagctttgcttactgaattatttttgcaaataatacaaggaggggaaactaacttgctactagtgttgttaatgaagtataggccttggaacatttaagaaaactggtcttcagatagttaagggcttgggataatttaagtgaaaagtgagatcagtaatgagctgtgttgttaacaatattatctggtaataataccatgcaatatagcgttgtataccaacttagtgcattttatactgtattaaatatggagatacttctaatgcctctctaaaattaaattttacataaaagttagttttattcacctttaggctttccaagtgaattgtgactaattttttcaatcttacatagatctttcacccattagcattacttacgtagataattctttatgcctagttattatacatattaatttttaaggtatacatttaaattacacaattgttcattgtggtttgtatcccagaatgtgttgtgttttttaaaagatgcataatagctgaatgtatgcatgactttgaaagaagttaaaatggtgattttttttcacctcttgtacattttaaaaccaggccaaatctatttgccaagcagtgtatcactaataagaaaagcagtttttccttttattgcagtttttgtttatctgccatagaatttccttatactgtggcttggtattattcaagattagctatttcgctggtattacatctttttaaaagcctattataacatggttagcctataaggcagtgttggtccccttctaatattggcctcataaaggggttccactgtactttccgcatattactgtgttgttgttttcctttgtggatatataagcaaattgagcttgggtgatttttatggagacaataattagacaatactgtataattagttttacttaatagattatcatcttgtgagaagagatgtttaaacgtggtaaatcacttcatattacaaaacagttttacacttaatatgttaacattgggtgcaataatttagtagcattagctttagttacaaatataactggatctttctgctgacaacttaggttgtatgagttatgcttaaaagctttaaatctgatgtttcctgtacctggaccaatgttagtatttttggggtccaacctctgtgcttacagatcctcannnnnnnn

SEQ ID NO: 19964 - DNA, 1120 bp, Homo sapiens
  misc_feature 1, 2, 3, 1120: n = A,T,C or G
nnnagtcgacccacgcgtccgttccgttccctaaaaaggtttgccttccttttttttttattcttatttttcaaatctatacattttcaggaatttatgtattctggctaaaagttggacttctcagtattgtgtttagttctttgaaaacataaaagcctgcaatttctcgacaaaacaacacaagattttttaaagatggaatcagaaactacgtggtgtggaggctgttgatgtttctggtgtcaagttctcagaagttgctgccaccaactctttaagaaggcgacaggatcagtccttctctcgggttctggcccccaaggtcagagcaagcatcttcctgacagcattttgtcatctaaagtccagtgacatggttccccgtggtggcccgtggcagcccgtggcatggcgtggctcagctgtctgttgaagttgttgcaaggaaaagaggaaacatctcgggcctagttcaaacctttgcctcaaagccatcccccaccagactgcttagcgtctgagatccgcgtgaaaagtcctctgcccacgagagcagggagttggggccacgcagaaatggcctcaaggggactctgctccacgtggggccaggcgtgtgactgacgctgtccgacgaaggcggccacggacggacgccagcacacgaagtcacgtgcaagtgcctttgattcgttccttctttctaaagacgacagtctttgttgttagcactgaattattgaaaatgtcaaccagattctagaaactgcggtcatccagttcttcctgacaccggatgggtgcttgggaaccgtttgagccttcattggatcatttcccattccaattagctactacagctcagcaagtgagaacgttaccaagaggcgttccctagaagtctacggttcctcgttaagtgaaccccgttctcctacgatgacttcctgtggaggtacctgtagtttgtcccaggacaggatataccggtcgggactgaaagcatcggcggcgcaacaaccccttccgacggctgcacagctcgcaccttcaccaaggtgtcctaacccataccggggttctagacattcccgcgacagcgccgtcgtctaagccn

SEQ ID NO: 19965 - DNA, 1844 bp, Homo sapiens
  misc_feature 1, 1816, 1817, 1818, 1819, 1820, 1821, 1822, 1823, 1824,1825, 1826, 1827, 1828, 1829, 1830, 1831, 1832, 1833, 1834,1835, 1836, 1837, 1838, 1839, 1840, 1841, 1842, 1843, 1844: n = A,T,C or G
nacaaggacactagcacaccagcaggaagctgaacagaaggctggaggtgccacggtgacaaggacgggatcctgtcagggcacaggtgaaaggtgtagcagtcactcggcctacacccacagcatcgaccttgtgaacccagcgacctgactgccttgggagaattgaagcgaatgagagtggggagtgtgagaggtgcgtttggtgcagcatttctggcatgggaacagaactggccaggaggaagtgacgtctgggttctgcccgcacacattcctcgccaccttcttggtgtctgagaacctccagcttcacctccttttctggacccgagggcctggcggagcttccagctgggaccagacctccatggatccactccagaaacggaatccagcatcgccttccaaatcttccccgatgacagctgcagagacttcccaggaaggtccagcgccctctcagccttcgtactcagaacagccgatgatgggcctcagtaacctgagccccggtcctggccccagccaggccgtgcctctcccagaggggctgctccgccagcggtacagagaggagaagaccctggaagagcggcggtgggagaggctggagttccttcagaggaagaaagcattcctgcggcatgtgaggaggagacaccgcgatcacatggccccctatgctgttgggagggaagccagaatctccccattaggtgacagaagtcagaatcgattccgatgtgaatgtcgatactgccagagccacaggccgaatctttctgggatccctggggagagtaacagggccccacatccctcctcctgggagacgctggtgcagggcctcagtggcttgactctcagcctaggcaccaaccagcccgggcctctgcctgaagcggcactccagccacaggagacagaggagaagcgccagcgagagaggcagcaggagagcaaaataatgtttcagaggctgctcaagcagtggttagaggaaaactgagacgtgcacccccatgggatggagacccgaagggactcagacggagccgccgtgttggcagcgcctgggtgtgggcccattttggggaccaaacagcaagctgtggtcggatgagtgccaggacctgtgtaccgggacacgtgggagtcctcccagcatgatgcttgactgacccgaggaaggtcctcatgtttcgtgcctgtcattctcggatggctgtgaggcattccttggcaagggacgctgcgtaccagcggtcctcaccgcatctcacatggctcctgtgatgcatgttgtcgctttcccacccgggatctccatctctcttcccttcctgctgtcagtaagagatcacatgtctgtgtagtgtgaatgccttgtcgctgtcctgtgcttttgcaccattgagttgactgcctctgagaagcagcactaggcctgttgaaatgcaatgtgctgccctgagatccagtttcaagaatgggcaggtaaacgcagtgtgggaaaggaatgtggaatgagaacttggtggttcaccgctgtactatttgtgtaaatgtttacgtatgtgataagctacatgtatgtaaatgttgcaatacccctaacagtcgagtagtagtctcccttacaggaatttttgacggggttcctcatcatcaataccaaataaatatatgtaggaatggaaaaaaaaaaaaaaaaaaaaaaaaaaaaaaaaaaaaaaaaaaaaaaaaaaaaaaaaaaaaaaaaaaaaaaaaaaaaaaaaaaaaaaaaaaaaaaaaaaaaaaaaaaaaaaaaaannnnnnnnnnnnnnnnnnnnnnnnnnnnn

SEQ ID NO: 19966 - DNA, 2763 bp, Homo sapiens
  misc_feature 1, 2, 3, 4, 2762, 2763: n = A,T,C or G
nnnnacgcgtgggtttacgcccggaaacaaagagactaagccagactatgggggaaagggagataagaaggatccggaacttaaagagggaaagagtgagattcagaaatcgccaggactggactttaagggacgtcctgtgtcagcacaagggactggcacacacagacacacgagaccgaggagaaactgcagacaaatggagatacaaagacttagaaggacagctcctttcacctcatcctacttgtccagaaggtaaaaagacacagccagaaagaaaaggcatcggctcagctctcagatcaggacaggctgtggatctgtggcggtactctgaaagctggagctgcagcacaccccttttgtattgctcaccctcggtaaagagagagagggctgggaggaaaagtagttcatctaggaaactgtcctgggaaccaaacttctgatttcttttgcaaccctctgcattccatctctatgagccaccattggattacacaatgacatggagaatgggaccccgtttcactatgctgttggccatgtggctagtgtgtggatcagaaccccacccccatgccactattagaggcagccacggaggacggaaagtgcctttggtttctccggacagcagtaggccagctcggtttctgaggcacactgggaggtctcgcggaattgagagatccactctggaggaaccaaaccttcagcctctccagagaaggaggagtgtgcccgtgttgagactagctcgcccaacagagccgccagcccgctcggacatcaatggggccgccgtgagacctgagcaaagaccagcagccaggggctctccgcgtgagatgatcagagatgaggggtcctcagctcggtcaagaatgttgcgtttcccttcggggtccagctctcccaacatccttgccagctttgcagggaagaacagagtatgggtcatctcagcccctcatgcctcggaaggctactaccgcctcatgatgagcctgctgaaggacgatgtgtactgtgagctggcggagaggcacatccaacagattgtgctcttccaccaggcaggtgaggaaggaggcaaggtgagaaggatcaccagcgagggccagatcctggagcagcccctggaccctagcctcatccctaagctgatgagcttcctgaagctggagaagggcaagtttggcatggtgctgctgaagaagacgctgcaggtggaggagcgctatccatatcccgttaggctggaagccatgtacgaggtcatcgaccaaggccccatccgtaggatcgagaagatcaggcagaagggctttgtccagaaatgtaaggcctctggtgtagagggccaggtggtggcggaggggaatgacggtggagggggagcaggaaggccaagcctgggcagcgagaagaagaaagaggacccaaggagagcacaagtcccaccaaccagagagagtcgggtgaaggtcctgagaaaactggccgccactgcaccagctttgccccaacctccctcaacccccagagccaccacccttcctcctgccccagccacaacagtgactcggtccacgtcccgggcggtaacagttgctgcaagacctatgaccaccactgcctttcccaccacgcagaggccctggaccccctcaccctcccacaggccccctacaaccactgaggtgatcactgccaggagaccctcagtttcagagaatctttaccctccatcccggaaggatcagcacagggagaggccacagacaaccaggaggcccagcaaggccaccagcttggagagcttcacaaatgcccctcccaccaccatctcagaacccagcacaagggctgctggcccaggccgtttccgggacaaccgcatggacaggcgggaacatggccaccgagacccaaatgtggtgccaggtcctcccaagccagcaaaggagaaacctcccaaaaagaaggcccaggacaaaattcttagtaatgagtatgaggagaagtatgacctcagccggcctactgcctctcagctggaggacgagctgcaggtggggaatgttccccttaaaaaagcaaaggagtctaaaaagcatgaaaagcttgagaaaccagagaaggagaagaaaaaaaagatgaagaatgagaacgcagacaagttacttaagagtgaaaagcaaatgaagaagtctgagaaaaagagcaagcaagagaaagagaagagcaagaagaaaaaaggaggtaaaacagaacaggatggctatcagaaacccaccaacaaacacttcacgcagagtcccaagaagtcagtggccgacctgctggggtcctttgaaggcaaacgaagactccttctgatcactgctcccaaggctgagaacaatatgtatgtgcaacaacgtgatgaatatctggaaagtttctgcaagatggctaccaggaaaatctctgtgatcaccatcttcggccctgtcaacaacagcaccatgaaaatcgaccactttcagctagataatgagaagcccatgcgagtggtggatgatgaagacttggtagaccagcgtctcatcagcgagctgaggaaagagtacggaatgacctacaatgacttcttcatggtgctaacagatgtggatctgagagtcaagcaatactatgaggtaccaataacaatgaagtctgtgtttgatctgatcgatactttccagtcccgaatcacagatttggagaann

SEQ ID NO: 19967 - DNA, 4116 bp, Homo sapiens
  misc_feature 1, 4112, 4113, 4114, 4115, 4116: n = A,T,C or G
naattccgggccaggcatggtagcgcatcgctgtaatcccagctactcgggaaactgaggtgggagaatcgattgaacctggaagtggaggttgcggtgagccaagatcatcctgtcgcactccagcctgggcaacaagagcgaaactccatctcaaaaagaaaaaaaaagatatatatgtgtgacttacaggtacaggtaaagttgcttctggttttctggttgttgcatggtatttcctatgcagccacaggtctttattttcttacttaagtgcctccaacttcccataacacaaattaaggcatgatgaacatcctctctgtgctgaacatcctgtgtatgtcacttcagaagcctgtgtgacggtttctttagtctttatacctaggggtgggatttctgggtcataggacagtaatttatatttatttcactaagtattctctttctctggcttttgttacatattacctgtttgtcctccagaaaacttgcaccaatttacattcctaccaatagggtaggagagtgcacaatgggtggattctaactccaaatctaacacctcttcttttctttgtttctagcagccatggcaatgacaggctcaacaccttgctcatccatgagtaaccacacaaaggaaagggtgacaatgaccaaagtgacactggagaatttttatagcaaccttatcgctcaacatgaagaacgagaaatgagacaaaagaagttagaaaaggtgatggaagaagaaggcctaaaagatgaggagaaacgactccggagatcagcacatgctcggaaggaaacagagtttcttcgtttgaagagaacaagacttggattggaagattttgagtccttaaaagtaataggcagaggagcatttggtgaggtacggcttgttcagaagaaagatacgggacatgtgtatgcaatgaaaatactccgtaaagcagatatgcttgaaaaagagcaggttggccacattcgtgcggagcgtgacattctagtggaggcagacagtttgtgggttgtgaaaatgttctatagttttcaggataagctaaacctctacctaatcatggagttcctgcctggaggggacatgatgaccttgttgatgaaaaaagacactctgacagaagaggagactcagttttatatagcagaaacagtattagccatagactctattcaccaacttggattcatccacagagacatcaaaccagacaaccttcttttggacagcaagggccatgtgaaactttctgactttggtctttgcacaggactgaaaaaagcacataggacagaattttataggaatctgaaccacagcctccccagtgatttcactttccagaacatgaattccaaaaggaaagcagaaacctggaaaagaaatagacgtcagctagccttctccacagtaggcactcctgactacattgctcctgaggtgttcatgcagaccgggtacaacaagctctgtgattggtggtcgcttggggtgatcatgtatgagatgctcatcggctacccacctttctgttctgagacccctcaagagacatataagaaggtgatgaactggaaagaaactttgacttttcctccagaagttcccatctctgagaaagccaaggatctaattttgaggttctgctgtgaatgggaacatagaattggagctcctggagttgaggaaataaaaagtaactctttttttgaaggcgttgactgggaacatatcagagagagacctgctgcaatatctattgaaatcaaaagcattgatgatacctcaaacttcgatgagtttccagaatctgatattcttaagccaacagtggccacaagtaatcatcctgagactgactacaagaacaaagactgggtcttcatcaattacacgtacaagcgctttgagggcctgactgcaaggggggcaataccttcctacatgaaagcagcaaaatagtactcttgccacggaatcctatgtggagcagagttctttgtataacatcatgcttttcctctcacactcttgaagagcttccaagaagttgatggaacccaccaatatgtcatagtaaagtctcctgaaatgtggtagtaagaggattttcttccataatgcatctgaaaaactgtaaacaaagacaaccatttctactacgtcggccataaacagctatcctgctttggaagagaagcatcatgagccaatttgataggtgttttaaaaataacttgagttttcctaagttcatcagaatgaaggggaaaaacagccatcatccaacattattgagattgtcgtgtatagtcatcgaatatcagccagttcctgtaattttgtgacacgctctctgccaagcccaccaagtatttcctttatagctaaaagttccatagtactaaggaaataaagcaataaagacagtctcagcagccaggattctggctgaaggaaatgatccgccaccctgagggtggtgatggtagtttctacccatacctcagcctcaggcgagtggcttatagcctccattcatggtgcactttatttatggtactaagataaagactgtcaatccattgatttatctcctcctgtcccccatctaaaatacccatgctgcttttctgagtgttgatgggggttaccagcttgatccactgttgctcttagaaggcccagaaagtctttgggcattgccaagaaatcccggattatgtggaaaaccctcactttctcttcacggctgtaccagaaaatccctaagacagatcttgccgtggactagcaatacctgcaagtgctgccaatgggaactcaatttattcctgggaacctaacgaggagagcccaggcctaggcaggaggcctggaaccctcttggctaaggtgctgttcctgttcctgcaaggtctccagaacccctttggaaatggtgaaggaaccagcccaatagaagtacagagccagctgacaagtccttgtaaagctcactcctcagtccttggcacagccatgttttgtcttctctcttggtatttcttctctcccaactttagccattttgccttggaatcatgattacaattttttcctttgcagatgccttcctgggggatactcctccccaccctaaagggtcgcctgcaacttaggcggattgggtctctctgctgtggcgttctctcttgagagaccctctgaattttagcacaaagtgccttctgtttcacagctgccaccacctttagaggaatttcgtcagaaaaatgtggaggctccatattaatgcattattttttaaaaagttttgataactcttaaagcatcatttgcacctatgtgggaactttgcctgttgcaaagtattgtggccgagctgcagctgggagcctgctttctgccagtcttgaggttctgaagatcagctttgaaaggaaagtatgtcctagcttagccattcagaagagaaaaatggaatatcagagttacagttgtcagtgaaactactttggattttaacctcttagaggaagaaaaaggttagggaagtggtcactcctggatgaaagtgatgttgtcttggcctctcagtctttcattccataagccctgctagtgcaaacggcggtcaatggcaatccttgcgggggccttgcgactcttcgtttcccctagttgggcgggtggccccgctcgttttcccaaatcgtctccctccggcaaaaacaccgcgtgcgacaacctcttgacgacgccaatctccgcacacccccaccattactccacctcgggcagcagaacaacccccacgcgcagctgtgcccaatttgtcttacatgtcgtgtgttgtatcttatgttgcccacccgagcccagccaaacccacccccgtcacgactcacccacccactcagctccccactaccagccctcctcactaccgtcactagccgccaacaccacatacactcgcccacacacgcgcacacacccaccgccatacctacaccccacacgaccagcagccacctaggccaccgctacgcccacccacccccacccgccaccgccnnnnn

SEQ ID NO: 19968 - DNA, 4911 bp, Homo sapiens
  misc_feature 1, 2, 4909, 4910, 4911: n = A,T,C or G
nncagtgaaactggaagggccgacactggaactggcaggaactggaagcaggggaggtacgagagagcttttaccctgtggtccagagactcagccggagtctgagaccaagaccaccccaagccaggcacagcctcatagtgtctctggagcacaactacagcaacccccccagtgcctccaacacctgccgtcagtggagcatgcacaagtgtcccatcaccagcccacatagagaaattggataatgaaaaactgaaccccaccagagcaacagccacagtggcctctgtcagccatccacaagggcccagtagttgcagacaggagaaagcaccttctccaacaggtcctgctctaatctcaggtgcctcacctgttcattgtgcagctgatggcacagttgagctcaaagcaggtcctagtaagaatatacctaacccttcagcctcatcaaagacagatgctagtgtgccagtggctgtaactccctcccctttaacatctttattgaccacagccactttagaaaagcttcctgtaccccaggtcagtgcaactacagcacctgctggatcagctccaccctcgagcactttgccagcagcttctagccttaaaaccccaggaacttctttaaacatgaatggacccactttaagaccaacctctagtatccctgctaataatcctttagtgactcagctgcttcaaggcaaagatgttcccatggagcaaattctgcctaaacctctcaccaaagttgaaatgaaaacggttccactgactgcaaaagaggaaagggggatgggagcgctcatagctaccaacacaacagaaaatagcaccagagaggaagttaatgagagacagtcccatccagctacgcagcagcagctgggcaaaaccttgcaaagtaagcagctcccccaggttccaaggccccttcagctcttttcagctaaggagctgagggactccagcattgacacacaccaataccacgaaggactaagtaaagcaacccaagatcagatccttcagactctcattcagagggttcggaggcagaatcttctctcagttgtgccgccctcacagttcaacttcgctcactcaggtttccagctggaagacatctccacaagccagaggttcatgctgggttttgctggcagaaggacatccaaacctgcaatggcagggcactacttactgaatatttctacctacggccggggctcagagagctttaggaggacccattctgtaaaccctgaagatcgtttttgtctaagcagccccactgaagccttgaaaatgggatatacagactgtaaaaatgcaacaggagagagtagcagcagcaaagaagatgacactgatgaggaaagtactggtgatgagcaggaatctgtcacagtgaaagaggagccccaggtttcccagagtgctggcaagggtgacacaagttcaggacctcacagcagggaaactctatctaccagtgattgcttagctagcaagaatgtgaaggctgagataccattgaatgagcaaaccactttaagtaaggagaattacctgttcactagaggccaaacatttgatgaaaagaccctagccagagatttaattcaggcagcacagaagcagatggctcatgcagtgagaggtaaggcaatccgtagcagccccgagcttttcagttctactgttcttcctctgcctgcagacagccccacccaccagcccctactccttccacccctgcaaaccccgaagttgtatggaagccccacccagatagggccaagctatagaggcatgatcaatgtctccacctcatctgacatggaccataactctgctgtaccaggtagccaggtatctagcaatgtaggtgatgtcatgtcattttcagtgactgtcactaccatccctgctagccaagctatgaatcccagcagccatggccagaccattcctgttcaggcgttctccgaagagaacagcatagagggcacgccttcgaaatgttactgccgcttgaaagccatgatcatgtgcaaaggctgtggcgctttctgccatgatgattgcatcggcccctccaaactgtgcgtctcctgccttgtcgttcggtaatgagactagaaagagatacactgtaaaggagggggaagggaagggttgaccagttgggttttttgcgtccttttggaatcacagaaataaacaagtaggtttcagttgtcttcagagacaaatgttacttaatcaggaatacaaagtacagattttttacattttagaggaagagcaccttgtatagtaagtctaagtcaagcaagactttgtgaatttgtgacaagtttgcacttacaaaatcatgtaaatatgtcacattttgtttaacattatttttccaagtgtttaggtaataatgtattactttgaattcagattaatgttctactacttgtgactgagaaaagtttaatgccggcatggtaaaaggaagctgtctcccttctgacatttcctaggaagctaggaaaaggaaagtgaaggaatggtctaaagaaatgaccattcacactgattttgtctggacagtctggccgcaggttattcatagattattcagcctttgcaggacttggattcagggttttactcagtccctttaccttaggtggaatcttcttaaattgaaatttttggtaaggaattcatttcacaggtagtgtttcagactctgaaagccctgacttggttcttggcttctactgtactagttactagttactggtactgttgccaagcaatctgcttggaatttgtggatccctgctgttccctaatcccaccccctgccctgagacagtgaatgtagtccgtgaagggagtgcctctctgggaccccctgtgttgttacaggctgtgcagtgcaacaattccagcaaaaataccctatccccgcacttagtcattcgtggtaactaacaattttgaaatactcatataaaatgaacaggaaagtgttagtgattgggtgatttgagctacatcttgttgagcaaggggagtgaaaccacagaaactgttaaattgaacgtaaataactttggaaaacagttttgacactagaacaaggtcgcttctcttttcctcttctctcccaacctgttaacctagtgctagatagtcagctgctgttgcaggtagaaaagctcaccaatgccacatttgttcattctgttcaacctgttttgacctcccaggcatctgaacaggatgacatcatcttattatatcttactttacacatacgtgtatgtacacacacacacacaatacaagacatttttcctgttttagaaaatatagcccttgtttggattactgctgtctgagcactagaaatttctaatggaaagaggcctctgaatggctaagggaacatctggaaaggaaggaaaatgagccctaaaggttttttggttgcttgtttttgtttctttttctttcttgtttccttttttgtttttaaatccttctctagtgactgaagaaattgtgagtacataatatttaggtcatggttaaggaacattaaaataaacctgcagtttaacagaattttgtattaaatgggggagtgtcaatttgcatcatttgcatattgatttcaagtctcctaatttggaatgggtaaagtacaaatgttaatgcaacatagtacagttgtatttgtccttcatattcaggatgtgatatttacaaaatgcagaacagtttaaacttgttaagtcacattccagattaggagaaaatgggcaataatcatctctgttttgcccccattctactacccaccactgcccaccccacccccacatcacacactcttcgatgctttcccacagcccctgctccgctcctctccgtaagaaactcacttcactgtttttcacttttcacttctggcttttttgtggcccaaggccaatataggattaatatctgtgttccagcttcagccagaacgatatgtctgtccatctttctcctttcttccagcacacacagctaagagataagaaggctgcaaggattggggataaggagtatattttcaagccaagaaccagtagaaaacagaaataatggtgctcccaaatattcagtaccttgggcaatccaggaagggtttaaagagacctgttgctgcatagaactctccctgccctaccccttaactccaccttagtgccagggccgagggctggtctgcatgctggaagaggttgagagttttggaattgattccatgctaaatgtcagttaccagtttggattgatgaaagtgatttttctgctttacctttttcctgtcagaaaggttttcctctgtgctacccttaacttagggatgaacagactataactaggaaaggaggaaaggtatcagggatttttaagtccgtttagagagcaaaccatattgtgcctcttcatcttgacccaggctcttatagataggtcctaaacattgctgttcactagattatcttaacaaataatactcagctaaatatttgcatttaggaatactcctaaaacagatattgccaactagatacactgcctcaatcttgaccagacaagagaacagttaagttctctcagttgggtagtaacttgaataccagtctatttatcagttggtttcaacacagaggtttcaagtggaaagccattcatcttaaaagctgaacagaaaaattaaaaaaaaaaaaaacactttaccatctggccttttagaattggcggccaaaaacttttgttggttcccgcccctaagaaatttaccttattggggggtactcccatgaagtaagcnnn

SEQ ID NO: 19969 - DNA, 1962 bp, Homo sapiens
  misc_feature 1, 2, 1934, 1935, 1936, 1937, 1938, 1939, 1940, 1941, 1942,1943, 1944, 1945, 1946, 1947, 1948, 1949, 1950, 1951, 1952,1953, 1954, 1955, 1956, 1957, 1958, 1959, 1960, 1961, 1962: n = A,T,C or G
nngagtagaccgcaggagaaatatgccctggggaagctccccacgcagctgagagcctggctggttgcatttcggcttcttaggtgccaagcctactagtgccccggggtcccagccagcggctcgcgtttcctcccccttgcgccgccagtctggttgccatggagacaaaccttgctgcgcagagactgccgagccgcaggcagcggagctggaacccggcgatccagcctctgcaacaggctgggggcggaaggaggagccaggcgaagcggcgcctcagctgagaggaccggcggaccctgcagaggccccctgcccctctggctccgcccccacccgggtcgctagaaatacagccgtagccccgcccaccgcccactgcgctccgacccagacccggctgacccacctacccgcgatcctgcccatggctgacgggctctttcggcgcagaccctggggtctcgagcagattcgcccggaccccgagtccgaaggcctgtttgacaagcctcccccggaagaccctcccgctgcccgcgggcccaggtcggcgtcggccgcgggcaagaaggctggtcggcgcgcgggcgggagggcgcaggggggccgcgccgggcagcccccgaaggccgcatcgcgccccccgcccaagaaggaggcgcctccactggacgagggctgctatctcgaccattttccgcacctctccatcttcatctacgcagccatcgccttctccatcacctcctgcatctttacctatatccatttacagcttgcctgagtggccagcgcgggacggggtgggcgcaggaccgagcggggagggaaagggaaaacggggctcggcattttgtgttttagaacagcgctgcacccccttcatgtagctttcgatgcttgtttctttccgtctttgttgtcactatctttgtctatcagtacgaaagtacaaagtagctgccggcaatgaaataggggtgctgtttgcacctgcaggttaggggtggaggcgtttagaattttggggtgtgattgagccccgtttataattagaatgcccctggacccctaccactctgtgacgtgggggcacgcgcagggatcccatcattttgtgtttggggagctcagagtgcgcccaatcttggaatctttaagggatgagccagacccagacccgcggccttctagagagggtccggcagggagggtcggcgccctggcccggggtgggccggagccctgtgatgctgcatcgcccccaggaggagccagctgtgccccagagttggcgcggccgagagaggacaagagcgcgcagcaggcgaagctggagggcgggactcgactttgttgtcgctgcccggaggagtcgagactggtacccggaggagctgtctcaccaggagaccacgtcctggaagtgtccgggactcgcgggacctgtggctgcagaccccgccggcacgcaggcccagagctggcgcactcctgaggatgagactctgggggccctagccggggtccacgggagggctgtccttggggactctaggatggcttcgttctggcccggctcacttctggagctgtgagacccaagacaaaaggggctgagggatttctcattgacaagagttcgtgcgggaaaaccacctgacccctagggatttgtcatcttaagactcaaaaggcttaataccaggaaccaccttggcaagatatttacccaccggccatctctgtttactcatgaatgttaaatgttaaaacgcagcgctctaaccctgcatattatttacttgcaaatgtctgtaatctgtaattgtgatgcctctgatggaataaattatctttttcagtctcctctaaaaaaaaaaaaaaaaaaaaaaaaaaaaaaaaaaaaaaaaaaaaaaaaaaaaaannnnnnnnnnnnnnnnnnnnnnnnnnnnn

SEQ ID NO: 19970 - DNA, 5259 bp, Homo sapiens
  misc_feature 1, 5258, 5259: n = A,T,C or G
ntatagggagtcgacccacgcgtccggaaagggaagaacctccggggttaggcgtattctagattgacgccttttgctggaagagcgctgctggggttaggattctgcgcggcgaggcaagatgctcaagtccaagacgttcttaaaaaagacccgggcgggcggcgtgatgaagatcgtgcgcgagcactacctgcgagacgacatcggctgcggtgcgcccgggtgcgcagcgtgtggaggggcgcacgaggggccggccctggagccgcagccccaggacccggcgagcagcgtctgcccgcaaccgcactacttgctgcccgacactaatgtgttactgcaccagattgtaagtgcctggaggccggggacctgggcttctgtggcctccagcctgcgactcccaggcagcttagaaacctatgtagaacaagaacagggagaaaatgctaatgacaggaatgatagagcgattcgagtagcagcaaaatggtacaatgaacatttgaaaaaaatgtcagcagacaaccagctgcaagttatcttcataacaaatgacaggagaaacaaagagaaagccatagaagaaggaataccagctttcacttgtgaagaatatgtaaagagcctaactgctaaccccgaactcatagatcgtcttgcttgtttgtctgaagaagggaatgaaatagaaagtggaaaaataatattttcagagcatcttcccttaagtaagctacagcaaggcataaaatctggtacataccttcaaggaacatttagagctagcagggaaaattacttggaagctacagtatggattcatggcgacaatgaagaaaataaagagataatcttacagggacttaaacatttaaacagagctgttcacgaagatattgtggctgtggagcttctccccaagagtcagtgggtagcaccatcttctgtggttttacatgatgaaggtcaaaatgaagaagatgtggagaaagaagaagagacagaacgaatgcttaagactgctgtaagcgagaaaatgttgaagcctacaggtagagttgtaggaataataaaaaggaattggagaccatattgtggcatgctttccaagtctgacattaaggagtcaagaagacatctctttacacctgctgataagagaatccctcgaattcgcatagaaaccagacaggcttccacattagaaggacggagaattattgttgctattgatggttggcccagaaattccagatatccaaatggacactttgtgagaaatttaggtgatgttggagagaaagagactgaaacagaagttttgttacttgaacacgatgttccccatcagcctttttcacaggctgttcttagttttctgccaaagatgccctggagcattactgaaaaggacatgaaaaaccgagaagacctgaggcatctgtgtatttgtagtgtagacccaccaggatgtactgatatagacgatgctctacattgtcgagaactcgaaaatggaaatttggaggttggtgttcatattgctgatgtgagccattttattaggccaggaaatgccttggatcaagaatcagccagaagaggaacaactgtgtatctttgtgaaaagaggattgacatggttccagagttgcttagctctaacttgtgttccttaaaatgtgacgtggacaggctggcattttcatgtatttgggaaatgaatcacaatgctgaaatcttaaaaacgaagtttaccaaaagtgttattaattcaaaggcatctctgacatatgctgaagctcagttgagaattgattcagcaaacatgaatgatgatattaccactagtctccgtggactgaataaactagccaaaattctgaagaaaagaaggattgaaaaaggggctttgactctatcctctcctgaagttcgattccacatggacagtgaaactcacgatcctatagatctgcagaccaaggaacttagggaaacaaattccatggttgaagaatttatgttacttgccaatatttctgttgcaaaaaaaattcatgaggaattttctgaacatgctctgcttcgaaaacatcctgctccacctccatcaaattatgaaattcttgttaaggcagccaggtcaaggaatttggaaattaagactgatacagccaagtctttggctgagtctttggatcaggccgaatctcctacttttccatatctaaacactctgttgagaatattagccactcgctgtatgatgcaagctgtgtacttctgttctggaatggataatgattttcatcactatggcttagcgtctccaatatacacacattttacttcacccattagaagatacgcagatgtcattgttcatcggcttttggctgtggctattggggctgactgtacttatccagagttgacagacaaacacaagcttgcagatatatgtaaaaatctaaatttccggcacaaaatggctcaatatgcccaacgtgcatcagtggcttttcatacccagttattcttcaaaagcaaaggaatagtaagtgaagaagcctatattttatttgtaagaaagaatgccattgtggtattaattccaaagtatggtttagaagggacagtcttttttgaagaaaaggacaaaccaaacccacagcttatttatgatgatgagataccctcacttaaaatagaagatacagtgttccatgtatttgataaagttaaagtgaaaatcatgttagactcatctaatcttcaacatcagaagatccgaatgtccctggtagaaccacagataccaggaataagcattcctactgatacttcaaacatggaccttaatggaccaaagaaaaagaagatgaagcttggaaaatagctatattcaacaaaaatcttcaaagactggtttcttttttaaaagaaaaaacttgaaagaacacttctaagcctaagtgtgtgatacagtttgttacttttaagtacattttaataatttcagacatctgcatttttattgaacagttgactgtatctgacccatcatactactatacttctgggttgaacagaattatttatgcagaataattcaattgaatatccatcacttaaatacagtgacaggacagcaacttcagggatctgtaaagatcatttaaatggagtgctcatctcattgaggagcagattaattttgcgtaagtactttgattatttaatatttgtaagaaaaaactttcattttcctacagaggaaaatagaacaattttagaagcaaggaacaatctcttttctaagtcttggaagctgtcagtgttgaggatgtaatctcctttgccatctttaattcacctaacttacactaggtgttctcttactgtctttaaaagcttcctgtattttattagtggtccttgaaaaactgtgaatgtttgggaattggtagaaaggcaaaaagtaggatattttgacctgactggaaagatggttgtgtttttattgccaggtaataagtgtgatcattgttgaacttcagctccagtgtctctccagaataagacattggcattcaaatgtctatatcttgttacttacaaaataaaaaacagataattagtggcttttaaattgtagttatatcagtgtatatacacgaggggaactgtataaagacatactaaagggaacagattaaaataagtattattaataaaatttggtgtgccagactgactacttcccttgctaatcacagagattagtaatgattaaattaatatcttcaggaatattttgggatagggttgccttaaaacattttacttggcttattcaatttctaaagcacttacgttgtgccaggttccactcaagtaaactatctctgccttcaaggagcttgcagtatagtgagaaaagcctgccaagtaaatcagcaggtatactaaataggtagtcatttaggcactcaataaatgttgactaatttttccagtttcctattactgaggaaaacctccatacactgaggcagaaacttgtgtcagttggaggaaaatagacttgagtagtctttggtccaggtaaaatgggtcagtgacactgaaacagtagagtaggagtcaaaaagccttttctgtgaagtgctagaacattttagactttgttggctatggtctgtattgcaactatagtacacaactctgccgttgatagtgtgtaaggagccatatacaatatgtaaacaaatcaacatgactgtgtttcaacaaggcctgatttgttaagtttcatatatagtcatatgtcacttaatgacagggatatgttctgagacatgtcacttggcaatttcatcattgtgtgaaaatcatgatgtagttacacaaacctagatggtataccctatggtatcctatatgggatagcctattgctcctaacctacaaacctgtatggcatattactgtactgattactgtaggcagttgtaacacagtgctaagtatttgtgtatctaaacatatctaaacatagaaaaggtacagtaaaaatatatatatagatatatataagatataaaatggtacacctatttaggacatttaccatgaacaagttggcaggactggaagctggctctgggtgagtcagtaagtggttagtgaatgtgaaggccatgatattactgtgcactactgtagacttttataaacactatatacttaggctacataaagtaatttcactatgatgttaccatggctgtgtccccaggcaataggaatttttcagctccattgtaatcttacgggatcatcatcgtatatttggccattgttgaccaaaagttatgcagcacgtcattataattttgatgtgtcacaaaacattactcatttgatttcccccacccccgccaaccatttaaaaaagtttgccggctaggtgcggtggctcatgcctgtaatcctagcattttgggaggacgaggcgggtggatcactcgatgtcaggagtttgagaccagcctggccaacatggtaaaacgccgtctctactaaaaatacaaaaacttagctgggtgtaacggcggatgcctgtaatcccagctacttgggaggctgaggcaggagaatcgcttgaacctgggaggcggaagctgcagtgagccgagattgcaccactgcagttcagcctggatgatgagagtgagactccatcnn

SEQ ID NO: 19971 - DNA, 742 bp, Homo sapiens
  misc_feature 1, 2, 3, 741, 742: n = A,T,C or G
nnnataatcagtctattcaattgcaagtttattttcccttcttttcatgtacagaaagatccttcacataatcagacaaaatttttcttcctcatttatataacacatcaataaaaagatcaattaaaataaagattcagagctggcaaaaagcctcaatatcatttgttctaactagggagataacacagtcaatcctttgccttttgaaaagtatgacaatcttgcatgcaattaaaaggtaatattataagtgcaaaaggaaaaacaaatcttaaggaatattaattttaggaggttttcttgtggaggaagagttgtcttaatgttacctacaattataaacaaaatttaaaaaaaaatctttgcactgaataaagatgaacacataaattcttgcataaaacagataagacacctgaaggtatccccccagacataaatacttaacttttaggcttttcctctactcatatgcaaaagtttgaaaagaaaaaacaacatcaggggttggtcatagcacagtctcaatattatttccaaactaaaatgtcagtgatggggatatgagctcttgcatcttaccagagactagaaaaggggcttactgccttataggatacatcagccagacatgaaggctaggccataagcatacattttcttcacaggtccatccactttatgggatttttctcaaggaaagtatagatacagccagtgggcaaggaggtttacctnn

SEQ ID NO: 19972 - DNA, 3054 bp, Homo sapiens
  misc_feature 3050, 3051, 3052, 3053, 3054: n = A,T,C or G
gctctgccagtgccggccgggagaaggcaaggagccgggaggagggcggcgggcgggcctgtctgtttcgacccacgcgtccgcgcgggcgctgcgctgaggggacggcgggaggcgcggcctggcctcgcactcaaagccgccgcagcgcgccccgggctcggccgacccggcggggatctaggggtgggcgacttcgcgggaccgtggcgcatgtttcctgggagttactgatcatcttctttgaagaaacatgaagttacactatgttgctgtgcttactctagccatcctgatgttcctgacatggcttccagaatcactgagctgtaacaaagcactctgtgctagtgatgtgagcaaatgcctcattcaggagctctgccagtgccggccgggagaaggcaattgctcctgctgtaaggagtgcatgctgtgtcttggggccctttgggacgagtgctgtgactgtgttggtatgtgtaatcctcgaaattatagtgacacacctccaacttcaaagagcacagtggaggagctgcatgaaccgatcccttctctcttccgggcactcacagaaggagatactcagttgaattggaacatcgtttctttccctgttgcagaagaactttcacatcatgagaatctggtttcatttttagaaactgtgaaccagccacaccaccagaatgtgtctgtccccagcaataatgttcacgcgccttattccagtgacaaagaacacatgtgtactgtggtttattttgatgactgcatgtccatacatcagtgtaaaatatcctgtgagtccatgggagcatccaaatatcgctggtttcataatgcctgctgcgagtgcattggtccagaatgtattgactatggtagtaaaactgtcaaatgtatgaactgcatgttttaaagaagacaaatgcaaaccaaagcaacttagtaaaataataggtataaaaagttattctgtaagtctgttggttgtatcttgtatcagaatcccagtaagttaagttgtaaagactttggaataagtttcttttaaaaatatgacatagccagtgatgtgtttaattatataactgttcttactgattttattgccccctagcaataagccctttcctttgaatacatgtacaactttggtcatatgagaagcaggtgcgcagagaattccttgaaagatctgaggtttttaacatgaagtctgatgtggttttcctctagcattccaaaaggtttttgctttgaaagtgttagcagaagcatgttgatgtgaattatgatttcttcatgtgctactgttagcacactgagtttttatagttgcacatcattcctcattgtgccttgttttatccattttataaatagagtagatatttgatataccactctgataactcatataaaaatatcatcataaaaagcttaatttcatcccttttatgttggttttaaaaggtaaatgcttaccatattttataattgagaactcttacatagtagaatccattctataatacatgtgttgacaaagctttagagaaagtttcctattctcttccatttcccctgcccaaagtgctgacataggcagtgatgaagaatctttaccaagattttcagggtgtacctatgaaattgctttaaatgcactgctggtgtaaataattagcaagcaaaagcgtttctgtgacttcaggtaccagcttaaagagcactagggatggggaacgaatgccaaatcagactccacctagagcaccaggaaacagcttgtaccctggtagggaaatggtgttgctgaaaggggaggctgagccagtgcgagactgaacttgtgcagccttagccaagacaaagcagtgtttttcagcagacggctgatgggacaggaattgaagaagagaattgactcgtatgaacaggacagggtgaaaatgctgggaattataatgggaaacaaaactatctatgttcatattttgtaatatttcatttgttaagtttatatctggatataatgttctttttaaacaagtataatcatatcgtcggaggttaagattatgaaattttagaatctctattcaagatgatgttcactccaaatacactacagaatttagtcaacattttatataatgtttcaataaatgtttctttcaataaagatactatgtgcccttcatagtaataaaatctcaatcttaaagcatgaatctaaaacataaatatttatattacagactcaattttacaaaattactaattgctctagtgcatatttgaactacaagcaactttttaggaatacctctttatacgtctacatattttagtatataaaaatagataatgctcttggacacattttgtattattcatgatctgaatagtagttagttaaaagatcatttgtaatattatgatcaactgttataaattaaggtcttaataccttttctgctctttcaaataactctaatgaatattcaagatattttagccttttaaaaagttgagatttagctcatggatatattttttggtagggaaacattagggtctccttttcttccttttacctagaatgcctcatttaaaagtgccttgaaaacatttagctccccttcttcatgagcatctgtagagctgaaagtattctggaactttagacagaaagctgaaaggaatctgcagtctcctgctgcagttcaactctgctgtttttcagtcatttcctactgtgagtggagtgatgtttgtgtgtgtgttggcaacatgcctaatgttttcttaatgatgacaacaaatattttaaaactgcatttatcattttttaggtcttcattaaattttaaaatgtatatctgtttcccaccccctacattaggaggataatttcttaaccacattggttaaattttctatttgattctttcttagaaaatctaaaggagaccttgcctcaaatggtatttccgataaggagggggaaaaacccaaaacaccaaaagggcccacgnnnnn

SEQ ID NO: 19973 - DNA, 1471 bp, Homo sapiens
  misc_feature 1, 1469, 1470, 1471: n = A,T,C or G
ncgggcgcgacaggcttctgtctaggtgcggcccgggttgcggtgaggctgtcagtggatccgtgctttgtcggccagcgtttctgcagtctttgtaaaggccccacgagagcgggccaggccgtgtgcctcaggcccttctccctgggtgtgcttaagggggctccttgggcccgcctccccaggaggtagaaaatgagtggcaggctagagatttcacccattttgtgggctggagttaccagtagctccagcagttaccctgaagagagattgggcttcagccttcagcaggtggttctctcccatgcctggccttggtgtggaggggctgtactctgagcccaagtgagtcagctataggaagaggccatacctagagccaagaaccatgaaggcctgagagacggcagactgagcagaattccttttttgagcacgagagcattactagaaccattgtcaaagcagtggcaagggacggagaggtcccaacaggagtcaggaagaggtttgattataaccaagaaaactcactatgctaggaatagactgtgtgcaccagtcccagacacttggcagaagtgtagcagcgttacacatgtgtgcgaagcagatcgcaggttccacgccatctgcatggcctgcaggagcttctgctgctgaccccatgctgagtggccagtggggagcggcgcccggcaggctcttctggggtcgtctgtcctatccgtggattgtatatactcttctctgttaaggagtttttcccaagaagaaaagtatttaaaagaaataccagtgagtgccttaaagttggagaagtaactgcccatgcccagaaataaggatgccagtgcccagaagcagtgagattagtctgtgtccacaagcagaggccccctcgatgggagggagtggcaggcaggagaaggtggcgctgccaggtgcccgggtctattggaggcgccccatctcagacttcctaacacagcctgtgtggaaggcagaacaaagaatgcatgcccagtcagaaatctgttctattctgctccaggaaaatcggaaacctgtgagtcagagtcagagaaacttacccaagcaacgtaattcctgttttcatgggtcctgtagatgtttgagtcaggaaggtaaggcggggagtgactgaataaactctgccttttaaattgagcatctgggccgggcatggtggctcacgcctgtaatcccagcactctgggaggtcgaggtggggtggtcacctgaggttgggagtccgagacagcccgacaaattggtgaaacccgtctctactacaatacagaaaatagctggctggtggtgtgtgctgtatatcactaccgggaagggaggaggagatccttgaccagggcgggggtggcaacataacaggacacccgtaaagaacctcaatgtgagagctcggggggaaagaaataaggaannn

SEQ ID NO: 19974 - DNA, 1090 bp, Homo sapiens
  misc_feature 1086, 1087, 1088, 1089, 1090: n = A,T,C or G
cgacccacgcgtccggtggcgccctgccggccggcggcgggcgcagacagcggcgggcgcaggacgtgcactatggctcggggctcgctgcgccggttgctgcggctcctcgtgctggggctctggctggcgttgctgcgctccgtggccggggagcaagcgccaggcaccgccccctgctcccgcggcagctcctggagcgcggacctggacaagtgcatggactgcgcgtcttgcagggcgcgaccgcacagcgacttctgcctgggctgcgctgcagcacctcctgcccccttccggctgctttggcccatccttgggggcgctctgagcctgaccttcgtgctggggctgctttctggctttttggtctggagacgatgccgcaggagagagaagttcaccacccccatagaggagaccggcggagagggctgcccagctgtggcgctgatccagtgacaatgtgccccctgccagccggggctcgcccactcatcattcattcatccattctagagccagtctctgcctcccagacgcggcgggagccaagctcctccaaccacaaggggggtggggggcggtgaatcacctctgaggcctgggcccagggttcaggggaaccttccaaggtgtctggttgccctgcctctggctccagaacagaaagggagcctcacgctggctcacacaaaacagctgacactgactaaggaactgcagcatttgcacaggggaggggggtgccctccttcctagaggccctgggggccaggctgacttggggggcagacttgacactaggccccactcactcagatgtcctgaaattccaccacgggggtcaccctggggggttagggacctatttttaacactagggggctggcccactaggagggctggccctaagatacagacccccccaactccccaaagcggggaggagatatttattttggggagagtttggaggggagggagaatttattaataaaagaatctttaactttaaaaggggaaaaaaaaaacactcgctttcgggaatataagtgccttcaccctaaggtcccaaattaagannnnn

SEQ ID NO: 19975 - DNA, 1258 bp, Homo sapiens
  misc_feature 1, 1245, 1246, 1247, 1248, 1249, 1250, 1251, 1252, 1253,1254, 1255, 1256, 1257, 1258: n = A,T,C or G
ncgacccacgcgtccggcgccccgctcgcattgttcgggcgactctcggagcgcgcacagtcggctcgcagcgcggcactacagcggccccggcccggcccccgcccggccccggcgcaggcagttcagattaaagaagctaattgatcaagaaatcaagtctcaggaggagaaggagcaagaaaaggagaaaagggtcaccaccctgaaagaggagctgaccaagctgaagtcttttgctttgatggtggtggatgaacagcaaaggctgacggcacagctcacccttcaaagacagaaaatccaagagctgaccacaaatgcaaaggaaacacataccaaactagcccttgctgaagccagagttcaggaggaagagcagaaggcaaccagactagagaaggaactgcaaacgcagaccacaaagtttcaccaagaccaagacacaattatggcgaagctcaccaatgaggacagtcaaaatcgccagcttcaacaaaagctggcagcactcagccggcagattgatgagttagaagagacaaacaggtctttacgaaaagcagaagaggagctgcaagatataaaagaaaaaatcagtaagggagaatatggaaacgctggtatcatggctgaagtggaagagctcaggaaacgtgtgctagatatggaagggaaagatgaagagctcataaaaatggaggagcagtgcagagatctcaataagaggcttgaaagggagacgttacagagtaaagactttaaactagaggttgaaaaactcagtaaaagaattatggctctggaaaagttagaagacgctttcaacaaaagcaaacaagaatgctactctctgaaatgcaatttagaaaaagaaaggatgaccacaaagcagttgtctcaagaactggagagtttaaaagtaaggatcaaagagctagaagccattgaaagtcggctagaaaagacagaattcactctaaaagaggatttaactaaactgaaaacattaactgtgatgtttgtagatgaactatacaagagtatctgaaactaactgttgcctgcatagtcatatcgagtgtgcacttactgtatatcttttcatttacatacttgtatggaaaatatttagtctgcacttgtataaatacatctttatgtatttcattttccataactcactttaatttgactgcaacttgtcttggtgaaatactttaacattataaaacagtaaataannnnnnnnnnnnnn

SEQ ID NO: 19976 - DNA, 509 bp, Homo sapiens
  misc_feature 1, 509: n = A,T,C or G
ncgcgtccgtgaagaagggacgggctgagttccccgacgagagacacacccagattttcctgcagcttggggagaggtcctcccaggagccttggtccctcctggcctgccggagtccttagccaggatggaggctgttgtgaacttgtaccaagaggtgatgaagcacgcagatccccggatccagggctaccctctgatggggtcccccttgctaatgacctccattctcctgacctacgtgtacttcgttctctcacttgggcctcgcatcatggctaatcggaagcccttccagctccggggcttcatgattgtctacaacttctcactggtggcactctccctctacattgctgtctgccactccagagctgggggctaaaagggctgtacagttatttccccctccctgccttaaaacttgggagaggagcactcagggctggccccacaaagggtctcgtggcctttttcctcacacagaagaggtcagcaataatgtcacn

SEQ ID NO: 19977 - DNA, 846 bp, Homo sapiens
  misc_feature 1, 2, 3, 4, 5, 6, 7, 8, 9, 10, 11, 843, 844, 845, 846: n = A,T,C or G
nnnnnnnnnnnacaagatccgcgccagggggttttctccccccccttgtgggcccccactttaagctttgaggtttaaagggtgagcacaccattacccgttgtcttccactggttgggccgtgaaaacaaccccgtcgacccatactctccgcgtatacagagacccgttctctttgtcaattattctaacgagactgggacgacaaacgacagttgttttaccagtctacaataaacaagcatgcctgagtaccctctatatagatttaggcttatgctgacctcgttgtaaatctgtattaactaaaagtaataaaaatacatatgttcattttaaaataattactgattttgcttgctatcccaccccttacccccaactcatatatttttaggacaagattttcctgcataaccacaacctgtctcctcccaccccacccccatcatagatgttttcaaataagaacccctgcgatcagcagaagcatctctaatctaacatgctttgtccttgctagggcaggctaaaagctttaaaaagcaaccggatgctcttctctggttgaggtgaggggaaggcgctcgggtaccaaccccagcacaccccacagcctttcctcggcccctcctcaggcctcctaattactctttctcagcctggagtgtggggccgttaccgtcctcttcccccttctccttccatactgcacttaaccttgctggaagacttaatgatggagatttagggcaactgtggctgcttggacccttcctggaccaaaggaacttaaaacccaacctgacactggaatgaaatccaagtttttaaatatcaccnnnn

SEQ ID NO: 19978 - DNA, 2644 bp, Homo sapiens
  misc_feature 1, 2, 3, 4, 5, 140, 2642, 2643, 2644: n = A,T,C or G
nnnnngatacatgtgagtcattctttattagggaggaagcaagcagggaagccacaggggtagagaacagggtcacctctccactcccgcccctcccatttttcccctcccaacctctaggttttggatacatgacgcancaactgatgaacctggcttcaatgtcaatgtggcctgggctggaggtctggacccccccatgggggatcctgagtacctggctgctttcaggatagtcgtgatgcccatcgcccgagagttctctccagacctagtcctggtgtctgctggatttgatgctgctgagggtcacccggccccactgggtggctaccatgtttctgccaaatgttttggatacatgacgcagcaactgatgaacctggcaggaggcgcagtggtgctggccttggagggtggccatgacctcacagccatctgtgacgcctctgaggcctgtgtggctgctcttctgggtaacagggtggatcccctttcagaagaaggctggaaacagaaacccaacctcaatgccatccgctctctggaggccgtgatccgggtgcacagtaagtgtggagatgggacactcgctgagctcagactgaaggatcttggtggtaccctgccccaccgtggccagatcctagggcttccggtgccagccaggtgacctgctgttggtctggagtaacattcctgtgagtgacccaggcagcaatggtgagcaccccccagtgaggggttatcctctgagcccccccgatggagccagcagggcctaccagacagtggcccctcaaggtagggactggcctccatctctagcgacagccctagaccagggccaggtcaagagcaacactcaggccttgtttgccaaaaggcctggttcccatccctcccctcagtcctggccacaggcgtctcaaggaagctctgctggcttgggggctgcgtcttgggataacccccacatttgtaaagtactttaaattttcaacttcaactcaacatctattgagcatcttatgtcaagacccataatctatactagggataaaaatgagtaaaatagattcccatatcaagggctgggtaggggagccgtgatgtctttacataatggtaaagacatggctgattcctcttacggtgggtgccctcacactgagccagattccaggacatggttcctcacagcagcaggcaggaggagcattctcccggcctgggcacccatgcagagcggccgtggtgatggtcagttctcccgtgttgtgttcgtcccacctcccaggccctcctttcctgagtgctgggctgagcactggtgggggctgtgtttaagtgggaggcccgagcttggggctctgggaggtcactgtgacacagaccctgtctgcaggcaagcaggctctcctgatgctctcaggagccccgcacctgtggggaatgagtcaaaggtggccttgcagccacaggggatgagagaaaggctgggcacctgctaggactccctcacagccatgttgaacccactctgcgtaccctgtcaggctgtgcgggagtgggagcgaagtgaggagaggggcaggtgggagagccgaccccaagtggaggacaggcccgctcctccggggccctgggcctgagacaccaacctcaatatccggtctaggacgcagtgtggaggggcttgctttctccaaccctttctgacctggcatcttaccccaggtaaatactggggctgcatgcagcgcctggcctcctgtccagactcctgggtgcctagagtgccaggggctgacaaagaagaagtggaggcagtgaccgcactggcgtccctctctgtgggcatcctggctgaagataggccctcggagcagctggtggaggaggaagaacctatgaatctctaaggctctggaaccatctgcccgcccaccatgcccttgggacctggttctcttctaacccctggcaatagcccccattcctgggtctttagagatcctgtgggcaagtagttggaaccagagaacagcctgcctgctttgacagttatcccagggagcgtgagaaaatccctgggtctagaatgggaactggagagccgaccccaagtggaggacaggcccgctcctccggggccctgggcctgagacaccaacctcaatatccggtctaggacgcagtgtggaggggcttgctttctccaaccctttctgacctggcatcttaccccaggtaaatactggggctgcatgcagcgcctggcctcctgtccagactcctgggtgcctagagtgccaggggctgacaaagaagaagtggaggcagtgaccgcactggcgtccctctctgtgggcatcctggctgaagataggccctcggagcagctggtggaggaggaagaacctatgaatctctaaggctctggaaccatctgcccgcccaccatgcccttgggacctggttctcttctaacccctggcaatagcccccattcctgggtctttagagatcctgtgggctctgtcgggctcacccttaaccactattcctggctctgcaaaccccagactttgcacacagccccaggctccacacagaaatgtgaacttggcctcagacannn

SEQ ID NO: 19979 - DNA, 2594 bp, Homo sapiens
  misc_feature 1, 2594: n = A,T,C or G
nacgctgcgccccgttaaagcgccaccagacgccgcgccccgtcccggcctcccccgcgcgctggcgcggggctttctgggccagggcggggccggcgaactgcggcccggaacggctgaggaagggcccgtcccgccttccccggcgcgccatggagccccgggcggttgcagaagccgtggagacgggtgaggaggatgtgattatggaagctctgcggtcatacaaccaggagcactcccagagcttcacgtttgatgatgcccaacaggaggaccggaagagactggcggagctgctggtctccgtcctggaacagggcttgccaccctcccaccgtgtcatctggctgcagagtgtccgaatcctgtcccgggaccgcaactgcctggacccgttcaccagccgccagagcctgcaggcactagcctgctatgctgacatctctgtctctgaggggtccgtcccagagtccgcagacatggatgttgtactggagtccctcaagtgcctgtgcaacctcgtgctcagcagccctgtggcacagatgctggcagcagaggcccgcctagtggtgaagctcacagagcgtgtggggctgtaccgtgagaggagcttcccccacgatgtccagttctttgacttgcggctcctcttcctgctaacggcactccgcaccgatgtgcgccagcagctgtttcaggagctgaaaggagtgcgcctgctaactgacacactggagctgacgctgggggtgactcctgaagggaacccccacccacgctccttccttcccaagagactgagcgggccatggagatcctcaaagtgctcttcaacatcaccctggactccatcaagggggaggtggacgaggaagacgctgccctttaccgacacctggggacccttctccggcactgtgtgatgatcgctactgctggagaccgcacagaggagttccacggccacgcagtgaacctcctggggaacttgcccctcaagtgtctggatgttctcctcaccctggagccacatggagactccacggagttcatgggagtgaatatggatgtgattcgtgccctcctcatcttcctagagaagcgtttgcacaagacacacaggctgaaggagagtgtagctcccgtgctgagcgtgctgactgaatgtgcccggatgcaccgcccagccaggaagttcctgaaggcccaggtgctgccccctctgcgggatgtgaggacacggcctgaggttggggagatgctgcggaacaagcttgtccgcctcatgacacacctggacacagatgtgaagagggtggctgccgagttcttgtttgtcctgtgctctgagagtgtgccccgattcatcaagtacacaggctatgggaatgctgctggccttctggctgccaggggcctcatggcaggaggccggcccgagggccagtactcagaggatgaggacacagacacagatgagtacaaggaagccaaagccagcataaaccctgtgaccgggagggtggaggagaagccgcctaaccctatggagggcatgacagaggagcagaaggagcacgaggccatgaagctggtgaccatgtttgacaagctctccaggaacagagtcatccagccaatggggatgagtccccggggtcatcttacgtccctgcaggatgccatgtgcgagactatggagcagcagctctcctcggaccctgactcggaccctgactgaggatggcagctcttctgctcccccatcaggactggtgctgcttccagagacttccttggggttgcaacctggggaagccacatcccactggatccacacccgcccccacttctccatcttagaaaccccttctcttgactcccgttctgttcatgatttgcctctggtccagtttctcatctctggactgcaacggtcttcttgtgctagaactcaggctcagcctcgaattccacagacgaagtactttcttttgtctgcgccaagaggaatgtgttcagaagctgctgcctgagggcagggcctacctgggcacacagaagagcatatgggagggcaggggtttgggtgtgggtgcacacaaagcaagcaccatctgggattggcacactggcagagccagtgtgttggggtatgtgctgcacttcccagggagaaaacctgtcagaactttccatacgagtatatcagaacacacccttccaaggtatgtatgctctgttgttcctgtcctgtcttcactgagcgcagggctggaggcctcttagacattctccttggtcctcgttcagctgcccactgtagtatccacagtgcccgagttctcgctggttttggcaattaaacctccttcctactggtttagactacacttacaacaaggaaaatgcccctcgtgtgaccatagattgagatttataccacataccacacatagccacagaaacatcatcttgaaataaagaagagttttggacaaaaaaaaaaaagaaaacaaacaaacaacgcaggacacaaagccagaggggcggcaaaacaaggcacgacaaggaacatggcaacaccn

SEQ ID NO: 19980 - DNA, 1860 bp, Homo sapiens
  misc_feature 934, 941, 1838, 1839, 1840, 1841, 1842, 1843, 1844, 1845,1846, 1847, 1848, 1849, 1850, 1851, 1852, 1853, 1854, 1855,1856, 1857, 1858, 1859, 1860: n = A,T,C or G
tcctgacttttccattgactaagctctgtggccttgggcaagtcactccccctctctgagcttcagtatcctcctgtcacaggagggagttgggctagatcatctttaaggtaggttctagctttgacatcatcttgggggttaggccagaggctgggaagactgggtggactttctcaattgctctgccaggagggaacaagcccagaggctgaagcttcccagtatttagaggtgtggtagggcagtgtctgcattcccaggagacccagggtgattaaaatttattctttaggtggctaggagggctggggaggcccagtggaagagagagagagagagagagagagagagagagagagagagatcgagcttgatgtattgctcagtattcacttagaagggtttctttctctttggcctagtttgtgaagggatcttcctttggactttctctaagttgggagaagaacattcttttcaatggagctcatcttctatctctagggtctgttcagcctttcatctatccatccttcctctttattggtagaagaaacagtggagagtagccacttctggttctagcacttctcttttgttaagatagggtttggatttagtatgaagctttggctaaaacccttgggtttgccttagaacactgacactaagaacctggaatgacatggggaggacaaagagagctcaagaggaatgctttgtgagaagtggattctctccgtgtccctgccccccacccaaacttgaactatacctattacatttccaggcagtatccctaagatgagatcctggagaaaggactaggggaagtatctttctggatgcttgtggtcccagaagggtactttctgtgtcataccatgccacttctttaagctcttcagggcagccaaagccagcccttttnttcctantgcccccaggagaatagcactcttctcccttgcccccagatggcaggctctggcctccctacacctcataccctgcctcctccaggaggaatctccggggccccttcctgactctccccaccttcgccacttgtctctaggctatgggacaatcatcccattcaccacttgacatccttgacatccttgactttcattcccccaacctccagcaggttggccccaatcctcttcacctctgtgttttcttctagaagatgcattttgggtctgagaggagcattttcctggaaggccatcttttaaggcccctgcttgctgtcatagtgcagagcagaaacttgcacactatttagagagctcccttcccacctctctgcccagccttgttacctcacttctgctctggccatggctgtgaagggcccagccagctccctgttttgatgttctgtgcaacagctccggggtcttgtgactggagatcctcaacaggccctggagccaggactggagtcttggcagctgatgagcagcaccttgccggccaggaggagctgatgctgacgatctccccaacatctgaaggcttaaagaacattgtcgttcttcagccctccttgcttctctcaataccaataagacattgcagaagcaaagggtggctctgcttcagcaagcagggctctgtctgggcgtcggcctgggcttggtgcccgtgcggagatgctagcaaacagcatttgccaccatagctggggtcccccatttccaccggactcaggccacccctggtggccacaccccaacccgtggttccaccacaaccagggggggggcaagcaggcccaaacccggggggcggagcgacccccgcctgacagaccaaacacaaannnnnnnnnnnnnnnnnnnnnnn

SEQ ID NO: 19981 - DNA, 1340 bp, Homo sapiens
  misc_feature 1, 2, 3, 4, 31, 60, 72, 209, 1337, 1338, 1339, 1340: n = A,T,C or G
nnnncaggactggtaatcctcttttaggaantgttggacccggtttccttttacccaatnacccctaatttnaattattacctggataacttggtaattggaaggatgccaggttattaccagaggggaaattaaaaggaattaactgggaggattagaaaaaaatatttttaataccattaatatgggaaattattccaccaccatgntaagcactcttcaatttcccttagatgtcacctgtctctttctttatctctcattccttctccagtggtagcatttgggtactcaacccaagactcacaggtttccatcaactaagtttcagagagcttaaacaagatattttcagtacacaaattctcagaagagtctactttaatcagagcaagatgattatcctttacacctataaacactccaggatcagtcttgcattcaaatgaaacacagttggagtgcatattatgaaggacaaagaaggcctggtctggcagtggtttttcacacttatggagctccacagagtgttccttgttgttggcatgcaaccagaagtcttttgtaggactcagggttaccattaacatcttaccatcaacaccgtcacctgattcatttgaggggtgttgagactcatagtaactcagtaacaccttatctttcttttcatcttttttcaagtcttcaacatatatctcataactttcatcctccaaagcaaaagtaatggattgatcattgtatgtgcttagagaagcaagatactctgtaataggtgaaattcctgtgatacttgaatcatgaagtgctctagtatatttctggacccctgatataccaaaggcaaagcactccacagtagactgctgttgacaggcagcgagtaccagatgtcttttgtgctttctacctgttttcagtgaaggccttttggtggtttctctcctaaagtaacaggcctccttttttatcataaggccagagcggagcttcataaagtacatggggcaaacttctttggccttctgttgggattttcccagcttgaaacacaaggctttgcttgctgtgttcttccactttgctgtggaaattttgttggttgaatacttcattttaggcttcatttttcagtattcttgtgatcttgttttgatttcttccctgaagagctgcagctctgtgttcgatgtcaatgacaatcctccagagtttactgccatgacgttttatgggtgaagttcctgagaacagggtagacatcatagtagctaatctaactgtgaccgataagggatcaaccccatacaccaacctggaacgcagtgtannnn

SEQ ID NO: 19982 - DNA, 3275 bp, Homo sapiens
ctccccttaccccacatccagcagtgaatgaatcttttgcccatccttcaagggctttttcccagcctggaaccatatcaaggccaacatctcaggacccatactcccaacccccaggaactccacgacctgttgtagattcttattcccaatcttcaggaacagctaggtccaatacagaccctggggacacaggcgctcctggccctgtgggcatgaaaggtctctctggtgacagaggagatgctggcttcacaggggagcaaggccatccaggaagccctggatttaaaggaattgatggaatgcctgggacccccgggctaaaaggagatagaggctcacctgggatggatggtttccaaggcatgcctggactcaaagggagacccgggtttccagggagcaaaggcgaggctggatttttcggaatacccggtctgaagggtctggctggtgagccaggttttaaaggcagccgaggggaccctgggcccccaggaccacctcctgtcatcctgccaggaatgaaagacattaaaggagagaaaggagatgaagggcctatggggctgaaaggatacctgggcgcaaaaggtatccaaggaatgccaggcatcccagggctgtcaggaatccctgggctgcctgggaggcccggccacatcaaaggagtcaagggagacatcggagtccccggcatccccggtttgccaggattccctggggtggctggcccccctggaattacgggattcccaggattcataggaagccggggtgacaaaggtgccccagggagagcaggcctgtatggcgagattggcgcgactggtgatttcggtgacatcggggacactataaatttaccaggaagaccaggcctgaagggggagcggggcaccactggaataccaggtctgaagggattctttggagagaagggaacagaaggtgacatcggcttccctgggataacaggcgtgactggagtccaaggccctcctggacttaaaggacaaacaggctttccagggctgactgggcctccagggtcgcagggagagctggggcggattggactgcctggtggcaaaggagatgatggctggccgggagctccgggcttaccaggttttccgggactccgtgggatccgcggcttacacggcttgccaggcaccaagggctttccaggatccccaggttctgacatccacggagacccaggcttcccaggccctcctggggaaagaggtgacccaggagaggccaacacccttccaggccctgtgggagtcccaggacagaaaggagaccaaggagctccaggggaacgaggcccacctgggagcccaggacttcaggggttcccaggcatcacacccccttccaacatctctggggcacctggtgacaaaggggcgccagggatatttggcctgaaaggttatcggggcccaccagggccaccaggttctgctgctcttcctggaagcaaaggtgacacagggaacccaggagctccaggaacccccgggaccaaaggatgggccggggactccgggccccagggcaggcctggtgtgtttggtctcccaggagaaaaagggcccaggggtgaacaaggcttcatggggaacactggacccaccggggcggtgggcgacagaggccccaagggaccccccggagacccaggattccctggtgcccccgggactgtgggagcccccgggattgcaggaatcccccagaagattgccgtccaaccagggacagtgggtccccaggggaggcgaggcccccctggggcaccgggggagatggggccccagggcccccccggagaaccaggttttcgtggggctccagggaaagctgggccccaaggaagaggtggtgtgtctgctgttcccggcttccggggagatgaaggacccataggccaccaggggccgattggccaagaaggtgcaccaggccgtccagggagcccgggcctgccgggtatgccaggccgcagcgtcagcatcggctacctcctggtgaagcacagccagacggaccaggagcccatgtgcccggtgggcatgaacaaactctggagtggatacagcctgctgtacttcgagggccaggagaaggcgcacaaccaggacctggggctggcgggctcctgcctggcgcggttcagcaccatgcccttcctgtactgcaaccctggtgatgtctgctactatgccagccggaacgacaagtcctactggctctctaccactgcgccgctgcccatgatgcccgtggccgaggacgagatcaagccctacatcagccgctgttctgtgtgtgaggccccggccatcgccatcgcggtccacagtcaggatgtctccatcccacactgcccagctgggtggcggagtttgtggatcggatattccttcctcatgcacacggcggcgggagacgaaggcggtggccaatcactggtgtcaccgggcagctgtctagaggacttccgcgccacaccattcatcgaatgcaatggaggccgcggcacctgccactactacgccaacaagtacagcttctggctgaccaccattcccgagcagagcttccagggctcgccctccgccgacacgctcaaggccggcctcatccgcacacacatcagccgctgccaggtgtgcatgaagaacctgtgagccggcgcgtgccaggaagggccattttggtgcttattcttaacttattacctcaggtgccaacccaaaaattggttttatttttttcttaaaaaaaaaaaagtctaccaaaggaatttgcatccagccagcagcacttaaacctgccagccactgtcaccgagcgggtgcaagcactcggggtccctggagggcaagccctgcccacaggaaagccaggagcagccctggccccatcagccctggctagaacgccaccgcctgaaggcccagcttaaccacttcggcacacaccctatgtacccgtgcgcttcccatgcgcaagacattcacttgtcactcctttcgggggggcgacgaacactgcccagccggccgcggggcaagtccggggtccagggccaggcccgtccccaaggccgggtggctgcctcgtttacgccattttgccgccgttcccacgggtgaatttacgagcggcgttttaacaatacggggcctgccctacaggggacacaggcgaatattatgccggggccctcacgtcttacatgaataatgtcc

SEQ ID NO: 19983 - DNA, 1463 bp, Homo sapiens
  misc_feature 1461, 1462, 1463: n = A,T,C or G
tatagggagtcgacccacgcgtccgcaaacgccggcgctgacaggggccgccagcccctccgccgcgcggagcccacgaaggggacagcgcagccggcccagagctcgggtctccggggaccgagccttatgatctcctcattgcgtccccctctgcccactggacttggacttcagatctgaccccagacctgccggctacctcgggagggcccacctccccgcccatccagcaagatgccaatcctcaagcaactggtgtccagctcggtgcactccaagcgccgttcccgagcggacctcacggccgagatgatcagcgccccgctgggcgacttccgccacaccatgcacgttggccgggccggagacgcctttggggacacctccttcctcaatagcaaggctggcgagcccgacggcgagtccttggacgaacagccctcttcttcatcttccaaacgcagtctcctgtccaggaagttccggggcagcaagcggtcacagtcggtgaccaggggggagcgggagcagcgtgacatgctgggctccctgcgggactcggccctgtttgtcaagaatgccatgtccctgccccagctcaatgagaaggaggccgcggagaagggcaccagtaagctgcccaagagcctgtcatccagccccgtgaagaaggccaatgacggggagggcggcgatgaggaggcgggcacggaggaggcagtgccccgtcggaatggggccgcgggtccacattcccctgaccccctcctcgatgagcaggcctttggggatctgacagatctgcctgtcgtgcccaaggccacgtacgggctgaagcatgcggagtccatcatgtccttccacatcgacctggggccctccatgctgggtgacgtcctcagcatcatggacaaggaggagtgggaccccgaggagggggagggtggttaccatggcgatgagggcgccgctggcaccatcacccaggctcccccgtacgccgtggcggcccctcccctggcaaggcaggaaggcaaggctggcccagacttgccctccctcccctcccatgctctggaggatgaggggtgggcagcagcggcccccagccccggctcagcccgcagcatgggcagccacaccacacgggacagcagctccctctccagctgcacctcaggcatcctggaggagcgcagccctgccttccgggggccggacagggcccgggctgctgtctcaagacagccagacaaggagttctccttcatggatgaggaggaggaggatgaaatccgtgtgtgaggcggacagtgggtggccacaggagagtggggggcgatatcccgtgcccaccaatattattggataggcttgtagcgctcgatttagtataaatatgactgactttagtagagaggtgcacagtattgcgcaaagagttagtgagaaggcgannn

SEQ ID NO: 19984 - DNA, 1257 bp, Homo sapiens
gcgtccgctcgcggcagggcatcgagtacatcctcagcaaccagggctacgtgcgccagctctcccaggccctggacacatccaacgtgatggtgaagaagcaggtgtttgagctactggctgccctgtgcatctactctcccgagggccacgtgctgaccctggacgccctggaccactacaagacggtgtgcagccagcagtaccgcttcagcattgtcatgaacgagctctccggcagcgacaacgtgccctacgtggtcaccctgcttagcgtgatcaacgccgtcatcttgggccccgaggacctgcgcgcgcgcacccagctgcggaacgagtttatcgggctgcagctgctggacgtcctggctcgcctgcggtgagtccccactgtagcggtcctgccggctccccctcctgctcccaaggccaggcccacctgccctttggctcccagccacctcacctaagcagcacctccagatggcagggaggtggctccctcggagtaaccccaggggtccagccagaagccaggtctcaggctagaatccagctcactgtccctggcagctgcccacagaaactagggttgcagcagccatagaaaggacagaatgagctcatatcctttgcacaccgtggatggagctggaggccgtgatcctaagtgaaccaacccagaaacagaaaatgaaatgccaataagagggaactacagggtggttcacgtggacgcaagatggagacagggacacgggctccagggcgagagttgaaaaactacctacagggtacagtgttcgtcgctacttggtgtcaggcccactagaacaagggtccccaaccgccaggctgcggaccggtacctggcctattggaaccgggccacgcagcaggaagtgagcggtgggcgggcattcctgcctgagctgcacctcatgtcagatcagcactgcattagattctccagcgcacgcacgcgcgcaagggatccaggctgcgcgctcctcatgacaatctaatgcctgatgatcgggggtggaacagttttatccctaaaccattcccgtcaccccagtctatggaaaaattgtcttccacaaaaccagtccctggtgccaaaaaggctggggaccactgccctagaaggcaaatcgcctacgttacacagtgtaccatgtggcaaacacgcacatgtacccccgagtctaaaataaaaattttttaaaaaagaaaaaaaaaaaaaaaaaaagg

SEQ ID NO: 19985 - DNA, 593 bp, Homo sapiens
  misc_feature 1, 2, 3, 593: n = A,T,C or G
nnnccttcgacctaaatgtccagcttctcttgaaaacttggtatatctggccacactgggctcacattcccaagggtaactcttggccagagctgagtggcagccgcctcccttatgcaggacatgtgctctcggcttcaccagggttctgaccgggtctgcttctgcattcacagcgcctcctggacctgaaggcatctgagtgtgagaccctgttctaactcttagaagtgacattgtaagaggtggtggggaccagctaattggtccaacccagcctgagtgcaccaccctttgaacaaatgtatcagtgatgaaaatttgcctttgccccggcttgcctgtaatcccagcactttgggaggccgaggtgggcggatcacttgaggtcgggagttcaagaccagcctggccagcgtggcgaaaccccgtctctactaaacataaaaaaattagtcaggtgtggcggtgcgtgcctgtggtcccagctattcaggaggctgaggcaccagaattgcttgaacccaggaagtggaggttgcagtgaactgagactgcgccacggcactccagcctgggcgacagagcaagan

SEQ ID NO: 19986 - DNA, 1984 bp, Homo sapiens
  misc_feature 1, 2, 1968, 1969, 1970, 1971, 1972, 1973, 1974, 1975, 1976,1977, 1978, 1979, 1980, 1981, 1982, 1983, 1984: n = A,T,C or G
nnccggacgggcgccccgagcgacggctgcgccgcacggagcgaggcgaccgctgaggccgcggagagtgacggcggcccggccgacgggagccggggcggggcggcggcccagcgaaggagcgcgcgggcggtctggccccgccccctccccgcccgccttcccggtgaccttcaggggcccgggtggcgggcgcaggcccctgcggcggcggcgggatgttcgtgcaggaggagaagatcttcgcgggcaaggtgctgcggctgcacatctgcgcgtccgacggcgccgagtggctggaggaggccaccgaggacacctcggtggagaagctcaaggagcgctgcctcaagcactgtgctcatgggagcttagaagatcccaaaagtataacccatcataaattaatccacgctgcctcagagagggtgctgagtgatgccaggaccatcctggaagagaacatccaggaccaagatgtcctattattgataaaaaagcgtgctccatcaccacttcccaagatggctgatgtctcagcagaagaaaagaaaaaacaagaccagaaagctccagataaagaggccatactgcgggccaccgccaacctgccctcctacaacatggaccgggccgcggtccagaccaacatgagagacttccagacagaactccggaagatactggtgtctctcatcgaggtggcgcagaagctgttagcgctgaacccagatgcggtggaattgtttaagaaggcgaatgcaatgctggacgaggacgaggatgagcgtgtggacgaggctgccctgcggcagctcacggagatgggctttccggagaacagagccaccaaggcccttcagctgaaccacatgtcggtgcctcaggccatggagtggctaattgaacacgcagaagacccgaccatagacacgcctcttcctggccaagctcccccagaggccgagggggccacagcagctgcctccgaggctgccgcgggagccagcgccaccgatgaggaggccagagatgagctgacggaaatcttcaagaagatccggaggaaaagggagtttcgggctgatgctcgggccgtcatttccctgatggagatggggttcgacgagaaagaggtgatagatgccctcagagtgaacaacaaccagcagaatgccgcgtgcgagtggctgctgggggaccggaagccctctccggaggagctggacaagggcatcgaccccgacagtcctctctttcaggccatcctggataacccggtggtgcagctgggcctgaccaacccgaaaacattgctagcatttgaagacatgctggagaacccactgaacagcacccagtggatgaatgatccagaaacggggcctgtcatgctgcagatctctagaatcttccagacactaaatcgcacgtaggtggcgttgttccactcggctatcaggccacagcagccccctggtgcggcccgagaccgggcagagtggacctcacctggaaactcaccttcagcgcctcagccctggactgttagaggtgctgcagcggctcctgctctctgatcttattgcttataaactttggtgacggtagtgtgtaaggccgtatttttagcatctgacaggtgtttacaaaaaagtggttgtcgcactgggaagtggagtgatggcctcgtctccagtgctcctctgggctcttgagttgctgcttgaattgccgtgtagacatttgcttggagagtccacttgttatttgacggaggtaggtttcaacccagagttaatgtcaagcatgctaatttaactagtcactcacagatgacttttctttaataaagtcccttttcctaaaaaaaaaaaaaaaaaaaaaaaaaaaaaaaaaaaaaaaaaaggggggggcaaaaattccccggggggccaatagccccccttttttgaaaggggcccacannnnnnnnnnnnnnnnn

SEQ ID NO: 19987 - DNA, 1176 bp, Homo sapiens
  misc_feature 1, 2, 3, 4, 5: n = A,T,C or G
nnnnnctgatcagctcctggttggcttctgacgcagcgtgacgtcgtggccgttgttgctcctctctgcgtgggcgcggtggtcgctcggttgagtctgcggtgggtggtcggccgcgtcgttcgtgcggcgtggtggctggcgcggcgggtggggtgctcctgtgcgagctgcggcgtggtgtggggcgtggcgtgacgggtgtggccgggcgcgacgagcggtggtcgggggtgggtggtctctctcttccgagtgttgttttttgtctggtggagcccaggggtgcaccgtggttgtctccgctgcccccggccgttggttgtactcctgctcaatgcccgccagagacttgatgtcagtccccaaagcagagaagccaggggctcagctctgccctcaaatcgtgggtggagtgtgaaagggaaccccatccatgcctgagatgccatagaggctggagcctcgtagatggagtcattcctccgcagagtggatgcccgagagcccagccttgacgctgtccgctccaggagccgcccttacttggctggctggctgcatccagagagaggccctgcatgtcccggctgagacctcggggcttgggcactggcctcggggccttggccttcttgcaccagatggcaaagccgcccatgtcccctattcgaaggtatccaggcactgtcttggtcttcccactcagccggacatcaaacacagccgtgtccgtggctcccaggggcaacagcttcacacacatgcgtttcttcttggacacagaggccttggaatccatggggtcgcagacgggggagaagcccagcggcagggggctcttgtccaccacgatctggatatcggccaccacgttctcctgcgggttctctaggctgcccagagaactaaggcacaggaagtagccagatttctgcgcgaagctcttgccaaagctggcgggtgccccctcgacggtgcaggagatcgcgctgaacccccgcggcgggggtgcagaggccgacgaccaggccaggccagccagcggcgccgagtctgtcccgggtacgggatccatcctgcgagccgagcgccgaaggcggggtcgcggggcacagcctcgaacctcggagcgcctcccgacggcagcgctcgcgaccgaactaccgcccgacg

SEQ ID NO: 19988 - DNA, 4146 bp, Homo sapiens
actttttttttttttttttttttaatctaatgaaactgagccacagaatagtaagtggaggatccagaatctaaacctttaaaagataagccatttctatcaccatcccctcagtgcccagaattccagatgggaagtgataccgttttagagttaaaatttctggcctcacgcgtgtaatcccagcactttgggaggccggatcacttgaagtcaggagcgtcagaccagcctggccaacatggtgaaaccttgtctccaccaaaaatacaaaatttcagcgtcaatttagtagatactaatggttttaggaatcggaaaggagtcctatactatcttgccactcaattatgtgaatccacataattgggtggcatcgataaacaccggtgtttatcgatgccaccaagagccgccgcaggtgcagatcttggtggtagtagcaaatattcaaacgagaactttgaaggccgaagtggagaagggttccatgtgaacagcagttgaacatgggtcagtcggtcctgagagatgcggcgagcgccgttcacgaagggacgggcgatggcctcccctgccctcgcccgatcgcaagggagtcgggttcagatccccgaatccggagtggcatcgataaacaccgggtttatcgatgccaccttgtatattgagccaaccgtggactcctaacttctccgagggccacaccccatgcctggcttccccaccccatggaggaatgtgtgcatgaacagaaaaggagaacgagcagcggggtgggggtggggggttgccatctacgccgttttagtgtgagggacactgggaacgatgcccagaggctgctctcctcccagcctcaaaggttgtcagctccaccagagcagggtcttctctcctcatgccaggaactgagagaagtgggggtaggggaccactaggtctttgccactgtatcttgagctgggggactcctaacttctccgagggccacaccccatgcctgccttccccaccccatggaggaatgtgtgcatgaacagaaaaggagaacgagcagcgctaaggtcctcatcaggccccaggcccatctctggcaggcagtgcttaaaaaataaaaaaagacaaataaagcccagtgcaggcctttggctgagaggaatgagaattgctaattaatcaccaggcccaagaggatatgaaagaatagcaaagagaagcaacaaactccaggctcttctacctttgagtaccatggcaatgaggatcccgccgcatcccctacccacaggctgtgacagggcctcacttggatccttttatcatggaggaaatgaggtatagggctctgcgccttttcaagctttccttcaatcaagccaggaaggcaggggaataagggcgccgaaagttgaagaacacacggagtataatgtgcaacagatgggctgggggaggagggtaccaccaaagtccagactttcaggacagcccaaacttcaaatattctggtctgtcagataacatatcccaatttttggcaaaaatatggtcattaggagaaaagcacgagagaggctgagaaaggaccagtgactttggtatgaagaagatacgtcctgacagcatctctcacctactgtcttgaagccccaaatcaccaagaaactgccataaccaggaactctcctgcttcctcaggctatttggttctctgagggggaaggagttgggtaagtcttggaggaagcaaaggagtgggtagaaaaaggggaaaatccccatttattccctaaagctgtctcccagagcccataaaagggctattgcagggatggcaagaccccaattcctctggccagaaacctttaacacttgactccaaaaactaaggctggagctgtggggttcagtaggggtgttaggcacaggtgttaggggcatccatcatcagcagagggaacacccctgccctccggatcttcctccagccccttttctcttgcagccacactcctgggcctccagaaatagccacaaaatggctctgctcagcagggctttggtttcctggatctctgtagatctcaacatgtaagtttcccaaaacagtgagcaatccaggctcttctgcctgcccacctcaattccttttctgctcccaggagccactgtttctgccccatggggatggaaagccagtggaaacaaggaccaagagccaaacatcaaaaaaatcaccctggaagagcagggagagacatgtgcacttccctgggccacttcaccagcgtcacccatcgttagcagccaccagctgccccatgccctcacggatgtagacagactggatctccttggtcttgaggcagagatcgcaggcccagacggcagaagcttcagtggtcagcagcccataggcgctctcagtcatgcctgtgcactcacggtggaaccatttctggcaggaggcctcacacagaatggcatcctggtcatcgttcacctcactccgacaggcaccacatgggtacaccaagcctgggggaggctggggcccggagcccccacctgccttgccagggggtgccaagctgttggcatctggagtgcccccaccccgcccactgctgttcggggggaaactgggctggttcccattaacagcagcagccggggagcctgagtggggctcctggggaaaagcagtagaagcaggtggattcaagggcttccccccatcctcaccaccagggccaggaaagccagggtccggaccaggaaagggacttgtgttaggcggcaggctggggagcccctgaccaggtctctggagaggagaagggccaaaaggagcccctggctgagcaaatcgttgggacagagaaggtgggcccagctctgctctgggaggctgtcccatggtgggtgagatcatgggaccaaatccccccactgggcccggcatcatctgcccactgggaggactaaagttttgacccagaggctggttgaagggttggctgggaaagttcatgttgcctgggggtgggtagccaggaccctgggggggcatgttgaaagcagggcccataggattgggagggaaggggggtggctgtcgacggagtggctgggggccccctccacctccagtgctgtagcctgggggtacctggcccgccatgcccccctgcacacggaagcctccgaagggcacaggactgccaaggaatggaggggctgcaacccccactttgggggctccgaagtcatcttcaaaagggttggatgcaaccaggtgatccaccatgggagttgggggtggtgcaaactccgtcagatgtgagtatgcagggccctgagtatttgacttccttcgcttcttttctggactcttcatttgcagaccggccttgccctgcttcctcccggtgctgggcggcgcagggggcggtgcggggccgccacctccctccagcttgtccggtgggggcggcgccgaggcggccatggagtgggggacccgggttagcggcagcggcgggggatggaggcgcccttgggctgcaccatcgcccagaaggggtgtcaggggcagcccaggcccccgagctgcagcaaccacaaagtgcgacgacagggaagcgccgagccgccgcgcaaactgcgcgctctctccagactcgccgcccgccagcggcggcagcaaccggaaccggaactcgtcgcggccaccaccactgagcgctgcggggagggggagcaaggaccggacgagacgctacgcctgaaaacaggcggcgggcgagggacgaggcttaccacggcaccacgcgagtggaaagggtcgtctccgctagcggcggcccacaccagctcaccgaggggcggcagcgcgcggcccggctgccggaccgtaccatcccgggcggtggagccgccgcggaggggcgcgcgcgagccgaaggcgcacccgggaggcccaggtagcccgggggccggtgctggggcgccgggcaggcccggctcccgcctcgacccacccggagccagccccctctgcggacacgacatccccatggggacggtggcgcgaaacgccccactctgccgcacccaaactctgcagacccccagcttccc

SEQ ID NO: 19989 - DNA, 2144 bp, Homo sapiens
  misc_feature 1, 2, 3, 2144: n = A,T,C or G
nnnctcacctcacaaaggtagctcctccgccggcagcaactcggcgcccgcggtccatggaccggaacctcgggccgacggacgggaacccgggccgcgatcgccgcctccccgcctcaggctcctcctcctcgctctccgccgcctccgccggactcccgcaggccctgcaccgccgccgccaggctagcggagctgccccgggaagctgggtgacgggttcgcggctgccgccggactgcggcctactccgccgcctctcagtgctattgtccctgggcctggccttgagcgggtccactggggaaggccgtgtgcgccggctccgcggaagatgccggaccaagccctacagcagatgctggacagaagttgctgggtttgttttgctactgatgaagatgatagaacagctgaatgggtgagaccatgcaggtgcagaggatctacaaaatgggttcaccaggcctgtctacaacgctgggtggatgaaaagcaaagaggaaacagtacagccagagtggcatgtcctcagtgcaatgctgaatacctaatagtttttccaaaattgggtccagtggtttacgtcttggatcttgcagatagactgatctcaaaagcctgtccatttgctgcagcaggaataatggtcggctctatctattggacagctgtgacttatggagcagtgacagtgatgcaggttgtaggtcataaagaaggtctggatgttatggagagagctgatcctttattccttttaattggacttcctactattcctgtcatgctgatattaggcaagatgattcgctgggaggactatgtgcttagactgtggcgcaaatactcgaataaactacaaattttaaatagtatatttccagggataggttgtcctgttcctcgaattccagctgaggccaatcctttagcagatcatgtctctgctactcgaatcttgtgtggagcccttgtctttcctactattgctacaatagttggtaaattgatgttcagtagtgttaactctaatttacaaaggacaatcttgggtggaattgcgtttgttgccataaaaggagcatttaaagtttacttcaaacagcagcaatatttacgacaggcacaccgcaaaattctgaattatccagaacaagaagaagcataaaactgacttctggttgttctgcagttctctcatccttatgaatctgttgtgttgttttgattccatcattaatgcacttgtggagacttgtgataagctgctgctcctatattttttaagaaatataataaagcacttagggcaggggaaatcatctcggtaatcatggaacctaaggatgtgatttgttttcattgtttgtatgtactacttttatggcagtcatatgaaccattatcttagcatggtaaacctgggttttgttcatattttctccagacagaaatgcaaagatcaaactgtgcaaatattaaaaaaatgcacatgctgttttattcaaatgcctcttttgtacatgttcatgtttagtgttttctcagaatcagcaactcaaggtactatgaggatttttctcactgacataatttgattacatactaaataagaggatatgttaatatgaggaaatgtaaattaaattagttataaataaataaccaaaaatgtatgtaaacattcaaatgattatctgaacaaatgagattttgtggtgttttctttaacccatgtgatgtcctccaaaatgtgtagggtaaaaattcacagggcttccagatcactttttcaatattaaattttatttacataatgttgacatctcatacttcatgaagtaattttgactcatgcagtcgtgtgtgtgtgtgtgtgtgtgtgtgtgtgtgtgtgtgtgtgttgtatttgtgtgtttcagtgtttcatcaggtccttccatctctgggagttttttcaacccatatttctagaaattacagctgccagtttatagtagtttgagcagaggatgatttgcaaaaataaaaataaagtttctctccaaaaaaatctcgggcctcttttcgggggcgaacagggtttttggcctttctttttccgccccttttttcaggggaatccggcccaggggcatcan

SEQ ID NO: 19990 - DNA, 1079 bp, Homo sapiens
  misc_feature 1, 1079: n = A,T,C or G
nacccacgcgtccggcgtggggatgggtggggtgagggggcgaggccgcagctagggcggcgaaactctcctcccctcggccccaccgcgtgggacggcgtgaacgtggtgtcggagggatgtcagccttctctgaggcggcgctggagaagaagctgtcggagttgagcaactcgcagcagagcgtgcagaccttgtccctgtggctcattcaccaccgtaaacactcgcggcccatcgtcaccgtgtgggagcgggagctgcggaaagagtggaggtgcaacaaatgagaaattccaattggagattttgtcaaacaggaatttactccaaaccaaacaggaagcttacttttctctacctagccaatgatgtcatacagaacagcaagaggaaggggccagagtttacaaaagattttgcaccagttatagtggaggcttttaagcatgtttcaagtgaaactgatgaaagttgtaagaagcaccttggaagagtgttatctattttgggaagaaaggtctgtttatgaacaatgatgtattagaacaacttaaacaagctctgtatggtgataagaagcctaggaagcgaacttatgaacagatacaggtggatgacaagtgaaaactgttcctctctgggatctccaagtgaaccaccacagactctagatctcgttagagcattacaagatctggaaaatgcagcctcaggtgatgcagcagttcatcagaggatagcttctttacctgttgaagtccaagaagtatctctattagataaaataacagataaagaatctggagaaaggctttccaaaatggtagaggatgcgtgtatgttgctggcagattacaatggcagattggcggcagaaatagatgatagaaagcaactcactcgaatgttagcagattttcttcgttgtcaaaaggaagcccttgcagagaaagagcataaattggaaggtgcgtaacctttttcttctttagtgcttatttatttaattctctttttgttaggaatttaaaatattttaatctatgtgcacattcttccatgaggatcctctagan

SEQ ID NO: 19991 - DNA, 870 bp, Homo sapiens
  misc_feature 1, 2, 867, 868, 869, 870: n = A,T,C or G
nncgtccgcccgcttccgactgcagcgaatccaggccggtgccagcagcggcttctttctcaagataattgctatccactgggtttggcttatttgattttgttatttaatgtgtgtgtggtatggaggctggtaccctgttcagtcttagggaaaggagaggaaagaaaatatgccccacccacccctgctcccacacatttgtagataccgtaagtgcttgtgttgatgatagtttcgggggagggtagttgtggcgatgcgagtacaagtgagtagagggtaaaagcagggactcctgatttatatgtccctcctcctggcaatcctctcaccccacctcccctgagaacctcagttcttcctaaattgctaaagctgaggggaaagggatgctttgcggcaaaggcgctgctgcctcaagcttgctttacatgcctctctagttcctctcgcactacagagtggtagcgaacaaaagcgttcgccctagaagcgacctgaatggaaaaatctgcacacgaactaatgggtttgtcacggaaagtagggaaccgggtctgcagcattccctggagacagactttctggttggttttcaagggtccaaggcagccatcagcccggctgtgccctcccaccctgcctcccacccagttgattctctctttgtgtaagtttagcccctctgaggtggtggagtgagagcatcccatcagatatatatacgattcatcagtcggcacttaaaaagatcgataacaggcagtgggaggctgggagatggtaccttcaatgatttactgaaggctttatttttcctttgccttgaagggctaattggttaagcagattcagaattctgannnn

SEQ ID NO: 19992 - DNA, 2859 bp, Homo sapiens
  misc_feature 2800, 2813, 2855, 2856, 2857, 2858, 2859: n = A,T,C or G
gcgtcgacccacggtacactgagcatcctcccgccacacagaaacccgcccagccggggccaccgaccccaccccctgcctggaaacttaaaggaggccggagctgtggggagctcagagctgagatcctacaggagtccagggctggagagaaaacctctgcgaggaaagggaaggagcaagccgtgaatttaagggacgctgtgaagcaatcatggatgcaatgaagagagggctctgctgtgtgctgctgctgtgtggagcagtcttcgtttcgcccagccaggaaatccatgcccgattcagaagaggagccagatcttaccaagtgatctgcagagatgaaaaaacgcagatgatataccagcaacatcagtcatggctgcgccctgtgctcagaagcaaccgggtggaatattgctggtgcaacagtggcagggcacagtgccactcagtgcctgtcaaaagttgcagcgagccaaggtgtttcaacgggggcacctgccagcaggccctgtacttctcagatttcgtgtgccagtgccccgaaggatttgctgggaagtgctgtgaaatagataccagggccacgtgctacgaggaccagggcatcagctacaggggcacgtggagcacagcggagagtggcgccgagtgcaccaactggaacagcagcgcgttggcccagaagccctacagcgggcggaggccagacgccatcaggctgggcctggggaaccacaactactgcagaaacccagatcgagactcaaagccctggtgctacgtctttaaggcggggaagtacagctcagagttctgcagcacccctgcctgctctgagggaaacagtgactgctactttgggaatgggtcagcctaccgtggcacgcacagcctcaccgagtcgggtgcctcctgcctcccgtggaattccatgatcctgataggcaaggtttacacagcacagaaccccagtgcccaggcactgggcctgggcaaacataattactgccggaatcctgatggggatgccaagccctggtgccacgtgctgaagaaccgcaggctgacgtgggagtactgtgatgtgccctcctgctccacctgcggcctgagacagtacagccagcctcagtttcgcatcaaaggagggctcttcgccgacatcgcctcccacccctggcaggctgccatctttgccaagcacaggaggtcgcccggagagcggttcctgtgcgggggcatactcatcagctcctgctggattctctctgccgcccactgcttccaggagaggtttccgccccaccacctgacggtgatcttgggcagaacataccgggtggtccctggcgaggaggagcagaaatttgaagtcgaaaaatacattgtccataaggaattcgatgatgacacttacgacaatgacattgcgctgctgcagctgaaatcggattcgtcccgctgtgcccaggagagcagcgtggtccgcactgtgtgccttcccccggcggacctgcagctgccggactggacggagtgtgagctctccggctacggcaagcatgaggccttgtctcctttctattcggagcggctgaaggaggctcatgtcagactgtacccatccagccgctgcacatcacaacatttacttaacagaacagtcaccgacaacatgctgtgtgctggagacactcggagcggcgggccccaggcaaacttgcacgacgcctgccagggcgattcgggaggccccctggtgtgtctgaacgatggccgcatgactttggtgggcatcatcagctggggcctgggctgtggacagaaggatgtcccgggtgtgtacaccaaggttaccaactacctagactggattcgtgacaacatgcgaccgtgaccaggaacacccgactcctcaaaagcaaatgagatcccgcctcttcttcttcagaagacactgcaaaggcgcagtgcttctctacagacttctccagacccaccacaccgcagaagcgggacgagaccctacaggagagggaagagtgcattttcccagatacttcccattttggaagttttcaggacttggtctgatttcaggatactctgtcagatgggaagacatgaatgcacactagcctctccaggaatgcctcctccctgggcagaaagtggccatgccaccctgttttcagctaaagcccaacctcctgacctgtcaccgtgagcagctttggaaacaggaccacaaaaatgaaagcatgtctcaatagtaaaagataacaagatctttcaggaaagacggattgcattagaaatagacagtatatttatagtcacaagagcccagcagggcctcaaagttggggcaggctggctggcccgtcatgttcctcaaaagcacccttgacgtcaagtctccttcccctttccccactccctggctctcagaaggtattccttttgtgtacagtgtgtaaagtgtaaatcctttttctttataaactttagagtagcatgagagaattgtatcatttgaacaactaggcttcagcatatttatagcaatccatgttagtttttactttctgttgccacaaccctgttttatactgtacttaataaattcagatatatttttcacagtttttccaaaaaaaaaaaaaattaactgggccgcgttttacaacgtcgtgactgggaaaaaccctgcgttacccaacttaatcgccttgcagcacatccccctttcgccaagctgcgtaataccgaaaaggcccgcacgatcgccttnccacagttgccanccttgatggccaatgcaaattgtagccgtttttgtttcgcgnnnnn

SEQ ID NO: 19993 - DNA, 2461 bp, Homo sapiens
  misc_feature 1, 2, 3, 4, 5, 6, 7, 8, 9, 2453, 2454, 2455, 2456, 2457,2458, 2459, 2460, 2461: n = A,T,C or G
nnnnnnnnncaggcggagagccgggccgcgcccttcggtcagcttctctccctttcacccgcgcctcctcgcgagacccggggctgggccgtgcccgtcgccgcgcagcaggaagggagcggctgccacggaaaacgcctggccggacgcttcctttctcctcacgacggcctccacagtccggagcccggcggagcccggacctggcggggagagctgcctccacggccgggcacccagaccccaccgtcgcagtcgccaccacctcagtccatccttggtaccggcaatgggcttcgtatcctccagtgcacttgtaactgacttggacacggaatactaagaactcacttctgtcctcatcccagtcgcgccggcggtgaccatctcggctcttttgggcttaactgccgctcctctggactctgtctgactttgggggcaccatggaccaaagtgggatggagattcctgtgaccctcatcattaaagcaccgaatcagaaatacagtgaccagactattagctgcttcttgaactggaccgtggggaaactaaaaacgcatctatctaacgtttaccctagcaaaccattgacgaaggatcagagattggtgtattcgggcagactgcttcccgatcatctgcagctgaaagacattctcagaaaacaagatgagtatcatatggttcatctagtatgtacttctcggactcctcccagttctccaaaatccagcaccaatagagaaagtcatgaagcattggcatccagcagcaattctagttcagatcattcaggatcaacaactccatcatctggtcaagaaaccttgtctttagctgtgggttcttcctcagaaggattgaggcagcgtacccttccacaagcacaaactgaccaagcacagagtcaccagtttccatatgtaatgcaaggaaatgtagacaaccaatttcctgggcaagctgctccacctggattcccagtgtatcccgcgtttagcccactgcagatgctatggtggcaacagatgtatgctcatcagtattatatgcagtatcaagctgcagtttcagctcaggccacatcaaatgtcaacccaacccagcctactacttcacagcctctaaatttggcacatgttcctggagaagaacccccaccagctccaaacctagtggcccaagaaaatcgacccatgaatgagaatgttcaaatgaatgcacagggaggtccagtactaaatgaagaagacttcaatcgagactggctagactggatgtacacgttctcacgagctgcgattctccttagcattgtatacttctattcttcttttagtcggtttatcatggtaatgggagccatgctactggtttatttacaccaagctggatggtttccttttaggcaagaaggaggtcatcagcaggctcccaacaataatgccgaagttaacaatgatgggcaaaatgcaaacaacttggaacttgaagaaatggagcgtcttatggatgatgggcttgaagatgagagtggagaagatggaggtgaagatgccagtgcaattcaaaggcctggattaatggcttcagcttggtctttcatcaccaccttctttacttcactaataccagaggggcctccccaggttgccaattgacctgaaaaactgtgccagctacaaggagggtctgacttcaggaaagtggtttaaataacagtgcaatttcaaaaaaatttataactttcttttgatcatcatgtacagaggtgttttttttctttaggcttctcatgcatatgaatattttaagcacgaatggactactaaatatctgagttttttttttttttttttaaagatcctaacagaacatagcgtaacaatattggtcttccaggtgttactcatttcaattatgtgtagtataccaggacagacctattttcatgtcttatttctttaaagagctgcttcattggccgggcgccatggctcacgtctgtaatcccagcactttgggaggccgaggcgggtgggttacttgaggtcaggagttcgagaccagcctggcaaacatggcgaaaccccatcttaactaaaaatacaaaaaaattagccgggtgtggtgtcacgcgcctgtaatcccagctacttggggggctcaggcaggagaattgcctgaacccaggaggcggaggttgcagtgagctgagattgggccactgcactccaccctgggcgacagagtgagactcggtctcagaaaaaaaaaaaaaagagctgcttcacatataaatgtctatagctagtagcctggccctttaatgtttaatttgaatagatatatctgttttccgtgaattatcttgaaagttttaaacaaaatgacctcatagtttttaaataaaaatattatttacctaaaatgtgctagtagcatcnnnnnnnnn

SEQ ID NO: 19994 - DNA, 1509 bp, Homo sapiens
  misc_feature 1508, 1509: n = A,T,C or G
atagggagtcgacccacgcgtccgaaagcacttgaaaggaaacaagactccctttcacacatggattattataagtttcaatcctggtatctgtgcttgatttttatcagttttgtgtagatttttatgtttcatattttaaatttaaatcccacattgtaaagtatgtacaatttgtcctgaagctttgtgtttggctgcacctgcataagctgctacaaatagaataaagaatttcatagcctgtatctatcatttagatgcatggaaaaaaatgggctttgcacacaatgggtttggagctgactgggaacaatggaaaaaattacattagctgtggttgtaaagtttttttgtttttgttttgttttttttttctttttctgttttctttttttaccatcttgtgaaaggtttctgaaactcgataataaaaagcggttggtgtaaattattcttttgtgtcacatttttagaaggaaaaacataaaagaatgtatccttagtactggttcttaaacagcccataaaaacccattggcctgaagcttatatctcaggcctatgcccatcttatagtcttggaagacaaaaggctggtagagacagtcttcagtggcttcagtgatgctctgtagaggccagggtgtcttgagtgctgtaactcccaagcactgggctagcctgacttctgtatctccctaccaccacccccttaaaaaaataaggtaacagcaaatctatagtaaaaccatgtctgcatagaacgtgttcaaatcctctgttttcattaaatgtaaaagatgctgtctccattaagttgaatatttggaattggagaagccattgattattattttgagtttctgtaatgttttatagaaaagtaagatgcttattcagaatttaagaatgaaggcaactgaaatatgcattgttgtagttatttatatttcaaactaaaaataagcaaaaaaaaaaggctggtttgagaaaaatcaggtaaaattgatgaaacggatgttgtgtttctctttccatcatctggtttttaccatttcactcagtaggtatttttagaacacacttatttgaggaaagagacatcagatgcacaattttacatttataaaggaacaaatggggaaaactgaaaactaaaaattttaaatgtattaaatgccatccctgagcctaaatctagtatttgtagtttatttctaggtctgctagaacctgaaaacctgaatgaaaaaaggtgtgctgacactaatcaagtcctgtgaggtttaaattattgacctatccactctacctccattgtacaaaaaatattttacaacaagcctgggtaagattcaacagcatagtagttttgtatccaaggttacttccccacaaccactttaaacataagaaatgtggtggcaatataaagtttgtagcctttccaataaaggtttataaaacagttaaaaaaaaaaaaaaaaaactcgagggggggcccnn

SEQ ID NO: 19995 - DNA, 3393 bp, Homo sapiens
cgacccacgcgtccggcgcgggcgagcggttgtgcttgtgcttgtggcgcgtggtgcgggtttcggcggcggctgaggaagaagcgcgggcggcgccttcgggaggcgagcaggcagcagttggccgtgccgtagcagcgtcccgcgcgcggcgggcagcggcccaggaggcgcgtggcggcgctcggcctcgcggcggcggcggcggcagcggcccagcagttggcggcgagcgcgtctgcgcctgcgcggcgggccccgcgcccctcctccccccctgggcgcccccggcggcgtgtgaatggcggcctccgcggcggcagcctcggcagcagcggcctcggccgcctctggcagcccgggcccgggcgagggctccgctggcggcgaaaagcgctccaccgccccttcggccgcagcctcggcctctgcctcagccgcggcgtcgtcgcccgcggggggcggcgccgaggcgctggagctgctggagcactgcggcgtgtgcagagagcgcctgcgacccgagagggagccccgcctgctgccctgtttgcactcggcctgtagtgcctgcttagggcccgcggcccccgccgccgccaacagctcgggggacggcggggcggcgggcgacggcaccgtggtggactgtcccgtgtgcaagcaacagtgcttctccaaagacatcgtggagaattatttcatgcgtgatagtggcagcaaggctgccaccgacgcccaggatgcgaaccagtgctgcactagctgtgaggataatgccccagccaccagctactgtgtggagtgctcggagcctctgtgtgagacctgtgtagaggcgcaccagcgggtgaagtacaccaaggaccatactgtgcgctctactgggccagccaagtctcgggatggtgaacgtactgtctattgcaacgtacacaagcatgaaccccttgtgctgttttgtgagagctgtgatactctcacctgccgagactgccagctcaatgcccacaaggaccaccagtaccagttcttagaggatgcagtgaggaaccagcgcaagctcctggcctcactggtgaagcgccttggggacaaacatgcaacattgcagaagagcaccaaggaggttcgcagctcaatccgccaggtgtctgacgtacagaagcgtgtgcaagtggatgtcaagatggccatcctgcagatcatgaaggagctgaataagcggggccgtgtgctggtcaatgatgcccagaaggtgactgaggggcagcaggagcgcctggagcggcagcactggaccatgaccaagatccagaagcaccaggagcacattctgcgctttgcctcttgggctctggagagtgacaacaacacagcccttttgctttctaagaagttgatctacttccagctgcaccgggccctcaagatgattgtggatcccgtggagccacatggcgagatgaagtttcagtgggacctcaatgcctggaccaagagtgccgaggcctttggcaagattgtggcagagcgtcctggcactaactcaacaggccctgcacccatggcccctccaagagccccagggcccctgagcaagcagggctctggcagcagccagcccatggaggtgcaggaaggctatggctttgggtcaggagatgatccctactcaagtgcagagccccatgtgtcaggtgtgaaacggtcccgctcaggtgagggcgaggtgagcggccttatgcgcaaggtgccacgagtgagccttgaacgcctggacctggacctcacagctgacagccagccacccgtcttcaaggtcttcccaggcagtaccactgaggactacaaccttattgttattgaacgtggcgctgccgctgcagctaccggccagccagggactgcgcctgcaggaacccctggtgccccacccctggctggcatggccattgtcaaggaggaggagacggaggctgccattggagcccctcctactgccactgagggccctgagaccaaacctgtgcttatggctcttgcggagggtcctggtgctgagggtccccgcctggcctcacctagtggcagccccagctcagggctggaggtggtggctcctgagggtacctcagccccaggtggtggcccgggaaccctggatgacagtgccaccatttgccgtgtctgccagaagccaggcgatctggttatgtgcaaccagtgtgagttttgtttccacctggactgctcactctgccggccctgcaggatgtaccaggggaggagtggagctgctcactctgccatgtgctccctgacctgaaggaggaggatggcagcctcagcctggatggtgcagacagcactggcgtggtggccaagctctcaccagccaaccagcggaaatgtgagcgtgtactgctggccctattctgtcacgaaccctgccgccccctgcatcagctggctaccgactccaccttctccctggaccagcccggtggcaccctggatctgaccctgatccgtgcccgcctccaggagaagttgtcacctccctacagctccccacaggagtttgcccaggatgtgggccgcatgttcaagcaattcaacaagttaactgaggacaaggcagacgtgcagtccatcatcggcctgcagcgcttcttcgagacgcgcatgaacgaggccttcggtgacaccaagttctctgctgtgctggtggagcccccgccgatgagcctgcctggtgctggcctgagttcccaggagctgtctggtggccctggtgatggcccctgaggctggagcccccatggccagcccagcctggctctgttctctgtcctgtcaccccatccccactcccctggtggcctgactcccactccctggtggccccatcccccagttcctcacgatatggtttttacttctgtggatttaataaaaaccatatcgtgaggaactggaggatggcagcctcagcctggatggtgcagacagcactggcgtggtggccaagctctcacctccctacagctccccacaggagtttgcccaggatgtgggccgcatgttcaagcaattcaacaagttaactgaggacaaggcagacgtgcagtccatcatcggcctgcagcgcttcttcgagacgcgcatgaacgaggccttcggtgacaccaagttctctgctgtgctggtggagcccccgccgatgagcctgcctggtgctggcctgagttcccaggagctgtctggtggccctggtgatggcccctgaggctggagcccccatggccagcccagcctggctctgttctctgtcctgtcaccccatccccactcccctggtggcctgactcccactccctggtggcccca

SEQ ID NO: 19996 - DNA, 911 bp, Homo sapiens
  misc_feature 905, 906, 907, 908, 909, 910, 911: n = A,T,C or G
gaggcgtccggccgggagccgccggccgccggtgtccggaccgctcgcccccgtttggacccgacttcggttcttctggggtgttgatgctcctaaagcccgagagcacgtgtccagaccctagcctgtacgacgctgactctgcccggtcccagaaccaaagccatgccggggtgtggcctctgaccccacgcggaggggacctcgccttgcgggaccccacctggaacccgacctcccagcctcgcagccggcctgagccgccatgcgcgggaagttgctgccgctggccggcctctacctggtgcagggcctgccctacgggctccagtccggcctcctgccagtgctgctgcgtgccggcggcctctcgctgacgcgcgtggggctggccaaggttctgtacgctccgtggctgctcaagctggcttgggccccgctggtggacgcgcagggctcggcgagggcctgggtgacgcgcagcacggcgggcctgggcctggtgtgtgggctgcttgccgggctgccccctcctggagctggccaggccgggctgcccgccgctgtggcggggttgctgctgttgttgaacctgggtgccgccatgcaggatgtggccctggacgcgctggctgtgcagctgctggagccggccgaactggggccgggcaataccgtgcaggtggtcgcgtacaagctgggggccgcgctagctgggggcgcgctgctggcgctgtgccaccttctcgtggcgaatcttctgtctggtgcactatggtggcgggctggctggtgacagcctggggtcccagagcccttcgagggtccccccggccttgggactgtaccggcgggcggtgcggggtgtggcccaacatggggcgcgtctcttcgggcaggtgcannnnnnn

SEQ ID NO: 19997 - DNA, 2335 bp, Homo sapiens
  misc_feature 2334, 2335: n = A,T,C or G
cgcgtccgccgcaggaaaaatctgtaatggggggcgggcccggagggctgtcggtgggcccgtctgcgtacgacggcccgtcccctgcgcacggacgcctggaagaagggggtggggccacgtttgcgtccgcgccatcaggcccgagatagcggcgaggtccgctttcagtgtatggttttccctgccaaacggttctgcttggtgccatccatggagggcgtgcgctgggccttttcctgcggcacttggctgccgagccgagccgaatggctgctggcagtgcgatcgattcagcccgaggagaaggagcgcattggccagttcgtctttgcccgggacgctaaggcagccatggctggtcgtctgatgataaggaaattagttgcagagaaattgaatatcccttggaatcatattcgtttgcaaagaactgcaaaaggaaaaccagttcttgcaaaggactcatcgaatccttacccgaatttcaactttaacatctctcatcaaggagactatgcagtgcttgctgctgaacctgagctgcaagttggaattgatataatgaagactagttttccaggtcgtggttcaattccagaattctttcatattatgaaaagaaagtttaccaacaaagaatgggaaacaatcagaagctttaaggatgagtggactcagctggatatgttttataggaattgggcacttaaggaaagcttcataaaagccattggtgttggactaggatttgaattgcagcggcttgaatttgatctatctccattaaacttggatataggccaagtttataaagaaacacgtttattcctggatggagaggaagaaaaagaatgggcatttgaggaaagcaaaatagatgagcaccattttgttgcagttgctcttaggaaacccgatggatctagacatcaggatgttccatctcaggatgattccaaaccaacccagaggcaatttactattctcaactttaatgatttaatgtcatctgccgttcccatgacacctgaagatccttcattttgggactgtttttgcttcacagaagaaattccaatacgaaatggtacaaagtcatgatgattccctgagtaacaaagggaaatgaaaactgtttgtgatcttccgtattcactgaaaaataaatgcttgtttagtatcaaattttatttcacgaaagtttttttaaagaacagaaacttttccaattaaaaaaaaaaagcagacttctggttcaagatagctcactggaatacatgtttacctctttctttcctaaattgcattgaattgataggaaggatggcggaatcttaaagtgatacatgctaactgtagaaaaaaatagaaaatgcacataagcaaaaggaaacatttaaatgctatctttcaaagataactactcttaaaaccttgagtatcttttcagacctttttcttggcaaatgaatccatattgacatatttgatttttttaaaaacatggaaacgtactgttttgtaaattctttttaactgcacatctactgttcataaatatacctctgtaacataactttttgtggttctaatgtactctgttgtatagctaatacaagttaggatgcttttggccagaggtaacagtgtccaaatataattggcctaagtaacctaggaaattgtttgacataacacagggttcaggggtgtcattaaagacacactttttttgccttgacctcagttggtttgttttgccttaggctattccacctctcgatcacaagagctgctgctataacttccagttttacatctttgtaaaattgtatctcaaaggcagaaaaggccatttcgtctctcatttgttttatccatgaggaagatttttaacaaaagcctccagaagatttcccctcagtttccattgacttagatcaggttacagagaaaggcaatgtctgacatttttggtctctgttagaagtagactctgttgaaaagaaagaagctaagctaggtgtgaagaatggaattggaagcccactgccttcccataagaaaggtttaccataatttactcactttttctgtgttagacattttgattatctgcagtttattactacaagcagtggcagagtgaatgtcctgtacctttgagtaaatggtaatatgtctgagaagtttaaaagggacgatgggtgacggtcaaaggggtattataaataaccttatatatatgttttgtgtgccggcgaaacctggaagaggatttggaaatggggataagggtgtaagtttttcaaaaagggaaatgtggcaaann

SEQ ID NO: 19998 - DNA, 6607 bp, Homo sapiens
  misc_feature 1, 2: n = A,T,C or G
nnggtttatcaacttgacgagaatcatttcaaaattttaggaaaaaaatttatgtctcagtaaaactttgtttagaattaggtttttcagtagcaaggataaggtgaagggattaaaaatgtacgtaaaattagtagtcaatgaattctggaatgcagtctgtataatcctattcagagattatgctatttactgaatatagctttggttgtgtttaaatctgcactagtattaggtgctccttaaaagttgaaaatatatagccaataaggtataaagaagaattgacagataaatctaaacagtttctttgtatagtactaacttctgaaatgttcagtggtggcatttgataaagtaagttgtaatatgatcacattgaggaatgttatataattattaaactcaatttttataaaaggcatcattttataaaagtatcataagaaagtgccaatgtttcaatgaataaattgaggcaacatgataccaacttagtgaaaaatatacaagaccagaaggaagtaacctaaaatattactagtgattgcctctgggtaataggatatgggctttttgtctttctatatttttcattttcccactgccgtgttcctggtacctcagtgaaatgaagtgctcagttcttttaacagttgtcagtttttaaaacaaatatagtcttctggaaatgttttaggtagcattttcaattttatgtttttaagccatctcttgaatttgaataaattatttgaactgcataaatatttgcaatccattgagaacaccaaaacaaaaagtaaaaagcagaaacctaaatttttctaaattttttttaatatctagaagttgtatctcaaagtttttgtaattttcttcattgtcagattttattttttactgtcaaatatccaatgacagaggccacctcttttaaaatagaaactttaaatggaaatatacattatactaagtcttatattttatagccttgaaagtttctattcatgtaattaagctttttctgatttttagaggaacagaaagaaagtgaaaagatgaaaagtgaggagcagcctatggatttagaaaaccgttctacagccaatgttctagaagagactactgtgaaaaaagaaaaagaagatgaaaaggaacttgtgaaactgccagtcatagtgaagctagaaaaacctttgccagaaaatgaagaaaaaaagattatcaaagaagaaagtgattccttcaaggaaaatgtcaaacccattaaagttgaggtgaaggaatgtagagcagatcctaaagataccaaaagtagcatggagaagccagtggcacaggagcctgaaaggatcgaatttggtggcaatattaaatcttctcacgaaattactgagaaatctactgaagaaactgagaaacttaaaaatgaccagcaggccaagataccactaaaaaaacgagaaattaaactgagtgatgattttgacagtccagtcaagggacctttgtgtaaatcagttactccaacaaaagagtttttgaaagatgaaataaaacaagaggaagagacttgtaaaaggatctctacaatcactgctttgggtcatgaagggaaacagctggtaaatggagaagttagtgatgaaagggtagctccaaattttaagacagaaccaatagagacaaagttttatgagacaaaggaagagagctatagcccctctaaggacagaaatatcatcacggagggaaatggaacagagtccttaaattctgtcataacaagtatgaaaacaggtgagcttgagaaagaaacagcccctttgaggaaagatgcagatagttcaatatcagtcttagagatccatagtcaaaaagcacaaatagaggaacccgatcctccagaaatggaaacttctcttgattcttctgagatggcaaaagatctctcttcaaaaactgctttatcttccaccgagtcgtgtaccatgaaaggtgaagagaagtctcccaaaactaagaaggataagcgcccaccaatcctagaatgtcttgaaaagttagagaagtccaaaaagacttttcttgataaggacgcacaaagattgagtccaataccagaagaagttccaaagagtactctagagtcagaaaagcctggctctcctgaggcagctgaaacttctccaccatctaatatcattgaccactgtgagaaactagcctcagaaaaagaagtggtagaatgccagagtacaagtactgttggtggccagtctgtgaaaaaagtagacctagaaaccctaaaagaggattctgagttcacaaaggtagaaatggataatctggacaatgcccagacctctggcatagaggagccttctgagacaaagggttctatgcaaaaaagcaaattcaaatataagttggttcctgaagaagaaaccactgcctcagaaaatacagagataacctctgaaaggcagaaagagggcatcaaattaacaatcaggatatcaagtcggaaaaagaagcccgattctccccccaaagttctagaaccagaaaacaagcaagagaagacagaaaaggaagaggagaaaacaaatgtgggtcgtactttaagaagatctccaagaatatctagacccactgcaaaagtggctgagatcagagatcagaaagctgataaaaaaagaggggaaggagaagatgaggtggaagaagagtcaacagctttgcaaaaaactgacaaaaaggaaattttgaaaaaatcagagaaagatacaaattctaaagtaaaaaacccaaaggcaaagttcgatggactggttctcggacacgtggcagatggaaatattccagcaatgatgaaagtgaagggtctggcagtgaaaaatcatctgcagcttcagaagaggaggaagaaaaggaaagtgaagaagccatcctagcagatgatgatgaaccatgcaaaaaatgtggccttccaaaccatcctgagctaattcttctgtgtgactcttgcgatagtggataccatactgcctgccttcgccctcctctgatgatcatcccagatggagaatggttctgcccaccttgccaacataaactgctctgtgaaaaattagaggaacagttgcaggatttggatgttgccttaaagaagaaagagcgtgccgaacgaagaaaagaacgcttggtgtatgttggtatcagtattgaaaacatcattcctccacaagagccagacttttctgaagatcaagaagaaaagaaaaaagattcaaaaaaatccaaagcaaacttgcttgaaaggaggtcaacaagaacaaggaaatgtataagctacagatttgatgagtttgatgaagcaattgatgaagctattgaagatgacatcaaagaagccgatggaggaggagttggccgaggaaaagatatctccaccatcacaggtcatcgtgggaaagacatctctactattttggatgaagaaagaaaagaaaataaacgaccccagagggcagctgctgctcgaaggaagaaacgccggcgattaaatgatctggacagtgatagcaacctggatgaagaagagagcgaggatgaattcaagatcagtgatggatctcaagatgagtttgttgtgtctgatgaaaacccagatgaaagtgaagaagatccgccatctaatgatgacagtgacactgacttttgtagccgtagactgaggcgacacccctctcggccaatgaggcagagcaggcgtttgcgaagaaagaccccaaagaaaaaatattccgatgatgatgaagaggaggaatctgaggagaatagtagagactctgaaagtgacttcagtgatgattttagtgatgattttgtagaaactcggcgaaggcggtcaaggagaaatcagaaaagacaaattaactacaaagaagactcagaaagtgacggttcccagaagagtttgcgacgtggtaaagaaataaggcgagtacacaagcgaagactttccagctcagagagtgaagagagctatttgtccaagaactctgaagatgatgagctagctaaagaatcaaagcggtcagttcgaaagcggggccgaagcacagacgagtattcagaagcagatgaggaggaggaggaagaggaaggcaaaccatcccgcaaacggctacaccggattgagacggatgaggaggagagttgtgacaatgctcatggagatgcaaatcagcctgcccgtgacagccagcctagggtcctgccctcagaacaagagagcaccaagaagccctaccggatagaaagtgatgaggaagaggactttgaaaatgtaggcaaagtggggagcccattggactatagcttagtggacttaccttcaaccaatggacagagccctggcaaagccattgagaacttgattggcaagcctactgagaagtctcagacccccaaggacaacagcacagccagtgcaagcctagcctccaatgggacaagtggtgggcaggaggcaggagcaccagaagaggaggaagatgagcttttgagagtgactgaccttgttgattatgtctgtaacagtgaacagttataagactttttttccatttttgtgctaatttattccacggtagctctcacaccagcgggccagttattaaaagctgtttaatttttcctagaaaactccactacagaatgacttttagaagaaaaatttcaacaaatcctgaagtctttctgtgaagtgaccagttctgaactttgaagataaataattgctgtaaattccttttgattttctttttccaggttcatggtccttggtaatttcattcatggaaaaaaatcttattataataacaacaaagatttgtatatttttgactttatatttcctgagctctcctgactttgtgaaaaagggtggatgaaaatgcattccgaatctgtgagggcccaaaacagaatttaggggtgggtgaaagcacttgtgctttagctttttcatattaaatatatattatatttaaacattcatggcatagatgatgatttacagacaatttaaaagttcaagtctgtactgttacagtttgagaattgtagataacatcatacataagtcatttagtaacagcctttgtgaaatgaacttgtttactattggagataaccacacttaataaagaagagacagtgaaagtaccatcataattaacctaaatttttgttatagcagagtttcttgtttaaaaaaaaataaaatcatctgaaaagcatttgtacagtaaaatgtataatgaagctttgccaaccagactgtgctagcaacaaatttttttaaataagctttatgcagtggtaataaggtggcctcaaatatattgtgtctgatggagagttattagtgaaatgaatgtggtctttcttaaggcctgggtggactgtaaactttgccaatagtataactcttgtcttctggccacttgatgtttaaatatctgaaatatcattttgaaaaaaatacatctatatataacatacatgaagagatgctaagctgacagtgatattttagcacatttgaagactgggaagagattttcaggtgaattttaactggtctattcttgcccttagtatctacttcaaattgaagtctacaaacaaagcagttccttgggaggtttttagttgagtttagcgtgtgtgtgttgtggggtgtgtgccgtgtgcgtgtgtgtgtgtgttgggaattcctatctgcctggatatattagcaaagttgaatgttttggccttggccataactttctttaaatccttattgtctaccccacatgagttgtggaaccggcgaaaaagggggcccttacactcaccttcccaaacatctcaacactttaaagaaaagccctttgtttcaagaaaaaagggtttgtaactaactaaatacctaacatgtaattgacactaaaatatgaactttgtcttatttagtttctgttatagctgtaaaatttcaggcagagccataacattgtacagagtgtagcacttgtgattaaacctagcctgttaaatcctgaaaccttcaaccattacttctgtgaatactttagccctgggatttgggtttttctgttccggtgttgtgtctgttgccggcaatggacacaccatatctgctgctggcccaaggaacgtcattaatttttctttccaaattaagtattatgtgctagtcagtgtatagtaaagcacttctcttttttattactaaaaagctggcattagatttgcattataaatacctctctaggaactttatactccttttccttcttcaacaggtattgcccttaaatcttatcttttggccttgaaagtttatagctattgtttttcagttgttcgttgttttgttttgtttcactttagttctgtagtacctgcccattaatatttttgctttgattctagcaatgtgtatgtatctgtataaaaaataaaataatgaaagcaacctaaaaataggatgcaccaatagcaaaaaaaaaaaaaaaaaaaagtg

SEQ ID NO: 19999 - DNA, 1746 bp, Homo sapiens
  misc_feature 1, 2, 3, 4, 5, 1745, 1746: n = A,T,C or G
nnnnnctgtgtcccatttggttgtccccgcccccagagcgttccgattttgagccctctgaaaaagtcagtgcgatgtccaggagtagacccacacagacttttgggacatacctgaaaaaggtcattcatattagtttggctagctgggttaatttcttccaaaaattccaagacataaaatgtgtatctatccataagatggactccaattgcaggatcaggttgatgcgagagtgaatcttctcccacttgactactagctagagccattatgttaggagaataaaatcgttcatacatggatgctccttggcaagtatcaataataaacagtagctcattgtagcgtcttttctgccacatttgttcaaaagcatccgcgagttctatgttggtaatttcttcagaatcttgaaattttaagaaaccatttccaccatgccctgtcatataaattagaatattgcttctgtcatcagaaagaagacgttttgaccgaggagtactaggtgggatcctcccagttaatacccgtaaaaaattctccacagttacctcataacttctataatccacttccacatcatctccatacacatttagttccatattcttgtgactaaacactgtagctggtttgggatttctaggattacaggccatatcatctgcaagcattaggacaatgtgactgtcaggaatacctagcctcttgacacttctataaacagaaagggtatttgcaacatgtcgataattaaaccagaatcgggatgtacacaccagaacagcccagttgtttgtatggccacttctaaagaattgttctgcttgatcctcgatatgactagcggccacgctgccgaaggacaagagcaacacagttgccaagacagtcgcagcccggctgaggctgtcggtgacggccatgtttaccggcttcagacttcccgtagtgtgcatttaagaagcatcctctgccaagaccaaaaggaaagaagaaaaagggccaaaagccaaaatgaaactgatggtacttgttttcaccattgggctaactttgctgctaggagttcaagccatgcctgcaaatcgcctctcttgctacagaaagatactaaaagatcacaactgtcacaaccttccggaaggagtagctgacctgacacagattgatgtcaatgtccaggatcatttctgggatgggaagggatgtgagatgatctgttactgcaacttcagcgaattgctctgctgcccaaaagacgttttctttggaccaaagatctctttcgtgattccttgcaacaatcaatgagaatcttcatgtattctggagaacaccattcctgatttcccacaaactgcactacatcagtataactgcatttctagtttctatatagtgcaatagagcatagattctataaattcttacttgtctaagacaagtaaatctgtgttaaacaagtagtaataaaagttaattcaatctaaaaaaaaaaattcactggccgtcgttttacaacgtcgtgactgggaaaaccctggcgttacccaacttaatcgccttgcagcacaatccccttccgccagctggcgtaaatagcgaagaggcccgcaccgatcgcccttcccacagttgctgcagccttgatggcgaatgggcaaatgtaagcgttaaatatttgtttcgcgttaaatttttgtaaatcagctcattttttaacaataggccgttcnn

SEQ ID NO: 20000 - DNA, 1015 bp, Homo sapiens
  misc_feature 1013, 1014, 1015: n = A,T,C or G
tagggagtcgacccacgcgtccgcgccgctcgggtcacccggcgtccgggactgggaagatggacgcagctactctgacctacgacactctccggtttgctgagtttgaagattttcctgagacctcagagcccgtttggatactgggtagaaaatacagcattttcacagaaaaggacgagatcttgtctgatgtggcatctagactttggtttacatacaggaaaaactttccagccattggggggacaggccccacctcggacacaggctggggctgcatgctgcggtgtggacagatgatctttgcccaagccctggtgtgccggcacctaggccgagattggaggtggacacaaaggaagaggcagccagacagctacttcagcgtcctcaacgcattcatcgacaggaaggacagttactactccattcaccagatagcgcaaatgggagttggcgaaggcaagtccataggccagtggtacgggcccaacactgtcgcccaggtcctgaagaagcttgctgtcttcgatacgtggagctccttggcggtccacattgcaatggacaacactgttgtgatggaggaaatcagaaggttgtgcaggaccagcgttccctgtgcaggcgccactgcgtttcctgcagattccgaccggcactgcaacggattccctgccggagctgaggtcaccaacaggccgtcgcatggagacccctggtacttctcatacccctgcgcctggggctcacggacattcgcgaaggcctacgtggagacctgaggactggcttaagatgccagacagggcgtaatagagggaaaacccaagggccatactcacgggacaggggagagccatcaggcccaacaggaacgggaccaatggggaaacgagaaactaggcgaacccgcgcgaacagatacccacaggggtgaaaagaacgggacaaacacgggagaaaggagcatacgcaaagaagaagaaaaagggggcggcaagcggccnnn

SEQ ID NO: 20001 - DNA, 3635 bp, Homo sapiens
  misc_feature 1, 2, 3, 4, 5, 6, 7, 8, 50, 3614, 3615, 3616, 3617, 3618,3619, 3620, 3621, 3622, 3623, 3624, 3625, 3626, 3627, 3628,3629, 3630, 3631, 3632, 3633, 3634, 3635: n = A,T,C or G
nnnnnnnnaaacttgggtccaagggttgggtaagccgcccgcgaacaccntttaacgtgaaccgcggaacagctttaaaggacccccgcatccagtgcgcctgcgctggagctcccggaagttgccggacccggaacgcaggcggagcgcaagtctgtcagccagtcagtccgccagtccgccagcccagtacctctctctcctcggccctcgtaagctgtccgcggtctgtttggcccgaacggcggcggaggcgctgatcatggcgacattcatctcggtgcagctgaaaaagacctcagaggtggacctggccaagccgctggtgaagttcatccagcagacttacccaagcggcggggaagagcaggcccagtactgccgcgcggcggaggagctcagcaagctgcgccgcgccgcagtcggtcgtccgctggacaagcacgagggcgcgctcgagacgctcctgagatattatgatcagatttgttctattgaacccaaattcccattttctgaaaatcagatctgcttgacatttacctggaaggatgctttcgataaaggttcactttttggaggctctgtaaaactggctcttgcaagcttaggatatgaaaagagctgtgtgttgttcaattgtgcagccttagctagccaaattgcagcagaacagaacctggataatgatgaaggattgaaaatcgctgctaaacattaccagtttgctagtggtgcctttttacatattaaagagacggttttatctgccttaagtcgagagccgaccgtggacatatctccagatactgttgggaccctcagtcttattatgctggcacaggctcaagaagtattttttttaaaagccacaagagataaaatgaaagatgccatcatagctaaattggctaatcaggctgcagattattttggtgatgctttcaaacagtgtcaatacaaagatactctccccaaggaggtgttccctgtcttggctgcaaagcactgtatcatgcaggccaatgctgagtaccatcagtctatcctggcaaaacagcagaagaaatttggagaagaaattgcaaggttacagcatgcagcagaactgattaaaacagtggcatctcgctatgatgaatatgttaatgtgaaggatttttctgacaaaatcaatcgtgcccttgctgcagcaaagaaggataatgacttcatttatcatgatcgagttccagaccttaaagatctagatcctattggcaaagccacacttgtgaaatctaccccggtcaatgtacccatcagtcagaaatttactgatctgtttgagaagatggttcccgtgtcagtacagcagtctttggctgcctataatcagaggaaagccgatttggttaacagatcaattgctcagatgagagaagccaccactttggcaaatggggtgctagcttcccttaatcttccagcagcaattgaagatgtgtctggagacactgtacctcagtctatattgactaaatccagatctgtgattgaacagggaggcatccagactgttgatcagttgattaaagaactgcctgaattactgcaacgaaatagagaaatcctagatgagtcattaaggttgttggatgaagaagaagcaaccgataatgatttaagagcaaaatttaaggaacgttggcaaaggacaccatccaatgaactgtataagcctttaagagcagagggaaccaacttcagaacagttttagataaagctgtgcaggcagatggacaagtgaaagaatgttaccagtctcatcgtgacaccatcgtgcttttgtgtaagccagagcctgagctgaatgctgccatcccttctgctaatccagcaaagaccatgcagggcagtgaggttgtaaatgtcttaaaatccttattgtcaaatcttgatgaagtaaagaaggaaagagagggtctggagaatgacttgaaatctgtgaattttgacatgacaagcaagtttttgacagccctggctcaagatggtgtgataaatgaagaagctctttctgttactgaactagatcgagtctatggaggtcttacaactaaagtccaagaatctctaaagaaacaggagggacttcttaaaaatattcaggtctcacatcaggaattttcaaaaatgaaacaatctaataatgaagctaacttaagagaagaagttttgaagaatttagctactgcatatgacaactttgttgaacttgtagctaatttgaaggaaggcacaaagttttacaatgagttgactgaaatcctggtcaggttccagaacaaatgcagtgatatagtttttgcacggaagacagaaagagatgaactcttaaaggacttgcaacaaagcattgccagagaacctagtgctccttcaattcctacacctgcgtatcagtcctcaccagcaggaggacatgcaccaactcctccaactccagcgccaagaaccatgccgcctactaagccccagcccccagccaggcctccaccacctgtgcttccagcaaatcgagctccttctgctactgctccatctccagtgggggctgggactgctgcgccagctccatcacaaacgcctggctcagctcctcctccacaggcgcagggaccaccctatcccacctatccaggatatcctgggtattgccaaatgcccatgcccatgggctataatccttatgcgtatggccagtataatatgccatatccaccagtgtatcaccagagtcctggacaggctccatacccgggaccccagcagccttcataccccttccctcagcccccacagcagtcttactatccacagcagtaatatgtctgctcagcagctcagctgattcagatcagagggaaagaaataccaaccctgcaataagtgtactaaactctacgctctggttaatgtaatgtactctcctggactgaatgcagtgtataatttctgtctacagctagaagctgtgccccagttccacatttgattacacatgtgagatttgctgctgttgcagtataaacactaggtataataggatttgaaattgcattacagttcataaaaattgaaaatgagaaattaaacctgcaagtgaaacatttgaaacgattatactttctacataagacatggttgggacatcagatacttacaaagatggtttaagtatggatactagagaaaattaagttttctttctctttggtttattgatttggtttaatttccattatgctattttgcataatcaaggcactgtaaatcttataattttaaaataaattacttaagaacagttagcattgttatgttttgttattgattctcattactgtctaattttttttctggtattagtctcattttgtatgtatataagttaaacagatactgtttttaagtgcatgaatagtacaagttattatcaaggatgttttacagggaaatcaaaagaatattatcatactttatctttcgtatgctgattagtaaacgatttttgacatttattttagaaagtcctataatgtggaagaaacaaacagttgctaccaaagannnnnnnnnnnnnnnnnnnnnn

SEQ ID NO: 20002 - DNA, 2494 bp, Homo sapiens
  misc_feature 1, 2, 2403, 2404, 2405, 2406, 2407, 2408, 2409, 2410, 2411,2412, 2413, 2414, 2415, 2416, 2417, 2418, 2419, 2420, 2421,2422, 2423, 2424, 2425, 2426, 2427, 2428, 2429, 2430, 2431,2465, 2466, 2467, 2468, 2469, 2470, 2471, 2472, 2473: n = A,T,C or G
  misc_feature 2474, 2475, 2476, 2477, 2478, 2479, 2480, 2481, 2482, 2483,2484, 2485, 2486, 2487, 2488, 2489, 2490, 2491, 2492, 2493,2494: n = A,T,C or G
nngagtcgacccacgcgtccgggccagccggctcgcccgggggccatggcagcagcggctactgcagccgagggggtccccagtcgggggcctcccggggaagtcattcatctgaatgtgggaggcaagagattcagtacctctcgccagactctcacctggatcccagactccttcttctccagtcttctgagcggacgcatctcgacgctgaaagatgagaccggagcaatcttcatcgacagggaccctacagtcttcgcccccatcctcaacttcctgcgcaccaaagagttggatcccaggggtgtccacggttccagcctcctccatgaagcccagttctatgggctcactcctctggttcgtcgcctgcagcttcgagaggagttggatcgatcttcttgtggaaacgtcctcttcaatggttacctgccgccaccagtgttcccagtgaagcggcggaaccggcacagcctagtggggcctcagcagctaggaggacggccagcccctgtccgacggagcaacacgatgccccccaaccttggcaatgcagggctgctgggccgaatgctggatgagaaaacccctccctcaccctcaggacaacctgaggagccggggatggtgcgcctggtgtgtggacaccataattggatcgctgtggcctatacccagtttctagtctgctacaggttgaaggaagcctctggctggcagctggtgttttccagcccccgcctggactggcccatcgaacgactggcgctcacagcccgggtgcatggtggggctttgggtgaacatgacaagatggtggcagcagccaccggcagcgagatcctgctatgggctctgcaggcggaaggcggtggctccgagataggggtctttcatctgggggtgcctgtggaggccttgttcttcgtcgggaaccagctcattgctacaagccacacagggcgcatcggggtgtggaatgccgtcaccaagcactggcaggtccaggaggtgcagcccatcaccagttatgacgcggcaggctccttcctcctcctgggctgcaacaacggctccatttactacgtggatgtgcagaagttccccttgcgcatgaaagacaacgacctccttgtcagcgagctctatcgggacccagcggaggatggggtcaccgccctcagtgtctacctcacccccaagaccagtgacagtgggaactggatcgagatcgcctatggcaccagctcagggggcgtgcgggtcatcgtgcagcacccggagactgtgggctcggggcctcagctcttccagaccttcactgtgcaccgcagccctgtcaccaagatcatgctgtcggagaagcacctcatctcagtctgtgccgacaacaaccacgtgcggacatggtctgtgactcgcttccgcggcatgatttccacccagcccggctccaccccactcgcttcctttaagatcctggctctggagtcggcagatgggcatggcggctgcagtgctggcaatgacattggcccctacggtgagcgggacgaccagcaagtgttcatccagaaggtggtgcccagtgccagccagctcttcgtgcgtctctcatctactgggcagcgggtgtgctccgtgcgctccgtggacggctcacccacgacagccttcacagtgctggagtgcgagggctcccggcggctcggctctcggccccggcgctacctgctcactggccaggccaacggcagcttggccatgtgggacctaaccaccgccatggacggcctcggccaggcccctgcaggtggcctgacggagcaagagctgatggaacagctggaacactgtgagctggccccgccggctccttcagctccctcatggggctgtctccccagcccctcaccccgcatctccctcaccagcctccactcagcctccagcaacacctccttgtctggccaccgtgggagcccaagccccccgcaggctgaggcccggcgccgtggtgggggcagctttgtggaacgctgccaggaactggtgcggagtgggccagacctccgacggccacccacaccagccccgtggccctccagcggtctcggcactcccctcacacctcccaagatgaagctcaatgaaacttccttttgaacaacgcagctgccatgatgccttgggatgccctggtcctgggggactcaggtgcctccctgattcctgtgggaaccccgggttcagggccagggcctccttggaataaatggttattgttactaggtccccaccttccctcttttctggaagccaaagtcagcctccccaataaagtcctcactgcccaaaaaaaaaaaaaaaattcactggccgagcgtttaccgtcgtgcnnnnnnnnnnnnnnnnnnnnnnnnnnnnnggggggggggctttttttttaaaaaaaaaaaaannnnnnnnnnnnnnnnnnnnnnnnnnnnnn

SEQ ID NO: 20003 - DNA, 1239 bp, Homo sapiens
  misc_feature 1237, 1238, 1239: n = A,T,C or G
ggagtcgaccccgcgtccgcggacgcgtgggccacggactctccacgtgccggcgccccctgcctggccagcccggcccagcccggcccagccctgccctgccctgcccaggctgtgggcgagggtgttcccggggccagtgggtgggaggtcccagctccctggggccgggcctcgccagcaccctgcgtgccccacacccccgtctctggcccccatttgcctacacccgggccttcctccaccacccctgcatttacctctctccctcctcctctcccctccctccccccgctaccctaactttgccaggcaccttttcccttccatccatcttaaaggaaggaagggacgggctgagttccccgacgagagacacacccagattttcctgcagcttggggagaggtcctcccaggagccttggtccctcctggcctgccggagtccttagccaggatggaggctgttgtgaacttgtaccaagaggtgatgaagcacgcagatccccggatccagggctaccctctgatggggtcccccttgctaatgacctccattctcctgacctacgtgtacttcgttctctcacttgggcctcgcatcatggctaatcggaagcccttccagctccgtggcttcatgattgtctacaacttctcactggtggcactctccctctacattgtctatgagttcctgatgtcgggctggctgagcacctatacctggcgctgtgaccctgtggactattccaacagccctgaggcacttaggatggttcgggtggcctggctcttcctcttcttcaagttcattgagctgatggacacagtgatctttattctccgaaagaaagacgggcaggtgaccttccatacagctggtgatgggagcttggctgattgtagctatagagcatccccccacattcctagcctggatcctgcctttatccagtctgtctcacctttgaccccatctctccctactcaacgtttgtctctttctctaccccctcttcccctctagtcctctcactattccctctgaccctggtctttctctatcctagatccagtttgtcctggtctcactgcacatctcccagtactactttatgtccagctgtaactaccagtacccagtcattattcacctcatctggatgtatggcaccatcttcttcatgctgttctccaacttctggtatcactcttatgccattgggccagcnnn

SEQ ID NO: 20004 - DNA, 3194 bp, Homo sapiens
tcgacccacgcgtccgcggcgcggcgcggcgccatcttgcagccggcggcgcggattgaatgagcccgccgagcccgggccgccgtcgggagcagcgcaggccgcgagccgccgccaccatggccacgccgctgcccggccgcgcgggcgggcccgccacgccgctgtcgcccacgcgcctgtcgcggctgcaggagaaggaggagctgcgcgagctcaacgaccgcctggcgcactacatcgaccgcgtccgcgcgctggagctggagaacgaccggctcctgctcaagatctcagagaaggaggaggtgaccacgcgcgaggtgagtggcatcaaggcgctgtacgagtcggagctggccgatgcccggagagtcctggatgagacggctcgagagcgtgcccggctgcagatagagattgggaagctgagggcagagttggacgaggtcaacaagagcgccaagaagagggagggcgagcttacggtggcccagggccgtgtgaaggacctggagtccctgttccaccggagcgaggtggagctggcagctgccctcagcgacaagcgcggcctggagagtgacgtggctgagctgcgggcccagctggccaaggccgaggacggtcatgcagtggccaaaaagcagctggagaaggagacgctgatgcgtgtggacctggagaaccgctgccagagcctgcaggaggagctggacttccggaagagtgtgttcgaggaggaggtgcgggagacgcggcggcggcacgagcggcgcctggtggaggtggacagcagccggcagcaggagtacgacttcaagatggcacaggcgctggaggagctgcggagccagcacgacgagcaagtgcggctctacaagctggagctggagcagacctaccaggccaagctggacagcgccaagctgagctctgaccagaacgacaaggcggccagtgcggctcgcgaggagctgaaggaggcccgcatgcgcctggagtccctcagctaccagctctccggcctccagaagcaggccagtgccgctgaagatcgcattcgggagctggaggaggccatggccggggagcgggacaagttccggaagatgctggacgccaaggagcaggagatgacggagatgcgggacgtgatgcagcagcagctggccgagtaccaggagctgctggacgtgaagctggccctggacatggagatcaacgcctaccggaagctcctggagggcgaggaggagaggctgaagctgtcccccagcccatcctcgcgcgtcaccgtctcacgagccacctcgagcagcagcggcagcttgtccgccaccgggcgcctgggccgcagtaagcggaagcggctggaggtggaggagcccttgggcagcggcccaagcgtcctgggcacgggcacgggtggcagcggtggcttccacctggcccagcaggcctcggcctcgggcagcgtcagcatcgaggagatcgacctggagggcaagtttgtgcagctcaagaacaactcggacaaggatcagtctctggggaactggagaatcaagaggcaggtcttggagggggaggagatcgcctacaagttcacgcccaagtacatcctgcgcgccggccagatggtcacggtgtgggcagctggtgcgggggtggcccacagccccccctcgacgctggtgtggaagggccagagcagctggggcacgggcgagagcttccgcaccgtcctggttaacgcggatggcgaggaagtggccatgaggactgtgaagaagtcctcggtgatgcgtgagaatgagaatggggaggaagaggaggaggaagccgagtttggcgaggaggatcttttccaccaacagggggacccgaggaccacctcaagaggctgctacgtgatgtgaacccacactcctcatccacacacctttctttacccagagccactgaaaactatttttatatcattggctttctttagttcttgatacatttctagagaatttctaagcgaactgccagaacgtgtgggtgggtctcccccagccctccctcctggcgggtctcctccagcctcacttcgctgccacttcgccgctgccccggagacttttcaatcccaccccactcctcatctcaccatttggtcaattggaagcccagggccaggaccccgaggtttagaagatgcttgggcttggagggaggagggccggcgaggctagcgaggggacaggagacggccctgctgcggacggagcgcggaaactgcgtaggaattcagtggtggtgggtttttttaaggctttctacaaaaccaaattcagaatccaggcgtcgacctggtggggcccggggccaagcctgcattctggctgcccagcttcggacagcgggaactcctcaggcagccacgcagcgggtgtgggccagcatggggatggcgtggcccccagggcgggttttcactccgctgcctgggcttccagattcccgttctggcagcgcaccggccgggtttctcggaccgttgactttatttgggggagttttcccgcagttcagttcctgactgtgcaaggccaacagggcaggggaggggaagacctggggaaggaagaatgaggacagtcccgtcgtaagacctgtcacaacaataagcagggaggggagatgtggaggggacacatctggttgccttggaggcagaagctgtgagtttcagaacagctgtctgcagggaacgccaccatgttgaccctctggaggagagcgctgtggagcccctcccgtgttccagctccgtctgccctgtgcctatatatacacatgcgtctatccatactgtgcttttatctgtgattttctcgctgaaaccatgtttctcagacaggccaaggccacctgactcctatcacgacgcacccaagcccctcagtccagcttcccaatgcctggcaccccccttcggcaatagctcaccgtttacaccctccctcatagatacacagaagttatttttttaatggatatttattttttttacattggtcagtacacaggtcaggagctcacgccagggccttgaggacaggctgaccctcctccccaggccgggaaggagccagcggccgacaaagcagatacacccgctgctccacgtagcccctgctcgc

SEQ ID NO: 20005 - DNA, 862 bp, Homo sapiens
  misc_feature 862: n = A,T,C or G
ccacgcgtccggaagaatctacacttctttgcaccagagtatggagaagtcactaatgtgacaacagcagtggacatctactcctttggcatgtgtgcactggagatggcagtgctggagattcagggcaatggagagtcctcatatgtgccacaggaagccatcagcagtgccatccagcttctagaagacccattacagagggagttcattcaaaagtgcctgcagtctgagcctgctcgcagaccaacagccagagaacttctgttccacccagcattgtttgaagtgccctcgctcaaactccttgcggcccactgcattgtgggacaccaacacatgatcccagagaacgctctagaggagatcaccaaaaacatggatactagtgccgtactggctgaaatcccccaggccctgatctgcgctgtggctgtccctggacgtgctgcagccctcctgtcccttccccccagtcagtattaccctgtgacatcacctgtcgtgcccccctctgtcaagactccgacacctgaaccagctgaggtggagactcgcaaggtggtgctgatgcagtgcaacattgagtcggtggaggagggagtcaaacaccacctgacacttctgctgaagttggaggacaaactgaaccggcacctgagctgtgacctgatgccaaatgagaatatccccgagttggcggctgagctggtgcagctgggcttcattagtgaggctgaccagagccggttgacttctctgctagaagagacctcgaacaagttcaattgtgccaggttcagtaccaggccggacggccgcccccgcggtgtggctgttcttttcctcacaggaagcagcn

SEQ ID NO: 20006 - DNA, 4773 bp, Homo sapiens
cgtccggtttttatgtgtttttcaaagtttttaaaataacccacgcgtccgcgcctttccagtactgctagcagcagcccgaccacgcgttaccgcacgctcgcgcctttcccttgacacggcggacgccggaggattggggcggcaatttgtcttttccttttttattaaaattatttttcctgcctgttgttggatttggggaaattttttgtttgttttttatgatttgtatttgactgagagaaacccactgaagacgtctgcgtgagaatagagaccaccgaggccgactcgcgggccgctgcacccaccgccaaggacaaaaggagcccagcgctactagctgcacccgattcctcccagtgcttagcatgaagaaggccgaaatgggacgattcagtatttccccggatgaagacagcagcagctacagttccaacagcgacttcaactactcctaccccaccaagcaagctgctctgaaaagccattatgcagatgtagatcctgaaaaccagaactttttacttgaatcgaatttggggaagaagaagtatgaaacagaatttaattctcttgacatttgtgtcaatattttccctgtattctgttcatctccttttgaagactgccaatgaaggagggtctttattatatgaacaattgggatataaggcatttggattagttggaaagcttgcagcatctggatcaattacaatgcagaacattggagctatgtcaagctacctcttcatagtgaaatatgagttgcctttggtgatccaggcattaacgaacattgaagataaaactggattgtggtatctgaacgggaactatttggttctgttggtgtcattggtggtcattcttcctttgtcgctgtttagaaatttaggatatttgggatataccagtggcctttccttgttgtgtatggtgttctttctgattgtggtcatttgcaagaaatttcaggttccgtgtcctgtggaagctgctttgataattaacgaaacaataaacaccaccttaacacagccaacagctcttgtacctgctttgtcacataacgtgactgaaaatgactcttgcagacctcactattttattttcaactcacagactgtctatgctgtgccaattctgatcttttcatttgtctgtcatcctgctgttcttcccatctatgaagaactgaaagaccgcagccgtagaagaatgatgaatgtgtccaagatttcattttttgctatgtttctcatgtatctgcttgccgccctctttggatacctaacattttacgaacatgttgagtcagaattgcttcatacctactcttctatcttgggaactgatattcttcttctcattgtccgtctggctgtgttaatggctgtgaccctgacagtaccagtagttattttcccaatccggagttctgtaactcacttgttgtgtgcatcaaaagatttcagttggtggcgtcatagtctcattacagtgtctatcttggcatttaccaatttacttgtcatctttgtcccaactattagggatatctttggttttattggtgcatctgcagcttctatgttgatttttattcttccttctgccttctatatcaagttggtgaagaaagaacctatgaaatctgtacaaaagattggggctttgttcttcctgttaagtggtgtactggtgatgaccggaagcatggccttgattgttttggattgggtacacaatgcacctggaggtggccattaattggcaccactcaaactcaaactcagtccatctgatgccagtgttgagtaaactcaactactatgaaatttcacctaatgttttcagtttcacttccttttgaagtgcagattcctcgctggttcttctgagtgcagaataagtgaacttttttgttttgttttgtttttttaagaaacttatctgtatgttagaaatggatatgaacaacaaaaccacgagtctcgggttaagggaagtgacaattttattccattccagagaatggacaaactcttaacttttatcaagccacatgcttggctgtgtcattgtttaacttggatattttatgattttacttgaatgtgcctaatggaaccatttgatgtgagaaacaattctttttaatttacagcaaaatattgaataaccattgacaaaaacactattattttttgtaccaaaaatacttaaagacctcagaagcactcttttacttttaagaaattgcttttttgaactttattcagaagcagttatcaataaattccataaaataatgtcattggtatttaaaaatgaatattaatataatgaaatggtttgcctttttgtaggcataataagccaaatacttttttacccaaaataatttttagagaaaatgatgtaatgaaaaattgtaccatgaattaggagcatagttttttccatttaaacgtcaccattacttaaaagatgattgattattgctataccaaatcagatgaactctgttcatcacttttcttctctgtccccaaacaatttggttcattcagactgaaatgtttgtgtcttcaacttattagaatggaagataatgcagatatttctgtgggaaataaaataactaattttgaggtaccaaatagtgcaattgggtaaaacagggtttattcagttgcatctgtctccagtgttgtattgacagctctgggtcttttttttgggccagcccttttttgacattgcttccagcagtggaaaatgggcatttgatggcaataggccaaaattattgtgtccagagagtacactttttcaaaatgctcacctactggaagtgtgaattacttgacaatgtatggcttagttgtgttcatgttttgtctacagtagaggtctaatccacaggttacacctatgtttgatatgatataagttctctttgcgtaggccactgggtttctcatgcagtaagctttataaaaactcatttgcactggactgtcatctcattcttgtacaacgtagaattacttgtttacatccaacaaatggttagctagggaaaacagtgcaaactgagtgttagtagtcattttggtccaactgcatgtcaacccttccatttcaatcccagttagaaatgaaaataattactttgaaacttggctttaagagcacatttatcgtacgtcacagtgtatggtgaatatattattaaataatgtggtacttcgctcatcaggcataatgtctaaaatctaatatacataattccattaagtggttgaaggaagcaaataatggaattgtcaattggtcatctggctgtaaggtttgcccttgaactaaaaatgttgtttggggcaagggccagaaatgtggagacatggtttttgttacgcattcttgtattatatgtgactaaatttacaaacaagatacatgtgtaattaaagacccttatggaactggaagacgtcttgtagtgctacattgggtgaaaccgttggtccatttttgtctgtttctatgaagataaaataattgggggccatctagaaatagaaaggcagtgggaagacagattctacggcactgctttcatttaattgggctttaggcactccattcgaatgcagaacctcacctctagttgagaccaagaattggcaaatttgcatgagctcctggaaagagttgctgactttgtatctaagacctgccagggaataccaagagttgtttctacagactttttttttttttttgtatgggagaagatactgtggcaaccaggaaggaatggaaaaaaaattcttttctctacagcaaattaatgtgaggaagctcctccaatcctctggctatttaaggttcaaaatcaagtgcctagggaaaattccaatggatgattttctgggagctatcttgtctaccttgaggttcctgaacaatgaattcccattaatgagcagtcttcagtattaaaaccactgtcttgtcacctcattttgcattactgtcttccgtggatgtttcagttacaactgtaatgttatttatagaacaacattaatccattaaagctaacctatttttcaatatttatgataatctatgtacatatattgtctgtccatatgtatttgtaaataggttgtatataatgtcaggtttgggtcttgggttcaagtgtatatattcctgtaagtttcttaactgcattttgatgaattcacattatgtaactataagaattgtcccaaaagtacctgtacagaaaattgaatattgaaaaattgacaaattgtgtacaaacactaaaaaaaacttgtttaaattgtatttgcaataaacaacatcaaattttttttcatgaaatcttggtacaaattcagatctcttatttaaaatttaaataaggaatacattttcaaaatgcagtaatcaaaatgtgatctagtgtaatgaaataaaatgtgatctagtgtaatggaagacctttgagaacctgggtgtattaactttgtgtatatagtgtaaatatccccactgtactgttagaggccaacaattctagtatggcttgttggcaaagagtgctacaccgtttcaatgaaacaatgtatgtttgttttaactgaactaaaataaatacatgcttaatcctgaaaaaaaaaaaaaaaaaaaaaaaaaaaaaaaaaaaaaaaaaaaaaaaaaaaaaaaaaaaaaagggcggcc

SEQ ID NO: 20007 - DNA, 658 bp, Homo sapiens
cgacccacgcgtccggccagattgatagctctttctcgattccgtgggtggtggtgcatggccgttcttagttggtggagcgatttgtctggttaattccgataacgaacgagactctggcatgctaactagttacgcgaccccgaggtgcctgaccagttctaccgcctgtggctatccctcttcctgcacgccgggatcttgcactgcctggtgtccatctgcttccagatgactgtcctgcgggacctggagaagctggcaggctggcaccgcatagccatcatctacctgctgagtggtgtcaccggcaacctggccagtgccatcttcctgccataccgagcagaggtgggtcctgctggctcccagttcggcatcctggcctgcctcttcgtggagctcttccagagctggcagatcctggcgcggccctggcgtgccttcttcaagctgctggctgtggtgctcttcctcttcacctttgggctgctgccgtggattgacaactttgcccacatctcggggttcatcagtggcctcttcctctccttcgccttcttgccctacatcagctttggcaagttcgacctgtacaagcgcgtcttgcagctacaccgtgttctgcccccggacctcaaatccctgggcgaccagt

SEQ ID NO: 20008 - DNA, 841 bp, Homo sapiens
tatagggagtcgacccacgcgtccggtcccgcccccctctcctcgctgcttaggctccggcggcctccaagctgtagctatgacggcgcgcgggactccgagccgcttcttggccagcgttctccacaacggactgggtcgctatgtgcagcagctgcagcgtctgagcttcagcgtcagccgcgacggcgcctcgtctcgcggcgccagggagttcgtggagcgggaggtgatcgacttcgcccgacggaatccaggggtcgtaatatatgtaaactcgcgtccgtgctgcgtgcccagagtagtggccgaataccttaacggggctgtgcgcgaggagagcatccactgcaagtcggtcgaggagatctcgacgctggtgcagaagctggccgaccagtcgggcttggacgtgatccgcatccgcaagcccttccacaccgacaaccctagcatccagggccagtggcaccccttcaccaacaagccgaccacgttccgcgggctacgcccccgagaggttcaggatcctgccccagcccagtgcctgcttctgggggcagtgaccttgtgaaccactcatttttatgcaagtggcatccctaaaacctgagatgaggaagacttcaagggttttacagggcccttgttttttaaatccaaattgataataatgatctcaaaacacagtgagaggtctgaaggctggcttctgaagaatccctgatgtcttattggaacaaccactgagctacggagagctctgctgtgatgggctaggcactttatatctgtgtgaatacagatttataaaacaggttaataaacttatccaaggtca

SEQ ID NO: 20009 - DNA, 1753 bp, Homo sapiens
  misc_feature 1751, 1752, 1753: n = A,T,C or G
gttctagatcgcgagggcggggcgtgcctccgcgtctggccggagaaacttgagccggctgccccgcccacggtgcccgaagccccaaaggctggaattaggggctagaagtctggcacccaccgcctggccaggtgttcgggacgcgaccaggtgggcggtcgccccgccccgggagcgcggcttaatagctgagagcccgggggccaggccgcggctgcggcccaggcaacgccctgagggtggccacgctgccaggtgttccactcccccgggactatgggcaagggcccggggcggggagggcggcaggtgctgacactggagctgcgccggaggtcggggaactcggcctcctaagactgaggacactcgcctgctgggccggtcgagctgtgcggtgccctccgggacgcagggggcgctgcagccacgctgggtcaggctccgcagggccctcccaacccggggactaacggcgccggtgacgacttcgccgcgcgttggtcagccatggccaccgctctcgcgctacgtagcttgtaccgagcgcgaccctcgctgcgctgtccgcccgttgagcttccctggtgagcttggaccccgcgccctcgaccatccagccccctagggccggcgactgccagcccagcaccttccggcctctcgggctgcccgagcgcgaccctcgctgcgctgtccgcccgttgagcttccctgggccccgcggcgagggcatcggctctcgccggcggatgacgagctgtatcagcggacgcgcatctctctgctgcaacgcgaggccgctcaggcaatgtacatcgacagctacaacagccgcggcttcatgataaacggaaaccgcgtgctcggcccctgcgctctgctcccgcactcggtggtgcagtggaacgtgggatcccaccaggacatcaccgaagacagcttttccctcttctggttgctggagccccggatagatcgtggtggtggggactggagaccggaccgagaggctgcagtcccaggtgcttcaagccatgaggcagcggggcattgctgtggaagtgcaggacacgcccaatgcctgtgccaccttcaacttcctgtgtcatgaaggccgagtaactggagctgctctcatccctccaccaggagggacttcacttacatctttgggccaagctggtcaatgaaccgccaggaactgacctgctgactgcatctgccaggcttcccaatgctttcactcttatctaccctttggcacttatcttggttatcaacataataatttatacacttcaaaaacactgcgcaagaaccccggacggcactcaactgccaggggcgcggacacacgccgacccgacaccgcgcccggtgcacccgcggcaccggacaccacctctcggcaaacggggaaatctggccggcccaacagagcggacacactgcacccagacaccgataccgcaacagaccaaccagcgccacacacagcaacgcatcgacagcagcgctaggcacggagcgactactcgtgcaccaacgcgcgggcaactcaaacaccatacagagatagcaacgagacaacccgcgtgccctcccagcagcagcataacaaacagaagagtcatgaccgatcgttcgctcgcccagtagcgcagtagaacaagaagtacataccgcagccccaacacacacaaaatcaaccgatgcaaccgacacaagcagcagcaagaacagcnnn

SEQ ID NO: 20010 - DNA, 1654 bp, Homo sapiens
ctcagtgtattcaagcagtgtcagggcatctgggcccctggcaacaccttctggagcctgggttcctgcttccagcactgtgatctgcaaagcaacagcatcgtctccccagtctatcccatcacctccaggatcctttgaatctgattccgggaagatgccccagtcgattccagcagcctcggcagagatgccatactgcttgcaggagtggtagaactgctcccgcatctcggcagcccctgcctggcactcctccctccttgcggctgtattcttgctgcagctgctggcacttggcaatctgcttcttcagtgaggggatctcatagttgacattccgaaccaggaggctagagagttccactgagaagtgcccaggaaattcagcccaggacacccccacatgaggcaggcatgccccaggatgcacacacatcctttgtggtggtgaagagcacgaagtcagcttcccagccccacttgttcccagctgtggagcctaagacaagttgtttaacccctctaatccaaccctcatcggtaaaacagcgacaataacatttatcatgaagatgcaagagagaatccacatgacacaccaagcacaattccttgcatttagtagatgctcaggaaatattagccattattattatttatactacacccaacccaaacacagttagtcctgtagttgctctcaggcacttgatattcgctcccaggaaaacccgtgcctcttctgccttgtgtagaatgggggtgcgggggtgggggtgggggcagcacactcccgctaaccaagaggtgagtggtggaggacccacacacacctgctcgctgaggcacggcgaatggccactaccggcctggacctcctccttcccccagcactccactcagggaaaatcaattccatcaaaaacaattgattttaccacctacaaatgggcaacatctacactccagtctcttcccactcacagactgtgcctcctataagcctggtatctcagaactctgagagtgggcttccccatggataccagggctcccaggccgggccactttacctaagtaggtgttgtccttctcatacagagctataatctcctgccaatccttcatccgctgtgaagagtatcggccaaaaatattcttcgtggaggcctctgtgcctttgagaaggtccaggattcttaggcagtgaaagtagtgaatgtaggacccagacagcagctgggcgatctcttcgctctctggcatgtcctggatggcagcattgatcttctcgcggatcgtcagcaccagactctgccatttcaggctgcagtgccttctgtccaccagccaatcgagcagcttgctggtctggatgtcgatgggcacgtgctgatggtcctggcgggaaacacggtgaggaggggggcgtgagcgcggagagaggacgtaccactcgcgcgctcatttcaacgtcccaaccaccaccctgcagggccagaacggggccagagcgatgggctgggttgagccgctcccggagggagaccggagacacaggttaggggtccgcggccagtccccagcacacccagctcctgtccccacacctccatctttcctccacttccgccggacgcgtgggcgactc

SEQ ID NO: 20011 - DNA, 6025 bp, Homo sapiens
  misc_feature 6024, 6025: n = A,T,C or G
ggcatttcttcgcttcctcatgggccggcgcgcggcgcggcacaccaggctcccctgggctcggggacccggccatgggccgaggcgcgggccgcccgcccgctgggagccacggcttagcagccgaccgctagctgcgccgccgcccggggaccggcatgaggaccgccgcggggggacgtctgcggcccgcgtcggcgctggggacaaagaagccatgcagtgacacccgctaagacttgttggtagccatgtcggagccccacagggtccagttcacctctctcccaggttccctgaatcctgcgtttttgaagaagtcccggaaggaggaggctggggcaggagaacagcatcaggactgtgagccggctgcagcagctgttcggattacactcaccctctttgaaccagatcacaaacgctgcccagagttcttctacccagagctggtgaagaatatccgagggaaggtaaaaggccttcagcctggagataagaagaaagatctgtcagatcctttcaatgacgaagaaaaggaaaggcataaagtagaggcccttgcccgaaaatttgaagaaaaatacggtggaaagaaacgtagaaaagaccgaatacaggacttgatcgatatggggtatggttatgatgaatccgactccttcatcgataactctgaggcgtatgatgagcttgttcctgcttctttgactacgaagtatggaggattttacattaactcgggaaccctgcagtttagacaagcatcagagtctgaagatgacttcattaaagaaaagaagaaaaaatctccaaagaagcggaagttgaaggaaggtggtgagaagataaagaagaagaaaaaagatgacacttatgacaaggagaagaaatcgaaaaagtccaagttttccaaagccggcttcacagccctcaatgccagtaaggagaagaagaagaagaaatattctggggctttaagcgttaaagagatgctaaagaaatttcagaaagagaaagaggctcagaaaaaaagggaggaggagcataagcctgttgcggtcccatcagcggaagttcagggcctgcgggaactggagggtgcctctgaccccttgctctcactctttggctctacttctgacaacgacttgctccaggcggccactgccatggactcgctgacggatttggacttggagcatctgctcagtgagtctccagaaggaagtcccttccgagatatggatgatggaagtgattcccttggggtgggattggaccaggaattcaggcagccctcttctctccccgaaggcctgccagcacccctggagaagcgcgttaaggagctggctcaggctgccagagctgctgagggggagagcagacagaagttcttcacccaggatattaatggaatcctattagacatagaggcgcagactcgggagctgagcagtcaggtccgctctggggtgtatgcctatcttgcgtcattcctgccctgcagcaaggatgccctgctcaagcgtgctcggaaacttcacctctatgaacaggggggccgtctgaaggagcctctccagaagctcaaggaagccattggcagggcgatgccagagcagatggccaagtaccaggacgaatgccaggcacacacgcaggcaaaggttgccaagatgctggaagaggagaaagacaaggagcagagggaccggatttgttcggatgaggaagaagatgaagaaaaagggggcaggaggataatgggacctcggaagaagttccaatggaatgatgagatcagggagctactgtgccaggtggtgaagatcaaactggagagccaggacctggagaggaacaacaaagcccaggcttgggaggactgtgtgaagggctttctggatgcggaagtcaagcccctctggcccaaaggctggatgcaggccagaactctgtttaaggagagcagacgaggccatgggcacctgacttcaatcctggccaagaagaaagttatggccccttctaaaatcaaggtgaaggaatcgtctacgaagcctgataaaaaggtttctgtcccatcaggacagattggtggccccattgctttgccctcagatcaccaaacaggaggcctgagtattggggcctcgagcagggagctcccatcccaggcatcgggcggccttgctaaccctcctcctgtcaacctggaggactcattggatgaagacttgatccgcaatccagcctcctcggtggaagccgtgtccaaggaattggctgcattgaatagcagagcagctgggaactctgaattcacactgcctgcaccctcaaaagcacctgcagaaaaagttggaggcgttttatgtacagaagaaaaaaggaacttggcgaagcctagtccttctgctccaccaccagctagctctctgcagtcacccctcaattttctggcagaacaggctctggcactggggcagtcctctcaggagaaaaaaccagagagttctggctacaaagagctgtcctgccaggctcccctcaataagggcctgccagaagtacatcagtccaaagctaagcaccacagcttgccacggacgtctcacgggccccaagtggcagttcctgtgcctggcccccaggtcaaagtctttcatgccggcactcagcagcagaaaaacttcacgcccccatctccatttgccaataagctccaaggcccaaaggcttctcccacacagtgtcatcgttccctcctgcagttagtgaagacagcggccaaaggccagggcttccatccctctgcaccagccacctcaggaggcctgtcagcctccagcagcagctctcacaagaccccagcctcgtcctcttctgccctgagccatccagcaaagccacattcagtcagctctgcaggctcatcttacaagaataatccctttgccagctcaatctccaaacatggggtttcttctggcagctcttcctcgggaggaacaccagtccagagttctgtttctgggagcctggtccctggcatacagcctccctccgtgggacaggccaccagccgacccgtcccaagttcagcagggaaaaaaatgcctgtttcccagaagttgactctggtagcccctccaggcggtccaaacggagattccagtggtgggacccagggagtggcaaagttgctgacctcgccgtccctaaagccctctgcagttagtagtgtgacatcgtctacctccttgtcaaaaggagcgagtgggactgtgctgctggccggctcctctttgatggcttcaccctacaaatccagcagcccaaagctgtctggggccatgagctcgaactccttgggaattataacccctgtccctattcctgtccatgtgctctccttcagcgctgactcctctgccaaagcaggggtctccaaggatgccatcgtcacaggccctgcccccgggtccttccaccatggccttggccacagtcttctggctggcttgcactccagcccgccccatgcagcgcctctcccacacgctgcggtgcccacccatatcccgcagagtctgccaggtgcttctcagcttcatgggaaagggcctgctgtaccacggaaattgtgaccgcttcagaggcaaggcttgccacttgggtctgggtggaatcagaacgtgcaggtctcccaggatgtacactcactgcgccctttctgctgcttggtgttcttctggaggagcgtgagttctcagcggagcgcttctcggcacttctgatgtgcctcccatggagggagccgggcccttgctgctcaggaggtgcagactgccccgtgctctgggccttgcagctctgtcgctagacggttgttagaggggcagctctaggctggggcttgcgctgggccgtggtgggaggcacagtgtttacaggctctggtggcagagcagttggcacacctgtgggtgaatctgcctgatcccctggcatttggtcagagtacctcagagcaccccactgctcaggggctccttctggctgcagtaagctccctggatggtcacagtgccgccccatccccaggctgtgtgctcaaagcggacaaaactcaggccagagccacagctgggagacctgcactgtccctgcgaaatactaagaacacctagggtgtgctcactgtgggggccagtttctcctcggaacatgacaatgaagctcttttagagaaaagacctttgtagattcaacaattatgataggatttttacagacacctattttgggctcagttttcatcattaccattaaatgcattggatagaaggggactgttcttcacacatcatattataggaagacataattccagtgcctttatggtggagcagaattcgacaacacatgtccattcagccctctgaatggatctgagacgaagacctttttaaagatatgtctgtattgaagagaaagccagttttgagttttttacacttgcacatcattatctgtgccgtcctgactagaaggttgtctgggcccccaaattccaagtcccagtatagccagggctcccattttgtttttccagagttcgtggaggtggactgcagagcccagagcccttcatctctctgagggtcaaggataccaggggtcccaagtcacagatagacattccagtttgtattcttaggaatcattcttaggcagtgcggcagaagcaggcctctgtgaagtgtctgccgggtagaaataggccttgaagtcctggggctctccaggcagtggggttatgtgtcgactgaagggtgatgtgcagaagagcttggagagtggatcagagagactaggacagttactgcagagctcctaagtcaccactcaaccagtggctgtttcacaaggatttgagggcacttgcctgtcttgtgaggtctgtgccacaaggtgagtctgaactgactgctccagctaagtgatcaggcacgttgagagtatacggtgtcctcagcacatacacctgtgggaaaacggaccgctcttggctcctgactcccagggtacagcgcccagtaactcatccttcattcagaggtttgctggccttcccggtttcccaaggagcaagacctctgtctgccctttggcccggcctctgctctgactcctttttttacataagaaccaatctgtgtttcacattgggctaagtggattccttatccctttgttatatatattttttgcaacttggatttccagtttgtttacagagtagtcttaggtagtagcaaaagagccaaagaagagatttgtattgctgagctcaaagccaagcagaggccggcagtggaggctgagcagggactctccaggcttctctgcccataaacacccgggtcccaggccctccttcctttccctttggtgctccctcctccccacgtaccattgcgcgtgcagctggagcagaataccctcatttttaggaatctagtgatgcctcttgcctcagggaaacgtttctttgatggggagtttgagatttcttttccttgtttatgctttatttgtggtaatgaaagagcgaatgactgaacagccatggcaaggcagacctacaggcgaggccgcagcagagggtggggcagagcagcctcggggtctgggggctgcaggggtttccctggcgcagcgaaagtctctgagcacttaccgggcgtgaccgtttcttaggtgtgagaggggctgtggcttttgtgcagcgactatgttggtgttaggggtggtgtggagattgttaatcttgtataaagcaattcaataaattgtttcaaggtttccaaaaaaaaaaaaaaaaaaaaccaagaactagagggggggcccgggacccaaattcccctatagtgagtcgttttacaattcactggccgtcgttttacaacgtcgtgacctggaaaaccctggcgttacccaacttaatcgccnn

SEQ ID NO: 20012 - DNA, 1506 bp, Homo sapiens
  misc_feature 1, 2, 3, 4, 5: n = A,T,C or G
nnnnnacgccccgccgctcctgtgcttcttgtgtggccccccgtcccgcgcccttttccgcaccttgcctcctcctctccctggcttccttcgggcgtcccgcctgcctgcgcctttccactcccccgagtcggccactgtccgaggccagtacctcggaccaggtccttacccacgagcctcttcttctgtcagcctcagtcttgcgctttggcaggagaactgctccgcccccccccaaggaaaaggagaattgagccctgtcatcgcatttgtgaccgaagcctcaccgctgaccccatctccgctcagctcctccaagaggctcacggggcgatggatcccggacaggggcagcaactccgtggaccgtgcagggaaggggcatccggggacgtctctggatctcctgaatcagctcctcggccctcagcagcttcgccttcagctcctcgatctccttttccatgggcagtacgatctcccgcagcttctccgagtcctcgtgggccttttccatctgcttctccagggagtccagggggtaggcccgggacagcagctgcttcaggcggcccagctcccgctccttctcctcacagtcctgctgctgctgctgtcgctcctgcttcagggcggtgatctgggcttcatagctgctgatggagtctttcaggatggcctgcagcgaggccacctcctcttggcactgccgctgcaccgcagccacagcctcggccttcgtgctctcgctcacctctgccacagccttcatggtttccatttctgccagggcgcctgccagctcagcccgaagccggctgagctcacctgactcggcctcaccatttgccccttcctgggaccgggagtcctccagtgcagcccccggccgccgccgccgctcatcgtcgtccgcggccaccggcgcagctgccgccattgcctcagcgcaaacggcggattcccgcactccctggtgacggagcgcaccgcttccgggtcctctcggctgtttccggatccgctcggctgtttccggatcggccccgggctggaggccccggacggaggatggggggattgccgagcctcggccgaagattcccgagtcggcccccggccccggccccggccccgccccggctcttcttggctgggtcgcgcggttcgggaggacgcctgcctttcaagcccggaagaggatccttaagaggtcttgcccggcgtctctccgtgaccttggaagccctgctccaattatgcctcctccgggacaccggcctgcggagagctccccctcgctccctcgctgcccctgcccggagccagcctttgatcggctccggccgcccttccgcccgagcctggcttgcgttaccgcgaattgtggcggggccctccctgcacctccgccctcttggagcgtccctcggggcagggccgggtcggcttcatttttctgagcgcctcggagtccccgccggacgcgtgggtcgactccct

SEQ ID NO: 20013 - DNA, 1012 bp, Homo sapiens
  misc_feature 1, 1009, 1010, 1011, 1012: n = A,T,C or G
ngctagtacgaggctgggtttaaatcgctagtagctgcaggtttccgcagctgagggggcagctccgcggcggcgtccggggtctccagtagggctgacgctccggtgctcgcacaatcccccgcctcggctggcaacgggcgtccctccactccccgagtccccggcagccgccgccaccccagcgcgccccgatctggccccctgccccgcgaagatggctgccgtacgccgggcccgcagttattgccgctgcctggtgcgcttctccgaccgagaactctgctaagctccgctgcagagacaggcaggagtagacacccggacacccagcacccctcctccggggggcggtgcagagggggcacggagagcccctcgagcgcagcaggccgccccgccagcatggcagaagctgaggaagattgtcattctgatactgtcagagcagatgatgatgaagaaaatgaaagtcctgctgaaacagatctgcaggcacaactccagatgttccgagctcagtggatgtttgaacttgctccaggtgtaagctctagcaatttagaaaatcgaccttgcagagcagcaagaggctctctccagaaaacatcggcagataccaaaggaaaacaagaacaggcaaaagaagaaaaggctcgagaactcttcctaaaagcagtagaagaagaacaaaatggagctctctatgaagccatcaagttttatcgtagggctatgcaacttgtacctgatatagagttcaagattacttatacccggtctccagatggtgatggcgttggaaacagctacattgaagataatgatgatgacagcaaaatggcagatctcttgtcctacttccagcagcaatcacattcagagtctggccttaactggtaagctgactgaaacagcgatcacaataggctggcaagaggctgtgacactcgggggggtagatggcccattggatgcggtgcgaacatggccaccaaatgcggctaannnn

SEQ ID NO: 20014 - DNA, 1888 bp, Homo sapiens
  misc_feature 1, 2, 3, 4, 5, 6, 7, 8, 9, 10, 11, 12, 13, 14, 15, 16, 17,18, 19, 20, 21, 22, 23, 24, 25, 26, 27, 28, 29, 30, 1029,1888: n = A,T,C or G
nnnnnnnnnnnnnnnnnnnnnnnnnnnnnnccccctccccctccccctaggctaggtacgagcctgggtggcagcgagtggccttcccggttggcgcgcgcccggggcggcggcgctggaggagctcgagacggagcctagttatgtctgggaggcgaacgcggtccggaggagccgctcagcgctccgggccaagggccccatctcctactaagcctctgcggaggtcccagcggaaatcaggctctgaactcccgagcatcctccctgaaatctggccgaagacacccagtgcggctgcagtcagaaagcccatcgtcttaaagaggatcgtggcccatgctgtagaggtcccagctgtccaatcacctcgcaggagccctaggatttcctttttcttggagaaagaaaacgagccccctggcagggagcttactaaggaggaccttttcaagacacacagcgtccctgccacccccaccagcactcctgtgccgaaccctgaggccgagtccagctccaaggaaggagagctggacgccagagacttggaaatgtctaagaaagtcaggcgttcctacagccggctggagaccctgggctctgcctctacctccaccccaggccgccggtcctgctttggcttcgaggggctgctgggggcagaagacttgtccggagtctcgccagtggtgtgctccaaactcaccgaggtccccagggtttgtgcaaggccctggggcccagacatgattctccctggaatttcccacaaccgagaaacgaactgtagagagaaaatgcgatattgtgttctaaaacagggttctctccgcggctcgagaattaggaggtgcgaggctactgggagaacaccatcgggtgtagatactaaaaatcctaacagagcattatccaaacagagatggagtcagtcgagcgtcttcttctttccttcctttcgtcttgccttcttgttatgtcatagcaaccaagcgtaaccagatagacgcagacagagtgaaacgnaaagaacggaccgcgaacaagtaacagacgcgctacacatcagacagagagtgaacagaggaactaacgcggggagagggggccgggagcagaggagctagaccggtggggcgcagggggaagaggggacggaagggaaggggcagggacgcggagaggggcgaggggcggagcgaggcgcagagcccgggcgcgaggagggggaggggcacacggaggcgcagcaggcggccgaggcgcggcggacgcaaggcggacagaggagagcgacgggcggcgccagagagggcgcgggcaggggacgggcggggagcgagacgagaaaggacagaggagcgagaagggaagccagaggaagacagaggcgcggaagagagcgaaggtacgacaacggaagagaagcgcagacacagcaaaggaacaccaagagcagcgagacggagacgagccgagaacgcacggcacgcagaggaggggaacgacgggagcaagcgacagcaagcaggcgcgacacaagaaccatggacgcacgcaacagataggaaagggccaacggcgaagacacgcagaggaaggcaaggaagaaggagcggaggaggcgcgaggacgcagcaaaagcgagaaggaagacgagcagagcgacggagacgaaggaacagtcgccgaccgggaagcgacgaaacaggaagaagacacagcgagcggaacgcggaaccacacagaaggacagagaggggagggagtcaagggaaggagcggaggaccgcgaacgaaaacgaagaagaggagaacgacgaggaggatgcgaggagatagcgaccaagcgaaggacaccaggagtaggatcgagacggaacan

SEQ ID NO: 20015 - DNA, 3990 bp, Homo sapiens
  misc_feature 3016, 3017, 3018, 3019, 3020, 3021, 3022, 3023, 3024, 3025,3026, 3027, 3028, 3029, 3030, 3031, 3032, 3033, 3034, 3035,3036, 3037, 3038, 3039, 3040, 3041, 3042, 3043: n = A,T,C or G
aacttactagtcaaaaaaggcaacagatgttttattcttcaatgcaaattactgtattcaccacaagctaaagaagagaacatgtatcctacatatatatttatatatatatatattttttgtgtgtgtgtgtgtgtgtggatttatggaagactaaagacacggaaaaaaatccagcaccccaacatgtacagccaggaaggaaatcagttctgtaataggacaggtataatgaactacaaacaagaaggggtggaaaaagaagaaaaaaaaatgtgcattgagtttaagacactgtaaaactcagaagacatatttactattcaagtataaactctgtaaggacttggcataaattgaaaggcagctgctgaggtacaccattataaaagaagttctatgaatttacaattctaccttccaatttcctgggagaaaaaaccaaactcttgaaggtcttcaccagagaccctgagagggattaacacttttgatgaagacatagtcaataattcatgattgaactattcaaaaacatgtatttatttagaacaatagaaatacgtgttctcagactgtcctctagagtttttgagactattagttcaagagtttcaaagtatattacttgtaaaaacaatactgattaaaaaaattttttttaacaaaaaaacagaaatctgatttgatggtaccttgaaaataccctaaataccaaattttctccaacctaacattacagctaatttaagaattcctccttcattggtaaaacattttttcctcattaaatgtgggtactgaaattggatagaaacactatgaatgtgaaaataccaccaattttctgcagtaaaaaaaaaaaccccaaaaaacaaaaaaacaaacaaaaaacctagaatgttctttggaatcactgaaatatcacaaacttgggttttttcttacagtctgtgcaccttctttcaggttctctgttttgcttgtagtactgactgtgtgattctaatttttatagattcaagtcttgcaatgcaatatccatgcttgacacaccggtgtctctgaccagtgagaagttatgcataacccagaaacgctgtcatttacatctccataaagacttctgccccaaataaaaacttcagaatgacacaacacatcctgtgttaaacaatcaaatgaacccaacaagggggattccagtgtgatttcagtacttgggagggcattgtctgctatggtttctcatggaagtaccacaggcctggctgctagcattcagctttccttggccttaaaagggattttctcagggctggcaagttggattagattctaagagaattttgtctttgacaaactaccatttttagcataaaatctggccatggctataagtttcaatgtgtgtacaactgattagagagttttttttttctttttcttttcaacattggctggaattgagtagaaaaaagtccacgatgcctcttcacatgtgtcatgaaatatgagaaatctgtctgattctagatactatttctttacgacacaatgggcaggtctccagctgcaaggcacaatccatgcacaggtcactgtgtccacatggcttcaattgtgtgtctgctacctcatcacaacaaagggaacagcagttttctcggatactgacttgcttcaacagagcaagacgcctgtgccttggcaaaatgattttttcttcagctgttaggaaggcgtagtcattaaaagtgctaaatttcatagatggtgggtatttgaatggttttgctccaaaattgaactcacattgttgatatgacatgaaactagctgcagcaaaaaatccagatacagtagatgaaaagacttgcttttcaggaggcagctggttgccatttaaaaagaagatcatttgcttttcattcaagtctaacagaaatcctactgtatctccttctttccagcatgggtgtatgtgaggcttacttctggcattgtaccaaatcagctgccggcagccatcatacgcacaggagtattcatcatccccaatgccgtagccttcatgattgaggaatttgctgtctcgagtggcccagccaatctgcatgacgccagaagtgaccactgttacttcatagtaccataccccggcatccacacaaaaggtgcaacgcacactttcaaaagaggaggcatcacagcgagcctctaagccatgaggtgagatcttcaggtactcgctgacatcattgctattcagcatggccctaatgctactcaagttcactttctcataggtcagctgtctaccttcttttaaaaagagattgtctaagctccactgggcacagaaaccaacttgacgtttcagataatcaggatcattagcccaggactccaatgtgacaagccggtcactaatactggattcagaaatagtcaatttattttcacttgtctgtgcaaacttttccagtgcgataagtgcaaaaagcatgactgtggggtgggactgtaacttcagacactgtagcaagtattccagtattcctgggctaagtaaacctatacttgcaggacctgctagtttctcggccaagcagcctaggactgcagatgtgttcctgtgtttggcaggatggcttgagtcctggcaagctacttctccatttaaattgagaatttcagtcaatttctggagtgcatctttagtgggcaatggacattcatctagtaacaatgttataacagctggtcccagtggatcttccagcggaataactctaattaaagactggacaacatccaaccatccttcatctgtttctgccatttcgtgtaatgttatcattgaatagggaggttcctgatcattatctacaagagtccgtattactgccagtgtgtccaacactagcccatccacattttgtttctttctccttggctcatgaggtcctcggcccctccttggtggccgaacagggtcccgtggttggctccnnnnnnnnnnnnnnnnnnnnnnnnnnnnaaaagctgtagaagaaaagattgaatggctggaaagccaccaagatgctgacattgaagacttcaaagctaagaagaaggaactggaagaaattgttcaaccaattatcagcaaactctatggaagtgcaggccctcccccaactggtgaagaggatacagcagaaaaagatgagttgtagacactgatctgctagtgctgtaatattgtaaatactggactcaggaacttttgttaggaaaaaattgaaagaacttaagtctcgaatgtaattggaatcttcacctcagagtggagttgaaactgctatagcctaagcggctgtttactgcttttcattagcagttgctcacatgtctttgggtgggggggagaagaagaattggccatcttaaaaagcgggtaaaaaacctgggttagggtgtgtgttcaccttcaaaatgttctatttaacaactgggtcatgtgcatctggtgtaggaagttttttctaccataagtgacaccaataaatgtttgttatttacactggtctaatgtttgtgagaagcttctaattagatcaattacttattttaggaaatttaagactagatactcgtgtgtggggtgaggggagggagtatttggtatgttgggataaggaaacacttctatttaatgcttccagggatttttttttttttttttaaccctcctgggcccaagtgatccttgcacctcagtctcccagctaattgagaccacaggcttgttaccaccatgctcggcttttgcattaatctaagaaaaggggagagaagttaatccacatctttactcacgcaaggggcatttcacagtgcccaagagtggggttttcttgaacatacttggtttcctatttccccttatctttctaaaactgcctttctggtggctttttttaaaattattactaatgatgc

SEQ ID NO: 20016 - DNA, 3329 bp, Homo sapiens
ctatagggagtcgacccacgcgtccgctctgcgcgtaagtcgcttgtccgtggcttctctgagaagaaaagttgaaaaagggtaaaagttttcaggaatattcgggctctctattgctaagcatagcgagtgtcggttttctctctccaacagacatcgctattgcggttccgaggcagtgggaagagatgcggcccctggacatcgtcgagctggcggaaccggaggaagtggaggtgctggagcccgaggaggatttcgagcagtttctgctcccggtcatcaacgagatgcgcgaggacatcgcgtcgctgacgcgcgagcacgggcgggcgtacctgcggaaccggagcaagctgtgggagatggacaatatgctcatccagatcaaaacgcaggtggaggcctcggaggagagcgccctcaaccacctccagaacccgggcgacgcggccgagggccgggcggccaagaggtgcgagaaggccgaggagaaggccaaggagattgcgaagatggcagagatgctggtggagctggtccggcggatagagaagagcgagtcgtcgtgagcgcggtcggcggtttccagccaatggattctggtcaactggtggagattggctgacaccctggagaagccgaaaccagagagccttttgttttctcttttttcctgtctatgctctgtctcacttaacactacgttttctgctatggtctgtggttgatgacctcaatatgagtttcgattgttaacgtgtttttgtttgggaagtaattttgtttgaaaatgctctcacatacaggaattagggcctagattgtaagctcttgcagcagtcacatttgttcccgggctttggtggttatttctaaatttttgaggtgctttgctatttcttgtgtgacctgatagctccctggaactttgggtctgtgtgtgacacatgagactcacagttggagttctccagctctggaggtgctgaaggagctgcattaattctggaagacgactccatgcagcaactactgaagaaaggaccagacttcaacggggagtgtggatgggccgacctggctgggactcgtgaatctggagaagagctggagaatggatagtattgtctgtatttggagactttaatttctgtgtgagaccaaaggaggagagatgtgttttgttcaaaatttaaatttgttgtggtacctaaaatagaagataagatcttgatattctgtacaagttgatgtaataccctgatgcgttttagaggacttggcataaaatgaaagattggcaaaggcccttgaggggcttggggatgagagtatggaactgtctgcattggaccctaaactggactagaagaggcatcttcaaggttcatacgttgtccagctgtaagttcatttgagtagcagacctaacaaatatttgaggtcaaaaccctaccatgttaaaacaaacaaaaacttaccatgttaataaaagtattcatgggctttaacatggtagggttctgacctcaaatattgttaggtctgctactcaaatgaacttacagctggacaacgtatgaaccttgaagatgcctcttctagtccagtttagggtccaatgcagacagttccatactgtcatccccaagcccctcaagggcctttgccaatctttcattttatgccaagtcctctaaaacgaaagattggcaaaggcccttgagggtccagtgccagtacaggtcctatggacatggctatcgcccctaggccccctcaaggtgcatttgcaagatcgttttcattctaaatggccaatatcgcttcgtacaaagcgcgatcagtggctattaagaatcaagcttgtaacaagaatattctagatcgtatcaaatctatatcagggttacagtgtcatacatacgctgatttaaggtggtcagaacaacagctcagcaagaggcaaggcgcatgtactcgaatagagtaccaggagaaataccttggaactggttgaacaagcactgccatctctgccgtcctatatgggtctcacaccatgctccttacagtcgccaaccattacggagcaattactatgcaataccaggtctttctccagaatgctccgagagtcccagccaggtcggcccatccacactccccgttgaagtctggtcctttcttcagtagttgctgcatggagtcgtcttccagaattaatgcagctccttcagcacctccagagctggagaactccaactgtgagtctcatgtgtcacacacagacccaaagttccagggagctatcaggtcacacaagaaatagcaaagcacctcaaaaatttagaaataaccaccaaagcccgggaacaaatgtgactgctggcaagagccttacaatgctaggccctaattcctgtatgtgagagcattttcaaacaaaattacttcccaaacaaaaacacgttaacaatcgaaactcatattgaggtcatcaaccacagaccatagcagaaaacgtagtgttaagtgagacagagcatagacaggaaaaaagagaaaacaaaaggctctctggtttcggcttctccagggtgtcagccaatctccaccagttgaccagaatccattggctggaaaccgccgaccgcgctcacgacgactcgctcttctctatccgccggaccagctccaccagcatctctgccatcttcgcaatctccttggccttctcctcggccttctcgcacctcttggccgcccggccctcggccgcgtcgcccgggttctggaggtggttgagggcgctctcctccgaggcctccacctgcgttttgatctggatgagcatattgtccatctcccacagcttgctccggttccgcaggtacgcccgcccgtgctcgcgcgtcagcgacgcgatgtcctcgcgcatctcgttgatgaccgggagcagaaactgctcgaaatcctcctcgggctccagcacctccacttcctccggttccgccagctcgacgatgtccaggggccgcatctcttcccactgcctcggaaccgcaatagcgatgtctgttggagagagaaaaccgacactcgctatgcttagcaatagagagcccgaatattcctgaaaacttttaccctttttcaacttttcttctcagagaagccacggacagcgacttacgcgcagagtaacggcgaacaaaatggagtcccggccgtcaaccagcgctctgcgcgttgcggcccctttcacgacacagccgggcctctttacggtcaggggggcgagctgcgggcgcgcgcacgtctag

SEQ ID NO: 20017 - DNA, 3902 bp, Homo sapiens
  misc_feature 1, 2, 3898, 3899, 3900, 3901, 3902: n = A,T,C or G
nnaagggccctgttgccgtggcaaccccggcctctctgtgggaactttggggagactggccctgggaggcgacagatggaggctgaggaagcagagtgatccccggccccttcctgtccctgaacactgtctgcctggatgagggctgtctgccctgccctgccgtaggagatgggctgggagcctcccacgctctccagctcactcggcaggcagcggggaccagggctggcaggttaagcctctgggggtggatcctgaaaggtggtccagccgcctggccctgcgtgggaccctccacctggcagcagggtctcgctctgtcacacaggctggagtgcagtggtgtgatcttggctcatcgtaacctccacctcccgggttcaagtgattctcatgcctcagcctcccgagtagctgggattacaggtggtgacttccaagagtgactccgtcggaggaaaatgactccccagtcgctgctgcagacgacactgttcctgctgagtctgctcttcctggtccaaggtgcccacggcaggggccacagggaagactttcgcttctgcagccagcggaaccagacacacaggagcagcctccactacaaacccacaccagacctgcgcatctccatcgagaactccgaagaggccctcacagtccatgcccctttccctgcagcccaccctgcttcccgatccttccctgaccccaggggcctctaccacttctgcctctactggaaccgacatgctgggagattacatcttctctatggcaagcgtgacttcttgctgagtgacaaagcctctagcctcctctgcttccagcaccaggaggagagcctggctcagggccccccgctgttagccacttctgtcacctcctggtggagccctcagaacatcagcctgcccagtgccgccagcttcaccttctccttccacagtcctccccacacggccgctcacaatgcctcggtggacatgtgcgagctcaaaagggacctccagctgctcagccagttcctgaagcatccccagaaggcctcaaggaggccctcggctgcccccgccagccagcagttgcagagcctggagtcgaaactgacctctgtgagattcatgggggacatggtgtccttcgaggaggaccggatcaacgccacggtgtggaagctccagcccacagccggcctccaggacctgcacatccactcccggcaggaggaggagcagagcgagatcatggagtactcggtgctgctgcctcgaacactcttccagaggacgaaaggccggaggggggaggctgagaagagactcctcctggtggacttcagcagccaagccctgttccaggacaagaattccagccaagtcctgggtgagaaggtcttggggattgtggtacagaacaccaaagtagccaacctcacggagcccgtggtgctcactttccagcaccagctacagccgaagaatgtgactctgcaatgtgtgttctgggttgaagaccccacattgagcagcccggggcattggagcagtgctgggtgtgagaccgtcaggagagaaacccaaacatcctgcttctgcaaccacttgacctactttgcagtgctgatggtctcctcggtggaggtggacgccgtgcacaagcactacctgagcctcctctcctacgtgggctgtgtcgtctctgccctggcctgccttgtcaccattgccgcctacctctgctccagggtgcccctgccgtgcaggaggaaacctcgggactacaccatcaaggtgcacatgaacctgctgctggccgtcttcctgctggacacgagcttcctgctcagcgagccggtggccctgacaggctctgaggctggctgccgagccagtgccatcttcctgcacttctccctgctcacctgcctttcctggatgggcctcgaggggtacaacctctaccgactcgtggtggaggtctttggcacctatgtccctggctacctactcaagctgagcgccatgggctggggcttccccatctttctggtgacgctggtggccctggtggatgtggacaactatggccccatcatcttggctgtgcataggactccagagggcgtcatctacccttccatgtgctggatccgggactccctggtcagctacatcaccaacctgggcctcttcagcctggtgtttctgttcaacatggccatgctagccaccatggtggtgcagatcctgcggctgcgcccccacacccaaaagtggtcacatgtgctgacactgctgggcctcagcctggtccttggcctgccctgggccttgatcttcttctcctttgcttctggcaccttccagcttgtcgtcctctaccttttcagcatcatcacctccttccaaggcttcctcatcttcatctggtactggtccatgcggctgcaggcccggggtggcccctcccctctgaagagcaactcagacagcgccaggctccccatcagctcgggcagcacctcgtccagccgcatctaggcctccagcccacctgcccatgtgatgaagcagagatgcggcctcgtcgcacactgcctgtggcccccgagcccggcccagccccaggccagtcagccgcagactttggaaagcccaacgaccatggagagatgggccgttgccatggtggacggactcccgggctgggcttttgaattggccttggggactactcggctctcactcagctcccacgggactcagaagtgcgccgccatgctgcctagggtactgtccccacatctgtcccaacccagctggaggcctggtctctccttacaacccctgggcccagccctcattgctgggggccaggccttggatcttgagggtctggcacatccttaatcctgtgcccctgcctgggacagaaatgtggctccagttgctctgtctctcgtggtcaccctgagggcactctgcatcctctgtcattttaacctcaggtggcacccagggcgaatggggcccagggcagaccttcagggccagagccctggcggaggagaggccctttgccaggagcacagcagcagctcgcctacctctgagcccaggccccctccctccctcagccccccagtcctccctccatcttccctggggttctcctcctctcccagggcctccttgctccttcgttcacagctgggggtccccgattccaatgctgttttatggggagtggtttccaggagctgcctggtgtctgctgtaaatgtttgtctactgcacaagcctcggcctgcccctgagccaggctcggtaccgatgcgtgggctgggctaggtccctctgtccatctgggcctttgtatgagctgcattgcccttgctcaccctgaccaagcacacgcctcagaggggccctcagcctctcctgaagccctcttgtggcaagaactgtggaccatgccagtcccgtctggtttccatcccaccactccaaggactgagactgacctcctctggtgacactggcctagggcctgacactctcctaagaggttctctccaagcccccaaatagctccaggcgccctcggccgcccatcatggttaattctgtccaacaaacacacacgggtagattgctggcctgttgtaggtggtagggacacagatgaccgaccgtactctgcagccacataagacggatgtgaaggagcgataccgaaccggacacaggcagggaacatcgtcggccggaatcagaaagtcgggggaacagggcacttcacgaaggcggcgtcaagacccatgagagataaacaacagcccgcacgacgtagaaaccacaaccggcgcgaaaaaaggcggcacggccaatannnnn

SEQ ID NO: 20018 - DNA, 2054 bp, Homo sapiens
  misc_feature 1, 2, 2038, 2039, 2040, 2041, 2042, 2043, 2044, 2045, 2046,2047, 2048, 2049, 2050, 2051, 2052, 2053, 2054: n = A,T,C or G
nncactgcgaagcggcttcttcagagcacgggctggaactggcaggcaccgcgagcccctagcacccgacaagctgagtgtgcaggacgagtccccaccacacccacaccacagccgctgaatgaggcttccaggcgtccgctcgcggcccgcagagccccgccgtgggtccgcctgctgaggcgcccccagccagtgcgcttacctgccagactgcgcgccatggggcaacccgggaacggcagcgccttcttgctggcacccaatagaagccatgcgccggaccacgacgtcacgcagcaaagggacgaggtgtgggtggtgggcatgggcatcgtcatgtctctcatcgtcctggccatcgtgtttggcaatgtgctggtcatcacagccattgccaagttcgagcgtctgcagacggtcaccaactacttcatcacttcactggcctgtgctgatctggtcatgggcctggcagtggtgccctttggggccgcccatattcttatgaaaatgtggacttttggcaacttctggtgcgagttttggacttccattgatgtgctgtgcgtcacggccagcattgagatcctgtgcgcgatcgcatggacaggtactttgccattacttcacctttcaagtaccagagcctgctgaccaagaataaggcccgggtgatcattctgatggtgtggattgtgtcaggccttacctccttcttgcccattcagatgcactggtaccgggccacccaccaggaagccatcaactgctatgccaatgagacctgctgtgacttcttcacgaaccaagcctatgccattgcctcttccatcgtgtccttctacgttcccctggtgatcatggtcttcgtctactccagggtctttcaggaggccaaaaggcagctccagaagattgacaaatctgagggccgcttccatgtccagaaccttagccaggtggagcaggatgggcggacggggcatggactccgcagatcttccaagttctgcttgaaggagcacaaagccctcaagacgttaggcatcatcatgggcactttcaccttctgctggctgcccttcttcatcgttaacattgtgcatgtgatccaggataacctcatccgtaaggaagtttacatcctcctaaattggataggctatgtcaattctggtttcaatccccttatctactgccggagcccagatttcaggattgccttccaggagcttctgtgcctgcgcaggtcttctttgaaggcctatgggaatggctactccagcaacggcaacacaggggagcagagtggatatcacgtggaacaggagaaagaaaataaactgctgtgtgaagacctcccaggcacggaagactttgtgggccatcaaggtactgtgcctagcgataacattgattcacaagggaggaattgtagtacaaatgactcactgctataaagcagtttttctacttttaaagacccccccccgcccaacagaacactaaacagactatttaacttgagggtaataaacttagaataaaattgtaaaattgtatagagatatgcagaaggaagggcatccttctgccttttttatttttttaagctgtaaaaagagagaaaacttatttgagtgattatttgttatttgtacagttcagttcctctttgcatggaatttgtaagtttatgtctaaagagctttagtcctagaggacctgagtctgctatattttcatgacttttccatgtatctacctcactattcaagtattaggggtaatatattgctgctggtaatttgtatctgaaggagattttccttcctacacccttggacttgaggattttgagtatctcggacctttcagctgtgaacatggactcttcccccactcctcttatttgctcacacggggtattttaggcagggatttgaggagcagcttcagttgttttcccgagcaaagtctaaagtttacagtaaataaattgtttgaccatgccttcaaaaaaaaaaagtcgacnnnnnnnnnnnnnnnnn

SEQ ID NO: 20019 - DNA, 1724 bp, Homo sapiens
  misc_feature 1, 1722, 1723, 1724: n = A,T,C or G
ngcgccgttaaacatcgtccggaattggaaaacccctgcgggcacgactgcgtaagcatggccgtagcgctgtcctgtgatcgagagtggggctaaacagtgaactaaccagggatagaactcgacatacctgactttactcacatatgaacttccactatcattgtacccatataacttctagcattttcatgccatggtaatccatgagctacacaatacgtagcccggcaccgtgatgcaagttcatggtatcgtgcatgtttcgtggtatcatggtatcattcatgcgtgtttgaatagttctacatctagtgcttcttgccaaaaagaatacattgtttaaattcacaaaattagcataattgcagtgctaatgaatatcggaatatgtgcacagtaacatttggactattcattggagagtttacccatacatttagcaaattgaatggccaaaacatttgactccagtgagggctcaagttagatccctatagaaagaggacacttcatcttacttaagtcatagttaagatctgtgatacgaaccatagatattgcctgacaaagcagaaatcaccaagtttcccccttttgaattaccaccaagaagtgttgaaacaccaaatagatatcatgttattttgggcatttgcagttttcttccctgctgcatgtaatgtctcagaatcaacattcttttaaaatctagactatattttgaggcaatgaattacttatattcaacttaggcttgttttgacattcagtagaactttaagttcaatctaaaggcttcagtccacatttttttatacgttgtattttaaaaacgtttgaaaggagtcttacacctgtatcatgaaaactgaatccttttgaaataccactatatgaagagagagatgaaatttagtgaacagaattgaaaaggtgctcataatttcactatgcaaacttaccccagtctctaaaaaagtaatttagatttaaagttctttgatgtatttgattttctaaatctttatggttatgatttggaataaaatgtgcctaatcctgtgttacattctgttcttaaatctgaatgccttctcatttaattctgaggaaatatcacacaagtgtcttcattgaccttgaagaaatgtatatacagttgccttataaaacaacataaatttagaccataacttttatagagaaagggttttgtcaaatgttttctgaaaatctgagtaattcaaagcatgcctctgcccctttaatatttttaataacctgcattgttgctgtctgccaaatattaaattgaaatcttcatttcaattttattatctggaaagggcactggattgctctgcaaccaaagaaagcaatatggaatgaaaaaaactcattcactttgtgtcttatttcttttaaggtgtatggcatgtaattgtgcatagagaaggtcctctggttagtctctcaaatgagggctgttagggaaccttattcagtggtggcacgcggtggttaacgttaaggaataagaacgcttaataccgaatgtttaaagtgcggtttgattcacaatacattttgcctcattctcgacaagaaacggctagccacttcagggtcccactgttttcttggaaagttttgtaaacacccgtcctttttagaaaaccggcgtgtcaacctttgcctcgtgttttttttaaccccaannn

SEQ ID NO: 20020 - DNA, 3473 bp, Homo sapiens
  misc_feature 1, 2, 3, 4, 5, 6, 3473: n = A,T,C or G
nnnnnngtctggtatgcctgttgggtcccccgtgttctcgccaggtggggccacccagcaccggggccaccccgttggtgccccttgggcgccctccatccccttgggcctgctctcaggcattcacctgggggcttctcacctggaaccttgaattcacctggcgatactttctaccccactggttgtgtgctttctttgtgggccctgctgcctgtctgggtggtggctcggccctgacggagagtccagcccacaaaggggaggtgttgttactcgggctgggagcctgttatcattgccatggccatcagcagtgtgggaggcctcatcttggacaagactgtctcagaccccaactttgctgggatggctgtcttcacgcctgtgattaatggtgttgggggcaatctggtggcagtgcaggccagccgcatctccaccttcctgcacatgaatggaatgcccggagagaactctgagcaagctcctcgccgctgtcccagtccttgtaccaccttcttcagccctgatgtgaattctcgctcagcccgggtcctcttcctcctcgtggtcccaggacacctggtgttcctctacaccatcagctgtatgcagggcgggcacaccaccctcacactcatcttcatcatcttctatatgacagctgcactgctccaggtgctgattctcctgtacatcgcagactggatggtgcactggatgtggggccggggcctggacccggacaacttctccatcccatacttgactgctctgggggacctgcttggcactgggctcctagcactcagcttccatgttctctggctcataggggaccgagacacggatgtcggggactagcttggtcactcaacattttccccatccctctgcactttctatttgaaatttttcttttgttcccctgtccctcctccaccccacactcccacctctttctaggacttcactttgataccaaattctcattattttcaatgggaatttttatacattgagccaagtttgtatagcaagaatttgggaaacacagatggcctgagataagcagtacaagtaggtttttgagacaatcaccaagtgcagtttcatggtgggtgcctccaggtgatgtggactggagcaggggagttttgtctggaatctggggacatggggtttggctttagcaacctgtcttggccctaatgagaaaccctttgtaagtgggctctggatttttggttttgttttctttttatctgttttgttttatttttggttttggttgaacagagggacagaagaataagtaacactcccaaacacagacatacttttgtagaagtggaccaacttcaaagctctggacaggagacacctgctccaggcccctgtgatcccagttctgttctcttgccctctggacctaagcgttcccactcgcagaaagagtaaggtggactgacttttcaatttgtgcacatgcctcttgttcaatggcctggtcaacatcaacaacccctccctctgatcatttccagttgattgtcatatccaggaaaaaatggaacagtgcactcttctccctgttgacccatgtccacctattggttccccaaaatccacattctccctgggcccagatgactttgtctccctgggcccagattctttgtctctcttcaaccttcatctcaaattgtctctaagcactaccttccccagagcttgccaggttgggttttgagattagggtcaggtcatgggtatgtggagaatggtttggaggttgaggacaaccacaggtgtctcattgctgccatttctcctgaggacataatcacttggtcaccttggaccctgtcacttcctaaaattactcgttctgtcatgccatagaggtcagttttcctctttcttggcttctacccacaaacattcaccaatcatttattcgttcatttagcaaatatgcagcctccgcaagatgagctctcctgcagacaagcatggtctgaaacattctttgagcaatatttattgagtgcctactatgtgttaggtactgtgccaggcactgataagccagtggtaagggaaacacagctctaacctcacctcattctccaggttacaaaggccatgtgcccctttgaatctggcagagaaagtttcctcgttgtaagtatttgcatctacttcaagccagattcttctgcctctttctcctttccagacccctactctgtgcagtgctgaccacagctagagccaccgccccattgctcaaccagtatttatttccctaaacgacccttcctcatattcccttccctccacctctccttaccaagcacccaaaagaggatttagaactagcagggtggacatcatctggttgtttctacttttctctgcctagcacaaaattgggagaaaactggagcctccatccgcagtcacacgtgtacagatctggggatttggatgtaggctttttctaacttctctctcagaagcttctacagaaacccttccatctgtagcctcaagggcccacctccaagggaaggcttaggcaatgatcctgtttctaccaacactgcaccttatcccaggaacctgccctagacctccagagaccatattttctctccctccatttctacccagacctccaggcctccttctggaatcatagaaccgtagaattggaaggaattttagaggttttctagttggagttgtgtccaacagaattcattaacaccagcctgggcttgtttttcctcctccctctggacttttttcatcttttcctccacctcaaaaaatacttacacacagattcttcttgtacaggcatcaaaaccaactcctctgcccctaaggctgtgtccctgtggtctccagccacccctaccccagtcactcgccccttcctcatctctggaatttggccaggcagtcccagaagactctggagtgacctcctttgcctaaaaagcagacagataggcatgccccaggccctgagtgagcagaggaggactgtagggtgagagggaaagaaaatgaaggtgactttcatggaagtttcatttcttttccccgattgtaccaactgcatgtacttttggcctggctgcaaggagcaatattggtttactctcgtatccttaaaaagttacagaactgtgtcttaagagaattatttatagttactataactgaattgacaaatgtcaacttaactgataaattatatttggtaaaataaagaggacgttgaaaaacaaaagggggggtaagatcccgggggcgaattagcgtcccgttttgttaagggccaggggtaaaagaggggggggtaaagggggaaggggttggggcctttggggtaggagcccgagggaaaattgaacttcggatgtagaataaatctaatgatagcacagactacn

SEQ ID NO: 20021 - DNA, 2440 bp, Homo sapiens
  misc_feature 1, 2, 2437, 2438, 2439, 2440: n = A,T,C or G
nncgaccccgcgtccggccaggccagccggcgccattttgaaagtggagtcgcctgcccctgccgctgccgccgccgccgtcgctgtcgtagtcgccgccgccgctgccggagaaagagcacgagcggggaagccccagagtgaaatctagcatcctgccggctggtctgcccgcccctccttccttttccccccggcccccgtcccctccccccgcaggtgccatccgccgccatccgccctctctacccccccatccccaggtgaggggggtgagttcaggaagcggagaccccgaggaacccagcagggtcaccatttgcagcgcaacatggcaggagctggaggagggaatgatattcagtggtgtttttctcaggtgaaaggagcagtagatgatgatgtagcagaagcagatataatttctacagtagaatttaatcattctggagaattactagcaacaggagataaaggtggtagagttgtcatctttcaacaggagcaggagaacaaaatccagtctcatagcagaggagaatataatgtttacagcaccttccagagccatgaaccagagtttgactacttgaaaagtttagaaatagaagaaaagatcaacaaaattaggtggttaccccagaaaaatgctgctcagtttttattgtctaccaatgataaaacaataaaattatggaaaatcagtgaaagggacaaaagaccagaagggtataacttgaaagaggaggatggaaggtatagagatcctactacagttactacactacgagtgccagtctttaggcctatggatctaatggttgaggccagtccacgaagaatatttgccaatgctcatacatatcacatcaactcaatttctattaatagtgattatgaaacatatttatctgcagatgatttgcggattaatctttggcatctggaaattacagacaggagttttaacattgtggatatcaagcctgccaatatggaagagctaacagaggtgattacagcagcagaatttcatccaaacagctgtaacacatttgtatacagcagcagtaaaggaactattcggctatgtgacatgagggcatctgccctctgtgatagacattctaaattgtttgaagaacctgaagatcccagtaacaggtcatttttttccgaaatcatctcctctatttcggatgtaaaattcagccatagtggtcgatatatgatgactagagactatttgtcagtcaaaatttgggacttaaatatggaaaacaggcctgtggaaacataccaggtgcatgaatacctcagaagtaaactctgttcactgtatgaaaatgactgcatatttgacaaatttgaatgttgttggaatggatctgacagtgttgtcatgactggatcttacaataatttcttcagaatgtttgacagaaacacaaagcgagacataaccctagaagcatcgcgggaaaacaataagcctcgcacagttctgaagcctcgcaaagtctgtgcaagtggcaagcgaaagaaagatgaaataagtgttgacagcctagacttcaataagaaaatccttcacacagcctggcaccccaaggaaaatatcattgccgtagctactacaaacaatctgtatatatttcaagacaaagtgaattagggttggcattcctagcagaagaacccacttcctgcttagttgagatagttgaatctagcattcgttcctataaaagagagaggtccattgtggcgcccctttccagtgtttgacagtgtgccattcgacaacacattgttatagctacatggagaaagctctgtggattcatcactgtggtgttctccatgtctgctagccatttaggtaagggtagggcacttttaatttaaatgacttcttgcaccatcttgcctaatggactagattggactgtatcaacattgatttactccactttttatgccttccattgtgatgacgtcaaacacagtgaaagccttcagtcatgctatgggatttaattgtgtatcctcattactgtatcatttgtggggtacaccccttccccctttttttaaattaaatacagctcattcttactgtggcttgtagcattcctcctcttctggcctcctggactgctccccttcatctcttacccttgccccctccacccggtcttggtggtggtatattaaaaaaagaaagaatgaaagcacacaaaatgagtcagtttggggtcagtggtataaagggggtatatgttgcaaacaaatgttttagtaacagttggctgtaatcactcctcgccgtgtctggcactgaaaataaggaaaaaaaacctactactgaataaaagtgacaaagaatggaaaaaatgccagcacttggcggccgttatagtggaccgagtcggannnn

SEQ ID NO: 20022 - DNA, 1242 bp, Homo sapiens
  misc_feature 1, 1239, 1240, 1241, 1242: n = A,T,C or G
nccacccgtccggccggccagcgtcatcaccatcgtcaagtccaccccgggctcggggtctggccccgcccacggcccggaccccgcccacggcccggcctcctgctcctagtgcccgcccccgccatgcctcagccacgcccctccggcctcagctccctccccaaagtgcccgagcgccgcctctgggcccaggtcccatttctctgcagcaactggccttccgaaactaaaagagtgggtgggaagactagtgaaacccaggtcacggatggggaaacaggcctgaggtcacatttcacttagtggttgtgttgggaccaaaacctgggtgtcctcactgctgccctgagtccagccatggttttcagggggacagtggacagggactcagaaatgtggtgggagggcctccctggcttgggagaccgctctctgcaagggagggggagagaagcagagggagagagaaggtgacacggatggaagagtgggaaggagctggcctggctcagccctaggctgtccctgcagccaggtgtccgggggctggccagtcagagaaagggggccatggactgctgtggcaaatagggagacaaggagacagaccctgcagtcctactacagtctggagtggggtcctaagaagaagggtcccacctcaacccctgtcagtgtccactgtggggtgggggctgacccctgctttgattgtcattctcctgggaagccagtctcagtcctcccccaacactgtccacactgccctcccactgtttatttattgcacggatctaagttattctccccagcagagcccgagctcctgtccctgggaaaagtggggtatgggcctgagctgggcttatattttatatctggaaataatcaccttttatcttattttagggaaaggcgaaagaacagaattgttaagcgggcggggggctcacattgtatcccaggccttggggaagtcaaggggggatcgctgagtccggattgagaccgctggaatggaccccgttttaaaaattcaaattgccgcgtggggcatgcggggccgattgaggggggagagagctataccaggaggtttgcagaatcaccacgcgccccggggattaatgtgcaaaagaaaatgcgcagaattttcgaacacaagagtgtgtttgtaagacgttcccaggtgtaaagggaggcggcctgtatagtggtgcgaacagtaagatcaannnn

SEQ ID NO: 20023 - DNA, 2753 bp, Homo sapiens
  misc_feature 1, 2, 3, 2751, 2752, 2753: n = A,T,C or G
nnnaccacagtctccatgccacgaagcaggaagggagatgcagcatcccagtttttggtcttctgtcaaaaacacagggatgaggtggtagctgagcacccagatgcttcaggtgaggagattgaagagctgctcaggtcacagtggagtctgctgagtgagaagcagagagcacgctacaacaccaagtttgccctggtggcccctgtccaggctgaagaagactctggtaatgtaaatgggaaaaaaagaaaccacacaaagaggatacaggaccctacagaagatgctgaagctgaggacacacccaggaaaagactcaggacggacaagcacagtcttcggaagagagacacaatcactgacaaaacggccagaacaagctcttacaaggccatggaggcagcctcctcgctcaagagccaggcagcaacgaaaaatctgtctgatgcatgtaaaccactgaagaagcgaaatcgggcttccacggcagcatcttcagctcttgggtttagcaaaagttcatctccttctgcatccttaactgagaatgaggtctcggacagcccgggagacgagccctcggagtccccatacgaaagtgcagacgaaacacaaactgaagtatctgtctcatccaaaaagtctgagcgaggagtgactgccaaaaaggagtatgtgtgccagctgtgtgagaagccgggcagcctcctgctctgtgaaggaccctgctgcggagctttccacctcgcctgccttgggctttcccggaggccagaagggaggttcacctgcagcgagtgtgcctcagggattcactcatgtttcgtgtgtaaagagagcaagacagatgttaagcgctgtgtggtaactcagtgtggaaaattttaccatgaggcttgtgtgaaaaaataccctctgactgtatttgagagccgaggtttccgctgccccctccacagctgtgtgagctgccatgcttccaacccttcaaacccaaggccgtcaaaaggtaaaatgatgcggtgtgtccgctgccccgttgcctatcacagcggggatgcttgtctggcagcaggatgctcagtgatcgcctccaacagcatcatctgcactgcccacttcactgctcggaaggggaagcgacaccacgcccacgtcaacgtgagctggtgcttcgtgtgctccaaaggggggagccttctgtgctgtgagtcctgcccagcggccttccaccctgactgcctgaacatcgagatgcctgacggcagctggttctgcaatgactgcagggctgggaagaagctgcacttccaggatatcatttgggtgaaacttgggaactacagatggtggccggcagaagtttgccatcccaaaaatgttcccccaaatattcagaaaatgaagcacgagattggagaattccctgtgtttttctttgggtctaaagattattactggacgcatcaggcgcgagtgttcccgtacatggagggggaccggggcagccgctaccagggggtcagagggatcggaagagtcttcaaaaacgcactgcaagaagctgaagctcgttttcgtgaaattaagcttcagagggaagcccgagaaacacaggagagcgagcgcaagcccccaccatacaagcacatcaaggtgaataagccttacgggaaagtccagatctacacagcggatatttcagaaatccctaagtgcaactgcaagcccacagatgagaatccttgtggctttgattcggagtgtctgaacaggatgctgatgtttgagtgccacccgcaggtgtgtcccgcgggcgagttctgccagaaccagtgcttcaccaagcgccagtacccagagaccaagatcatcaagacagatggcaaagggtggggcctggtcgccaagagggacatcagaaagggagaatttgttaacgagtacgttggggagctgatcgacgaggaggagtgcatggcgagaatcaagcacgcacacgagaacgacatcacccacttctacatgctcactatagacaaggaccgtataatagacgctggccccaaaggaaactactctcgatttatgaatcacagctgccagcccaactgtgagaccctcaagtggacagtgaatggggacactcgtgtgggcctgtttgccgtctgtgacattcctgcagggacggagctgacttttaactacaacctcgattgtctgggcaatgaaaaaacggtctgccggtgtggagcctccaattgcagtggattcctcggggatagaccaaagacctcgacgaccctttcatcagaggaaaagggcaaaaagaccaagaagaaaacgaggcggcgcagagcaaaaggggaagggaagaggcagtcagaggacgagtgcttccgctgcggtgatggcgggcagctggtgctgtgtgaccgcaagttctgcaccaaggcctaccacctgtcctgcctgggccttggcaagcggccttcgggaagtgggaatgtccttggcatcattgtgacgtgtgtggcaaccttcgacttcatttggcactctggcccatcgtctgtaggcaccaggagggcgctggttgtcccgagggggctctgtggagctgataggcggtcgcacccagaggagccccacgaccgggaggggcggggggcaacggaacggggcctttaaaaagggtgcagtttccctaaaaaaagggcgcggcccgttctgcctgcttgacggtannn

SEQ ID NO: 20024 - DNA, 2535 bp, Homo sapiens
  misc_feature 2436, 2483, 2494, 2504, 2513, 2526: n = A,T,C or G
gaggatcctgtgtgtgattgccattgacaggtacgagccctgtatcaagcctcttttcaactcgtgtgactccttcaaggatggcaagctttctaacaatgagtggtgctactgcttccagaagcctggagtaacagcatatggaacaattccactcccaggtctcccttgccagaatgaaatgaacagaattcagaagctgagtaaggggaaaagcctgttgggggccttcatacctcggtgtaatgaggagggctattacaaagccacacagtgccacggcagcacggggcagtgctggtgtgtggacaaatatgggaatgagttggctggctccaggaaacagggtgctgtgagctgtgaagaggagcaggaaacctcaggggattttggcagtggtgggtccgtggtcctgctggatgacctagaatatgaacgggagctgggaccaaaggacaaagaggggaagctgagggtgcacacccgagccgtgacagaggatgatgaggatgaggatgatgacaaagaggatgaggtcgggtacatatggtagtgcccacaagaaagaggacacaagttttgcacaaaattgcaagtcacttcctattcctgcatttgtatctaagactccaaggcaccaaggtctcttctccattgttgctctctatacccgacctaaggtttggaagacaactgcttgttcccagaggattctgattttgcatatgtttgtatgggagaaagggtgttgtgtttttttttttgttgttgtttattttttggatagggaagtcattggcttaattagagcctccttcctttctgtgagatttttccaacaagcatgtgatttacgtggaattctgacagtgcagggagccccaaccctcttaaatgtcaaagaccctttttgattacccacactggtggttattacagcatggttcccagccttacagtgtctaagtgcttctcttgtgtcctgtagatgttgtgaaaaagaaaaaaacaaaaaatacaccacactgtactttttccccccccccccgttactgccggtgattattattaaaaattagtttttttcacatcattatatctggcttcctataaacaacagccttaattcagtcaagactccctttggggaattcattttattaaaaattggtgtctggatacttccctgtacatgcataaatatgcatgcatgtacagaaagactgtatgtgtgtgccttgcacacacacccatacctctcagaaaaagtgggtatcttaaaaactcgaaaaacaatgataaatttctcagcttgtccagacctggaacaaaatttctggaataagaaatttgtattaaagtccttttttgcactaacagttggctcttgtagcctgcaggctgaggaagtctcttctctgtgcatcagcagagttactgaaagcctctgattgagaaaaaacctccgtctgcctaaatcacttttctcgcagaagccatgcgactcccacacgacacgggcagcttcacaagccatctctttcatttctgcttgaagcccccttggctgcagcaatcctgtctgccataggtttcttccttccttacctactcaagggctttttctaaggcatgcacacatatctcctgttctctgagagtaccatggtgttccttaaaagaagaaaatttctaattctgaactcaatgttttgcttttactccctttctactgacaaatcatgataagggcacaaaagctgtacagatttttttttttaaccactcaatcccaaatggaggcctacaaagaacatcgtaataacacatggaagcaaaccctgggtttttaagagcaaattctgtcccccctcactcccccaagtgacaagatactaatgaagaaagttcttcaccatagtgtttgttttaactaaactcattggagtctagttccaaatttggtagggtcatcatctctacattccttaggatttctctccctatcaagctggcccagatacaagtaccaaacagtagtctctgaagttcccccatttccttcagtaccagtctataagctactgtccgccactgattttcatctatcagggtgtcctaatcagaatcagccacccaagcaagcctctctggcccacatatctatctcttgccttcccccatgaacttcagcctgtccacacaaaagccacataaactcaagcaagaaatatgttcagccaaaacatgattatagtggcagctgaccaatcccccatcccaaattgaccatttagatgtaccaactcaccttaaattagcatgttccaatccagtcgggcattgcctggaatacagtaggcatcatacctatagttgggtcttaggataaggaaatggaacttacttggatataggcaaagtcctttgggcttnggtaaattaaccctgggggttttgttacttacttttccccttggggnggacaggaccntggggcaaantttgttttngggggtcttcaantccattcac

SEQ ID NO: 20025 - DNA, 2296 bp, Homo sapiens
  misc_feature 2075, 2154, 2191, 2249, 2260, 2272: n = A,T,C or G
ggtccggaattcccgggtcgagccccccccccccccctcacttccctggagccgcccgcttgcccgtcggtcgctagctcgctcggtgcgcgtcgtcccgctccatggcgctcttcgtgcggctgctggctctcgccctggctctggccctgggccccgccgcgaccctggcgggtcccgccaagtcgccctaccagctggtgctgcagcacagcaggctccggggccgccagcacggccccaacgtgtgtgctgtgcagaaggttattggcactaataggaagtacttcaccaactgcaagcagtggtaccaaaggaaaatctgtggcaaatcaacagtcatcagctacgagtgctgtcctggatatgaaaaggtccctggggagaagggctgtccagcagccctaccactctcaaacctttacgagaccctgggagtcgttggatccaccaccactcagctgtacacggaccgcacggagaagctgaggcctgagatggaggggcccggcagcttcaccatcttcgcccctagcaacgaggcctgggcctccttgccagctgtgagatgacctccgtctgcccgggggactcttatggggaactgccttacttccccgaggggtgggcatgatgaatgggagcctgcagtcatttcctactgtttcaggaagctttctccttaaccccttagaaaaggctgtggaacttgagctaaaatatgtcttaccaggttgcgtctaatgccccccgttccctactgggcagaaagacttgggtgcttcctgaggagggatccttggcagaagagaggcctgggctcacgagggctgagaacatgtttcccagagtggcaaggacccatctcttaaacacagagtctgcagcccctaactgacaccctgtccttcctcctaggaagtgctggactccctggtcagcaatgtcaacattgagctgctcaatgccctccgctaccatatggtgggcaggcgagtcctgactgatgagctgaaacacggcatgaccctcacctctatgtaccagaattccaacatccagatccaccactatcctaatgggattgtaactgtgaactgtgcccggctgctgaaagccgaccaccatgcaaccaacggggtggtgcacctcatcgataaggtcatctccaccatcaccaacaacatccagcagatcattgagatcgaggacacctttgagacccttcgggctgctgtggctgcatcagggctcaacacgatgcttgaaggtaacggccagtacacgcttttggccccgaccaatgaggccttcgagaagatccctagtgagactttgaaccgtatcctgggcgacccagaagccctgagagacctgctgaacaaccacatcttgaagtcagctatgtgtgctgaagccatcgttgcggggctgtctgtggagaccctggagggcacgacactggaggtgggctgcagcggggacatgctcactatcaacgggaaggcgatcatctccaataaagacatcctagccaccaacggggtgatccactacattgatgagctactcatcccagactcagccaagacactatttgaattggctgcagagtctgatgtgtccacagccattgaccttttcagacaagccggcctcggcaatcatctctctgggaagtgaggcggttgaccctcctggctcccctgaattctgtattcaaagatgggaacccctccaattgatgcccatacaaggaatttgcttcggaaccacataattaaagaccagctggcctctaagtatctgtaccatggacagaccctggaaactctgggcggcaacgcggcccacgacaagagggggaggtacgggaccctgttcacgatggaccgggtgctgacccccccaatggggactgtcatggatgtcctgaagggagacaatcgctttagcatgctggtagctgccatccagtctgcaggactgacggagaccctcaaccgggaaggagtctacacagtcttcgctcccacaaatgaagccttccgatccctgccaccaagagaacggancagactcttgggagatgccaaggaacttgccaacatcctgaaataccacattggtgatggaaatcctggttatcggagnatcggggccctggtgctgctaaagtctctccaaggtnacaagctgggaagtcagctttgaaaaacaatgtggtgagtgttcaacaaggagcctgnttgccgagccntgacatcatggncacaaatggcgttggtccatgtca

SEQ ID NO: 20026 - DNA, 2528 bp, Homo sapiens
  misc_feature 1, 2, 2517, 2518, 2519, 2520, 2521, 2522, 2523, 2524, 2525,2526, 2527, 2528: n = A,T,C or G
nnagaccacccacgcgtccgcgctcggggccttttcaaatcgggatccgttaccgcttccccggcagccgccattgtcgcgctcggagcccctcagctcaggcggccgaggcggaggcagcggcggcgggatggcggacgccaacaaggccgaggtgcccggggccactggtggcgacagcccgcacctgcagcccgcagagccgccgggcgagccgcggcgagagccgcaccccgcggaggcggagaagcagcagccgcagcacagcagcagctccaatggcgttaaaatggagaatgatgaatcagcaaaagaagagaaatctgacttaaaggaaaaatctacaggaagtaagaaggccaatagatttcatccttattcaaaagacaagaattcgggcactggagaaaagaagggtccaaatcgtaacagagttttcattagcaacatcccatatgacatgaaatggcaagctattaaagatctaatgagagagaaagttggtgaggttacatacgtggagctctttaaggatgcggaaggaaaatcaaggggttgtggtgtggttgaattcaaagatgaagaatttgtaaagaaagccctagaaactatgaacaaatatgatcttagtggaagaccccttaatattaaagaggatcctgatggagaaaatgctcgtagggcattgcagcgaacaggaggatcatttccaggaggacacgtccctgatatgggatcagggttgatgaatttaccaccttccatactcaataatccaaacattcctcctgaagtcatcagtaatttgcaggccggtagacttggttccacaatttttgttgccaatcttgacttcaaagttggttggaagaagctaaaggaagtgttcagcatagctggaactgtgaagcgggcagatataaagaagacaaagatggcaagagcagaggaatgggcactgtcacttttgagcaagcaattgaagcagttcaagcaatttctatgttcaatgggcagtttttatttgatagacctatgcatgtgaaaatggatgacaagtctgttcctcatgaagagtaccgttcacatgatggtaaaacaccacaattaccacgtggtcttggaggcattgggatgggacttggtccgggtggacagcctattagtgccagccagttgaacataggtggagtaatgggaaatttaggtccaggtggtatgggaatggatggtccaggttttggaggaatgaatagaattggaggaggaatagggtttggtggtctggaagcaatgaatagcatgggaggatttggaggagttggccgaatgggagagctgtaccgtggtgcgatgactagtagcatggagcgagatttcggacatcgtgatattggattaagtcgaggctttggcgattcctttggtagacttggcagtgcaatgattggagggattacaggaagaataggatcttctaacatgggtccagtaggatctggaataagtggtggaatgggtagcatgaacagtgtgactggaggaatggggatgggactggaccggatgagttccagctttgatagaatgggaccaggtataggagctatactggaaaggagcatcgatatggatcgaggatttttatcgggtccaatgggaagcggaatgagagagagaataggctccaaaggcaaccagatatttgtcagaaatctaccttttgacttgacttggcagaaactaaaagagaaattcagtcagtgtggtcatgtaatgtttgcagaaataaaaatggagaatggaaagtcaaaaggctgtggaacagtcagatttgactccccagaatcagctgaaaaagcctgcagaataatgaatggcataaaaatcagtggcagagaaattgatgttcgcttggatcgtaatgcataatttcaagccatggttggaacattcctacatctgttttgctgaatctcctagtaaaagtcatttttttaaagtaatattgtatgcttacaaaagctgtaaaaatgaacttttaaaactcccaccagcttttaacagtataatgttaaaaatatactgtaatttttgttaatctcaagtttgggtttttaaagacagcaagtctggtcattcagtttaaatgaatggttatactgtttttaatgaaataagccattttcttgttgttttcagtactacatagttggatttgtttgttctagtttatccagttattgtcaacttattgtatggtaaaacatagattttttccccccaaacttctgttttataatatgttaattttcatgaagaacagggctcgaaaaattggaggtgaatggggggtaaagataaggactatgaattaggtcggatttaaagtggatatgagaaaggtttaggacccgaaaacattgggaaaaataaataaccgagcgttaatatcagataagaataggagtagggcagtaaggattatgtgcggacaaaaaaggagaattgtgatannnnnnnnnnnn

SEQ ID NO: 20027 - DNA, 2066 bp, Homo sapiens
  misc_feature 1, 2, 3, 1959, 1962, 2065, 2066: n = A,T,C or G
nnncgaacatcaagtatatgaggggttgcgtaaaaattatttttctcttgctgtactacaaagagatagaatcaaactgcttttttttcgacatactggtttttctttctgtttttcttctctttcttctatttcttgtggatattatggctaataacacaacaagtttagggagtccatggccagaaaacttttgggaggaccttatcatgtccttcactgtatccatggcaatcgggctggtacttggaggatttatttgggctgtgttcatttgtctgtctcgaagaagaagagccagtgctcccatctcacagtggagttcaagcaggagatctaggtcttcttacacccacggcctcaacagaactggattttaccgccacagtggctgtgaacgtcgaagcaacctcagcctggccagtctcaccttccagcgacaagcttccctggaacaagcaaattcctttccaagaaaatcaagtttcagagcttctactttccatccctttctgcaatgtccaccacttcctgtggaaactgagagtcagctggtgactctcccttcttccaatatctctcccaccatcagcacttcccacagtctgagccgtcctgactactggtccagtaacagtcttcgagtgggcctttcaacaccgcccccacctgcctatgagtccatcatcaaggcattcccagattcctgagtagggtggcttttggtttttgtttctttcttgtcttgtcttttattgaaaggaaatcaaaaataggctaaacagaattttgagggcatggcccaaataactcatgagttccaagttgaaacatggttgtgcaagttggacattacaatgtaaaacacattttcttcaaacacgttttcccttttgtttcaaaaaatgtaatattttcccccaagcgttttatatttatgtattttgtattcaatgtgaggcttattaaaaatagtgattctaatgtaagaatcagctaagatgcattatatatattttaattaaaattaaaacttcagatatttgtggattacaatcctcatttacttccaatgtgactaaaaagagaaaaaaaatcactgtgtcactttaaagaaaaatcttctaagggatttggattttactttctttagaatgacaagtgaatcatattgacattttacaatcttagatttttctttttttttcttttgagacagggtcttgatccgtcgcccaggcgggagttgcagtagcatgatcaggactcactgcagcctctatctcccaggctcaagtaatcctcccatcttagtgccccaagtagctgggactacaggggtgcactaccacaccgggttgaattttttttgaattttagtagagatgaagtgtcactatgttaccaaggctggtctcaaactcctaaactcagatgatcctcctgcctcggcctcccaaagtgctggaattagcctggccaatcttggatttttaatggaatatgtgggcacaaaatgacagaacataggacattctaaagttccttgatttgatcattataagaagtgtgggactcaagcacaggaaactgaactcttttggtgtcattggatgtttcatttttgacactaattttttctggacaaactctttatgtgtttttcccaagaatagttatctacttcctggaggcaaaatccttggatttactaacatgatgatttaccttttcttcaccgttgtcgttacattgttagaaaagcaacaggaaaaaatccaattcatttgacctaaaaacaagcctcaagtttaaaaccaagctcacgtttttcttaagggaaaaattttctttcttaaacttacatctagcaacttggaaagcactttctctggggatcttcttttgtaactttgcagacaaataatatatcggggaaaaaaagaattagggtttatnganattaaattttgcccatgaaagaattctccttcctggattgactcttaatcatcaggcatcatcctgtttttgcttctctacgaatctcaattcccacttctcnn

SEQ ID NO: 20028 - DNA, 1698 bp, Homo sapiens
  misc_feature 1, 2, 3, 4, 5, 6, 7, 1691, 1692, 1693, 1694, 1695, 1696,1697, 1698: n = A,T,C or G
nnnnnnncccaggaatggaatccgatgatggctgaatgaacttgagacgcttcagcaaaggcagcatggtcacggagttcaagggaatagatgagtaagcaacgtgtcaaatttgggatgaaaagactgccaaactatggctgaccaaggtttttaaattcagaagagcaattctaaatctaaagaaatgtatcattgaaagtaattacgttacattgaaacctgctgctgctgtgactgtgaggagggtgggagtgtggatggggaggaaggttctaggctcgtcttcttatttttctcatttcccaatgcctctctgtgggagagctccatgccagttttcaccacgctcaggcaaatactctgcagctgttattggatgggccattccgatctgccttatgaaattccacaagaatgttaggggcacctatgggatctctagtggggtgggcagggtgctgatggggacgctggccgcagggaggaaggaacatctcgggagggccctctgttcctctcccacggcagatgccctcctctgtatgcaaatcagcacagcctttattgagctttacaactaacaacctgatagttggcagttaattcacagttacagataatgcttttatttacataaatataccaagtagtaccctcttattgtattcacttcatctattttcttagaatacttgcaattactaatgaccccttccctttccctcctgctgccctgtccaccctctttccccttctaacatccttagagggatgaaatctcagcatatgttgcaggacaccaaaaggaagaaaacaatcaagcaaataaaataaacagtcaaacaaaccaggagtttaaaacaacaaccccaacaacagaagccttggcaaagaggaatgagtgatcagcaagtgaacacactctatgtcaactctccttttatccagctgagatttatggtaacttatttaattaatggtcctgtctgatgcatccttgatggcaagcttcaaatctgatttggtatcaccgaggaaaccttgcccccatcactcagcattgcacttagatacagaatgagttagataaacttggcttgtctagagacccatgacatcttaacctaaagggaaatcttattgcgttatcataaaattgatgatatcttagggtcagaattgcccttttttttttattttgaatgggaagttctcactaaaacaatcctgagatttcttaatttcatggttctttaaatattataaacacagagtcaacatagaatgaaattgtatttgttaaaatacacacattggaggacaagagcagatgactacttttcgaagtaatgctgctccttcctaaaagtctgttttcaatcctggtaatattaggggcactggcggcaccttaagaaagcccttaaaattgagagcctaaatccaaatctagaagagccgatggtgtccagcattccggctcctcgcatatctggtgttgtccgatttgcggttgtgtggcgtgtaacgtgtgcccctgtttggtgggccagtttccaggctgtagaaataagcttgggtccatttgaggaagactcactcctgaaaattgcgctgtgctttaacattggtagcgatcttaaaaggctcattctaaaatgttcgctccaaacacaacaaaaaaaaannnnnnnn

SEQ ID NO: 20029 - DNA, 10668 bp, Homo sapiens
  misc_feature 10556, 10593, 10616, 10641, 10668: n = A,T,C or G
acgcgggggagtgcagctggcaccatgggtgtgctccagagcaacttctgcttgctctgagccccctgccctgcctcccctttcaccatgtttcctctgacaagattttaagtacagcaattcaagaagatttctcctcctaaacgacatttatctgaagtctattgcctcttgattgctggaaaagaatcttaaaatcatttcaaaagtaacttataaacaaacttattaaaagtgatgaaaggagcattgaaattaattagcactaatttttcactgtgccaaagtgtgcagtgtccttcagaggaaacaataacagatctggtgagtgtgccatgccagtggggagaattgaatgtccctcatctccctctttccctagggacattagtcatgagtgccgagtgtgcggggtcacagaagtgggtctttctgcatatgcaaagcacatttctggccagttgcacaaagataacgttgatgcccaggaaagagaagatgatggaaaaggagaggaagaggaagaagattattttgacaaggaactcattcagttaataaaacaaaggaaagaacaaagtcgacaagatgaaccttccaatagcaaccaagaaataaactctgatgacagacgaccccaatggagacgagaagaccgaattccttaccaagacagagagagttacagtcagcctgcatggcatcatcgtggacctccacagcgggattggaaatgggaaaaagatggctttaataatactaggaaaaacagctttccacattctttgaggaatggtggtggaccaagaggacgttccgggtggcataagggtgttgcaggaggctcctcgacttggtttcacaaccatagtaattctggaggtggttggctttcaaatagtggagcagtagattggaatcataatggtacaggaaggaattccagttggctttctgaaggaacaggtggcttttccagttggcatatgaacaacagtaacggaaactggaaatccagtgtacgtagtacaaataattggaattacagtggccctggagacaaatttcaaccaggcagaaacagaaattctaactgtcaaatggaagacatgactatgctatggaacaagaaatctaataagtcaaacaaatacagtcacgacagatataattggcagcggcaagaaaatgacaaacttggtacagttgccacatatagaggtccttctgaaggatttacaagtgataaatttccttcagaaggcttactcgacttcaattttgagcagctggaaagccaaaccactaaacaagcagacactgctacttccaaagttagtggaaagaatggcagtgcggcaagggaaaagcctcgtcgctggacgccttacccttctcagaagactctggatttacagtcgggattgaaagacatcactggtaacaagtcagaaatgatagagaaacctctctttgattttagcttgataactacaggaatacaggagccccaaactgatgaaacacgtaattccccaacacagaaaacacaaaaagaaatacatactggatctcttaatcacaaggcctcttctgattccgctgcttccttcgaggtggtgagacagtgccccactgcagaaaaacctgaacaagagcatacaccaaataaaatgccatcattgaaatccccactccttccatgtccagccactaaatcattgtctcaaaagcaagatccaaagaatatctcaaaaaacaccaaaacaaattttttttcccctggagaacactcaaatccctcgaacaagcccactgtggaagataaccatggtccttacatatccaaactgcgtagttcatgtcctcatgttttaaaagggaataaaagtacatttggctctcaaaagcaatctggtgataatttaaatgatactttacgaaaggccaaagaggtgctacagtgtcatgagtcattgcaaaatccacttcttagcacttctaaaagtaccaggaactatgcaaaagcaagtagaaatgtagaagaatctgaaaaagggtctttgaaaattgagtttcaagtgcacgcactagaagatgaaagtgatggagagacatctgacacggaaaagcatggaacaaaaattggaaccctaggttctgcaactacagaattgttatctggcagcactcgaactgctgatgagaaagaggaggatgaccgcatcctgaagacttctagagagctatccacttccccatgtaatcccatagttcgccagaaagaatctgaattacaaatgacatctgcagccagtccacaccctggcttattgctagacttgaaaacctctctagaagatgcacaggttgatgactctattaaatctcatgtatcttatgaaacagaaggctttgagagtgctagcttggatgcagagcttcaaaaaagtgacatcagtcagccctcgggccctctcctgcctgaactaagtaagcttggctttcctgcctcacttcagagggatctaacccggcacattagtttgaagagcaaaactggagtacaccttcctgagccaaacctcaatagtgcccgccgcattcgcaatattagcggtcaccgaaagagtgagacagagaaggagtctgggctcaagccaaccctacggcagattctaaatgcatctcggagaaatgtcaactgggaacaggtcattcagcaagtaaccaagaaaaagcaagagctgggcaaaggcttacccaggtttggcatagaaatggtaccccttgttcaaaatgaacaagaagccttagatttggatggggaacctgatctgtccagtctagaaggattccagtgggaaggtgtttccatttcctcgtcccctggcttggcaagaaagcgaagcctttctgagagcagcgtgatcatggacagagctccttctgtgtatagcttcttcagtgaggaaggtacaggcaaagaaaatgagccccagcagatggtttcacctagtaactcattgagggctggacagagccagaaagcaaccatgcacctcaaacaagaagtgacacctcgggctgcctccctccgaacaggtgaaagggctgaaaatgttgctacccaaaggcgacatagtgcacaattatcctctgaccatataatacctttgatgcatttggcaaaagacttgaacagccaggagaggtctataccaccgtcagagaatcagaattcccaggagagtaatggagagggaaactgtctgtcatcaagcgcatcctcagcccttgcgatctccagtttagcggatgcagccacagatagtagctgtacctctggtgctgaacaaaatgatggccaaagtattagaaagaaacgaagagccactggagatggatcttctcctgaactcccaagtcttgagagaaaaaataaaagaaggaaaattaaaggaaaaaaagaacgttctcaggttgaccagctgctgaatatttctttaagggaggaagaacttagtaagtcattgcagtgcatggataacaatcttctgcaagcccgtgcagcccttcagacagcttatgtggaagttcagaggctacttatgctcaagcagcagataactatggagatgagtgcactgaggacccatagaatacagattctacagggattacaagaaacatatgaaccttctgagcacccagaccaggttccctgtagcctcacacgagaacgaaggaacagtagatctcaaacatccattgatgccgcactgctgcccactccctttttcccactttttctggagcctccatcttcccatgtgtctccatcacccaccggagcctctcttcaaataaccacgtctcctactttccaaacccatggcagtgtccctgctccagactcatcagttcagattaaacaagagcccatgtctcctgaacaagatgagaatgtgaatgctgtgccaccaagctctgcctgcaatgtgtccaaggaattactggaagctaatagagagatcagtgacagttgtccagtttatccagtcatcactgctagattgtccttaccagagtcaacagaaagtttccatgagcctagccaagaactgaagttttctgtggagcaaagaaataccagaaacagagaaaactctccctcttcccaatcagctggtctttctagcataaataaagaaggggaagagccaaccaaaggcaatagtgggtctgaagcctgtaccagttcttttctaagattgtcttttgcttcagaaacccctttggagaaggaaccccactctccagctgaccagcctgaacaacaggcagaatccactttgacatcagctgagactaggggaagcaagaaaaagaagaaactccggaagaagaaaagtctacgggctgcccatgttcctgagaatagtgacactgaacaggatgttttgactgttaaacctgtaaggaaagtaaaagctggaaagttaattaaaggggggaaagtaacaacctccacttgggaagacagcaggactggtcgggagcaggagagtgtcagagatgagccagatagtgactcgtctctggaagtcctagaaattcctaatcctcagttagaagtagtagccattgattcttcagaatcaggagaagagaaaccagacagcccatctaaaaaggatatttggaactctacagagcaaaacccactagaaacgtctcgttctgggtgtgatgaagttagctctaccagtgaaattggcactcgctataaagatggcatccctgtaagtgtggcagaaactcagactgtgatctcctccataaaaggatcaaagaattcttcagaaatatcttcagagccaggagatgatgatgaacccacagaaggaagctttgagggacaccaagctgccgtaaatgcaattcagatatttgggaacttgctatatacctgttcagcagataaaactgttcgggtttataatctggtgagtcggaaatgtattggtgtctttgagggtcatacctccaaagttaactgcctcctggttactcagacctccgggaagaatgctgccctttacaccgggtccagtgaccataccatccgctgctataatgttaagagccgagagtgtgtggagcagttacagctggaagaccgggtcctctgcctccacagtagatggcgaatcctctatgcgggactggcaaatggcactgtggtcaccttcaacataaagaacaacaaacgacttgagatctttgaatgccatggccctcgggcagtcagctgtcttgctacagctcaggaaggtgcccgaaaactgctggtcgtggggtcttatgactgcacaattagtgtacgcgatgcccggaatggactgctcctcagaactctggagggccatagcaaaaccattctttgcatgaaggtggtgaatgatctcgtgttcagtggctccagtgatcagtcagtccatgctcacaacattcacactggtgagctcgtgcggatctataaaggtcacaatcatgcagtgactgtggtgaatatcctaggaaaagtgatggtgactgcttgcctggataaatttgttcgtgtctatgaattacagtctcatgatcgattacaagtttatggaggacacaaagacatgattatgtgtatgaccatccataaaagcatgatttacactggctgttatgatggcagtattcaggccgtgaggcttaatctgatgcagaattaccgctgttggtggcatggttgctctctgatatttggcgttgtagatcatttaaaacaacacttgctgaccgaccacactaatcccaacttccagactctgaaatgtcgctggaagaactgcgatgcttttttcactgctaggaaaggatccaaacaggatgctgcaggacatattgaacgacatgctgaagatgacagcaaaattgattcatgaagttttttgcctcccacgttgggaagtcattagttgaactattttcacattggccccccacacaggccactctcttccctttcttggtgaagtaaggaaggagaaagtggttactagccaggcatacccctagcataagtctgggcagctctatgggatgataaattacacttttaagttcttgctggaggttttaaatagatttagacaaatgttaaggaaccatacttctctgggacagcatggcatatagtgatatatgctatttgcgttctccagatgtttattgaagatacagatcctaattggttacccagtttgaccctaatcatatgtatattttattgatttcagtttgcaatttttaatttatgttcttatgatggtttaaacctatagtcaggcttttaagtacaagtttgtttaagtgccagactttgaggatcagttttaatttctccatttgtaatagctgggtatttaaactggaagcaaatagttttctttcttaacaattatgtgcagtgtgtgtcactgttttcttgctttatagatagagctggctttaagtgctaaaggacacagtagatttttgacaaacagtggctgctctgctgactatcttttaggaattcaggaagcaaatcacatagtgacaagtccttacagacaccacttctagtaaatctctgtaaatgtggatagaaagctcagtgtgaggcagtgcgtagacctaacgtctacctttacatctgctgttgaacctgggcactacctgttacagatcctgtcaggctgttgaactggaggtgtacctttatcttcctttctagtgtctgaccctgcaagcctaatgttggtttgaacccttttggtttgttcagttgccagcctccatctctcccactgtatggccgtgcctagaccgatggcagccatcgaatattcctctgggctcacggggtgttttccacccccctgcagcaactaagatggtgggggagagggggttagaataaagcatctgaatacagttttcaggacctcaagcagacttcctagagacttgtttctgagacagttctttgccttcacttccctgctagctgggaaagaagagtggagcagagactctgcctggccactgagaacagccaaattcacaaaccctcagtggggctttgtttttggattttctccggactcatcagtaaacctgtagaagtgtcgctttccagccttttgtttctggatcctcaaaactcagaacgtggccgggcgtggtggctcacgcctgtaatcccagcactttgggaggctgaggcaggcagatcacctgaggctaggagttgcagaccagcctggccaacatggcaaaaccccgtctctactaaaaatacaaaaagccgggcgtggtgggcgcctgtaatcccagctgctcaggaggctgaggcaggagaatcgcttgaacccgggaggcagagattgcagtaagctgagatcgtgccactgcactccagcctggtgacagagtgagactccgtctcaaaaaaaaaaaaaaaaactcagcttcttcagagagataaaattgggggaggagcccagggccacataccaagctttgggacatggtgcctcatgctctctgggattgcagaccatccaggtctgtcttcgcccctgttagtgcacatatatccactcacatgtcttccctcaggctatcgggcagggggacttcaccagggggtttatggataggcttcaagagggtctgtgagcccccagaaattgtgtgtgagactgagtatgtgttcttttttccaggaaaggctccagtggttcttacttgatccaaaaaatgtcaagaattaatctaggaggccgggcctggtggctcacacctgtaatcccagctctttgggaggccgaggcgggtggatcactcaaggtcaggcatttgagaccagcctggccaacatagtgaaaccccgtctctattaaaaatacaaaaattagctgggtgtggtggtatgtgcctgtagtctcagctactcaggaggctgagacaggagaatcacttgaaccctggaggtagaagttgcagtgagccaagatcatactactgcactccagcctgggcgacaagagtgaaactccacctcaaaaaaaaaaaaaaaagagttaatctaggagataatgaatggcctagtactagataatatatggccccacaagctcttgacttctgtccttggggaaagccattttgttaaccacactagtgagatttacatgatgcttaatggagaacagagaagatcttgttgcaaaaggtgtattaaatatttgtgctgtttctgtatgagattgagaagcttttcccacctctcacccctatttcctataaggatatccagagaagccaaactgttctgtgggtttgggaatggtcatttcccgggaaaatgcatctggatcgatgactaaacctggcccttttctctgggctgtagtgaagccgcattttcacgctggctggcagtgtgctgagagcctcgaatgctctgcggcgtagtgcccttctgccctgcctgacgatgtatcgaaaagatgagagtgaaggagactttgtgcagcaggaaacgggtaggtgaggtgttgggcagttgtgggaacttctgagagtattacagagtggtagaatcggtaagaactctgatttggacttcgctttggtggaactgtgtgcctatacctgcctgtgtgtgtgcaagtgtgcaggttcctttgtatgtatgtgtacgtgtgggaacctgtgtttgtcatatttttcttcatttcacaaaggctttttttgaagcagtggcagtatgcctttgtttcaagaacacatgaaattcttttaacaccagattagtgtgttaccccaaatgaacggttctagccctctattaagaaataaagggaccataagcattttggctgcttatggctgtgtgttactacttacaagagtcttgaaaattatacagaactttgccttctttttttaatgtcttccacaatgttgtgactgattataaccctgtttcccctcagagaagagctatggctcagggatctgtgttgactctggcatttagtggctttgtgaaggaaagaaaccattaaatgacctgacaaaaactgactcatgtctttaaagtagttgaagccacttttagaatgttactctcggttgcttttgtctaattctaatggcttaaagccaagaaaaccatagtataaatctttttgtgtacctatgctagtgtttaaatggcagttcgttgtgataaagtatcagtcacttcaagttttctgtgaaagtttttaattaggttaaaaataattttggcatacgtctctactcagtttataaagcagttccacaccatgcaaacaaaactctaacagcaaaggttatcttgacctgatgttacttgaatctgagagaaagtcattacttactactgcactcctgcttttgtgggaaaaattttcttcttccccagaagagttaacagttgagtgttcagctcctgacttacctttaatttagaggcaatattattactgtttaagtgattatttgcttaacacaggttttattttgtctttttgctggtagattatacaagggacaactttagtgatgaggcatgtggatgatttggtgggagtaggtatatacttagtggaatggtttattttatggaagagaattcattggaggtgagattgaagtatattgtgaagtgggatttgaacagcacatatgctctggtttgctcaaataactgcagtttatgcttacatctaaattttgtttctgttacctaaacgggagcttctagaattacgaaggccatacctgccacatttataaaataatggttttatccctgcccccaaatcatcaggttcctcgggtttaagagaagtggtctaatagacaggaatagaagttgtggtggaggtgatttgggatagactaggtttccttatgcaagtggatatgagctcctcatagaaaccagacctactgtattagacagtaacctctaacctcacctccaagcccaagtatatggccctgctgggttacctggtgactacatttcccagattcactctaaattcaaggtagtgacccaaataaattgggaaaggagggggtcaaggaggaaaagctgttgaaaatctttctcctatttaagagaaatatatgccctagagctgctccagcacccttggtttctgatttttttaatattgaatatggattagaagaatgaaatcagatgacacctgactgcaaaaatgtttataagcaaatagccttcttacattttggtataaagctgtgaacttcgtaactttgtaaagcaagatataaagcaaatacaagaggaaaataaagtacttttactaattgacggataactttcgttaccttgtctggcatattcacggccagccctttccacgttgggcttagccgaggggaggaggggaactggggtngggaaaaccacaggggtggccctttaggttagggccncccccatggggttccccggaggnagtttttgggccaaccaaccggttncgttttccggggtttttttcccccggn

SEQ ID NO: 20030 - DNA, 1658 bp, Homo sapiens
  misc_feature 1, 2, 3, 4, 5, 6, 7, 1481, 1482, 1483, 1484, 1485, 1486,1487, 1488, 1489, 1490, 1491, 1654, 1655, 1656, 1657, 1658: n = A,T,C or G
nnnnnnnatccccccagttctaagcggccgcccgatttgcttttacattttcttgcctgagtctgaggtgaacagtgaacatatttacatttgatttaacagtgaaccttaattctttctggcttcacagtgaaacaagtttatgcaatcgatcaaatattttcatccctgaggttaacaattaccatcaaaatgttttgtggagactatgtgcaaggaaccatcttcccagctcccaatttcaatcccataatggatgcccaaatgctaggaggagcactccaaggatttgactgtgacaaagacatgctgatcaacattctgactcagcgctgcaatgcacaaaggatgatgattgcagaggcataccagagcatgtatggccgggacctgattggggatatgagggagcagctttcggatcacttcaaagatgtgatggctggcctcatgtacccaccaccactgtatgatgctcatgagctctggcatgccatgaagggagtaggcactgatgagaattgcctcattgaaatactagcttcaagaacaaatggagaaattttccagatgcgagaagcctactgcttgcaatacagcaataacctccaagaggacatttattcagagacctcgggacacttcagagatactctcatgaacttggtccaggggaccagagaggaaggatatacagaccctgcgatggctgctcaggatgcaatggtcctatgggaagcctgtcagcagaagacgggggagcacaaaaccatgctgcaaatgatcctgtgcaacaagagctaccagcagctgcggctggttttccaggaatttcaaaatatttctgggcaagatatggtagatgccattaatgaatgttatgatggatactttcaggagctgctggttgcaattgttctctgtgttcgagacaaaccagcctattttgcttatagattatatagtgcaattcatgactttggtttccataataaaactgtaatcaggattctcattgccagaagtgaaatagacctgctgaccataaggaaacgatacaaagagcgatatggaaaatccctatttcatgatatcagaaattttgcttcagggcattataagaaagcactgcttgccatctgtgctggtgatgctgaggactactaaaatgaagaggacttggagtactgtgcactcctctttctagacacttccaaatagagattttctcacaaatttgtactgttcatggcactattaacaaaactatacaatcatattttctcttctatctttgaaattattctaagccaaagaaaactatgaatgaaagtatatgatactgaatttgcctactatcctgaatttgcctactatctaatcagcaattaaataaattgtgcatgatggaataataggaaaaattggcattgggaataggattttattttaaatgtggaaccatccaacaacctaccaannnnnnnnnnnggggagactttgggctgccaatgggaccctgggactctggagggttacagcacggaaatgtttgccctcatttgacaaaatccctgggttacaggttacagctatggggaaatattcatggccattgaaatttttacttggtatgaaaaaaaaagggtttccnnnnn

SEQ ID NO: 20031 - DNA, 559 bp, Homo sapiens
  misc_feature 1, 2, 3, 4, 5, 557, 558, 559: n = A,T,C or G
nnnnnaaaagacttcgacgccctcatcctggatctggagagagagctctccaagcaaatcaacgtgtgcctctgagccagatgacggggtgggaccccggttagtaaggaccgggcgcccagtggctaaggcggtgccctggtgaccaaggagagccagacctgttgctcaggccgagctcctggttgccagcgagttaccacgggaccagtcgcgtgtatggctgagactcattcccagtttccagggcccggtatttggacactagttgccaagtctggggcctggggattttagggaccagcggttgtgaccatctttcctgagcaccaagggcttccccttttgttgccaaaaaggtagttctcgcgcttgctaggctggcctctcttgcctccccttggccggggcaacaccagttactgtgagcatcaccctggtgtggtgagtcacctctagtcggccctcttgctgctgccaaccaaatcagtattagctttgagcactgcactgtttctccctcccttgggcgtacggggaggggataatctagttcnnn

SEQ ID NO: 20032 - DNA, 4218 bp, Homo sapiens
catcagcctcggggacgttttgccccaggttttccgagatgttgtgccttccaccgctgctgccccccgctttgggggcgtgtcccccggcgttctccccctttgctcgttgggtgcccttgtgtggacacgctgttgttcctctggcagggttctatctccgcgcgtcccccccgtgtgtttggtactcccgtcgtccccttatgttgtcacgccggcttctttatgcaatcattacggggggggtgtttagtttacctgcccgcctactgccccccctggagggttttggtggggcgtcctccttccaccatcctttctcgggcggacaatttgggcggcccaaaacccatttcttggtggtccccaccggcgggttctctccagcggcgattcctcccacgactagtttgggcgcgcacctcgctttcttgctcccaacatgtcgctgcttgtctgccgccgccgtcatgatggttttgctgctcgtgagacaaccgcacacgcacaccacgcttctggctgtgtcggaatcgcccccccccctttcgggcctccttttgaaagagaagaggggtggggagttttctcttctctggtggtgttccccccactcttttgtgggggggttcttaaaaaaaaaaaaaaaaaaaaaaaaaaaaaaaaaaaaaaaaaaaaaaaaaaactctcggaggtttttttttttttttttttttcatgaacctcaaagtagcaatatatttatttacaaaatatacagtttcacagaaacagcttcgctttatacacataaactttaaaattacacagaaccatgtaaacgatgtgaagtgtctggcctggccaaagccaatgggagggcctacttttggggtgacatccctccctcccctcacttcattagccaccaaccaggaaccacagatgggtcgtgcctaatttgcatataaagaagctgattgcagctgcccagctcaatctaacacaaaaaccaaggtgtccgacttcttagacaccacccacagggacagatctgctaaaagaacaaaaatgcaatcaaggaaacaaaatggagatgagtatcacatgcattccagaggcatcgaaccttctagcacacgtgacagttgccagggccggcagttccattctaaagtcacatggattcttaaatgcacctttaaaagcttgtggaatttttttttttcaaagcagaaaaacactttggagcgctggttattcacgtggtgaagacactggacaggcgttatctcagggtagatctttggcaaattcctctccaatgcgtcctggctgtttgccctcgtcagtttctaaaccagcttactatttttctctaccgaacctcccccttggggatcttcacaataaactggcttcagaaactatttctctctagtttcgtgttaatacaagcaacagaacttttaaaaaaataagacggttggacaagtgtgaaagatactaggacaaaaaaaatgcctctgattagccaaattacggttcaagccccttggtgcttcagtgggagaaggtgggaagagtctgcctggtggcctggcacaaaggtgccacatgaaggggaagcccccagcagtgagaacgcgggcccatcccactgaaaacaaacatgacttgcttgagcattcttccctttccatgccttaaagaaacaatgcttatgaaaacctaccaatcaattagaaaatgttttgagaacaagtacttgaactgctgaagagcagtgttcatttcagagaaagccggagcccctctccctcccagccccagaactaccagtgttccagggcaccctgccctcgagcagagttcttccacagcctccggcatcaactcccaggtttttccagagctggccctcacaggggcctcccaggtccaggatcccagctgagatttaaggaactcggcacagttccaaggggtcatcctgaaggcccatgttaccctatcactcactcaccaactcaaaacagaaaaagaaagactcaagtcctaactgtaccctgtggaaccggcaggccagcctgtctaaagggcacacaagagtcacccaacggagagggctccctcccagctctcctttaccctattctttggaggaacaccatgcgggtcccagtgattgcctaacctttatgctgctaccagaatgaggtgaaaggaagagacaaagacagaacctatgagttcccacactcgcaaacagctggcctgagcccaccaagacctcacacaccaactaagagggcactcagcaagaaatcagccaatacttttggctgtatcgtgcaaaaagacagggtttttacatcgtgcaaaacaggaaactgagttatgaacacgggccatctcaaccccccaaccaactccctttccacagagaagtggccacattgtcccttttaacaaacagaaggaaacctaagaaccaccagctgacccgccagcccagcgcccttccaggggagcccgaggcctcccgccagtgcctcccccagccggtcaggcagcagctgaggcaggcagagggcaagccactaagtaggggcaacttggatggctgctgtacagacacttttggtaaaagacttaacactcaagaaaaagcttacacgtatggctgttcattaacaggctggggaaaccgaacacctctccccaacacagtggaagcagaataacagctggcactgagcccaatcagcgggaatctcttagcaatgatagcaaaacgcacagctaccacggaccctcattttcaaatgagccaaacccgctgcacgtgggtgtccagtccacctccactgcagggaacgcagctctggcagcagctctggctggcaaaggtcgcattcggtcaccggctatgtacagtttctaccttggacagcctgtccttttgcttaggcacctaaatggcagggatctgcccgcaccagagctgagggttctgtgctcaactaagagaagggcaaaaaagcccacggtcgcttccgattccacgctcgcagcctcctcgccagccagcagtcagtccaggaacagcttccgggagcccgtccgcgagcggttggaacggcggatgtcaaacttggagtcccggcacttttggcagacaaacacttctggaacattggatttccggattttcgcacaggacaggtgaatccaggtgtggcactcattacactcgatcatggggcggccggcaaatggcttcatgcagaagcaggtcacgaggtcccaggaatcgtcatctgagtccaccatgatgtcctcatcattgccagtgctgtcctcatctcggaacaccacctgctttccctgccggacgatagtccgtttgccttcagtttttatttctttgacctgatcaggtgacacagtggcacaagatccactcgagggagtatcggagtcccagcccgagcaggggtcgctgggagcctgggggatatcctgcaaggtgggactcgtgggggtctccacgtaggggtcagcggcttccagcttcagcaagccccccctgtacccctctttcccaggcgcatcactgtccctgcgcttcctcttcttcttcttcttcagcttgtccgttttctttctgtccagcaggaagttactgggcttggctcgctgcaagagagtaggctgcaggtggctaaagcagcggtcagagactggcaagggcactgaggacgcgatgtctgagaaacccgcgtcccagccgtcgctgtcaatggtaccagcagtgctgttagcagggctggggctgctccttaaagggagttcctccttcggataagggatgtagccagcataggccaagacaaaggtgcagaatttgttgaagtcttccacggtcctgcgcctcttgcaactgggggagtattcctccgggtggaaggcggcggcgcaagagtcagagtccatgttccgggcggggggcggcggcggctgcgagagtgcaggagctgggatgctggagcggggccgcccggggctgggggctcgggcggctgcgcagggcgagggcggacccgggaggggtcgcccgggctggaggtgatggggggctcagcgcgtcgcttctcaagctctgtgaccccggactggcggttccaccgccgaccggagtggacgatgcagctcccgcggcggtagaggcgggcg

SEQ ID NO: 20033 - DNA, 1326 bp, Homo sapiens
  misc_feature 1310, 1311, 1312, 1313, 1314, 1315, 1316, 1317, 1318, 1319,1320, 1321, 1322, 1323, 1324, 1325, 1326: n = A,T,C or G
acccacgcgtccgagttaagtggtgagagagctagcaaatcatacattgcattccccaaagcatctgaacgtacttctagaaaacaaaccaaccaaaagggaaaatatgcatgctttttgtaattaactggtgctttgaaaatcttttttaagggagaaaaatctcaaccaaagttatgctcatccagacaagctgacctttgagttaatttcagcacaactcattcttcagtgcctcatgactgaaaacaaaaaacaaaaaaagaaagcatcttcacaatgaagcttccagatagcaccgttttgctaaaagatacattctcattgttttccaacagtgatggcttccacataaggttaaacaaactaggtgcttgtaaataatttattacagtttactctatcgcatttctgtaacatgaaatgcatgcccttcttcaggggaagactgtggtcaagttaaaaactaagtgattcagaagagaggagggaagttgtgcactctgaaaatgcatgaaaaacaaaggcaaaaactagtgggaaatgtgtagaactgttaactgagatggcttcgagtcttccttctggaatctgttaaatttcacaaagtcatgagggtaaatggagaaaatatttctgggattacaatgaatgtaagcccaaattgtggaattgccagtaacctggatggggaaaagcatttcccatagcactccatgtaatatgagtgctctgtgagatgttcatcagtgttttatagaaatggtgttgctgggaaaccaagtttgcacctggaaacttacaatgcactttagcgcagtaagggctgtggcatccggtagtgaaaaactgtctaacccagcattgcccaaactatttggacaccaggacctttttctccttgggatacttatgaacctctcactaatgtcctgtggagaacatttgggaaacactatgttagatagttctttaaggagacaaaacggtaatgaacagatagcactggggcagaatatgcatgcatttgtgtaacgtccagtgtggcggtgaaatagatgtgtattttcctcccctggcagaagataagcaccagaaaattataatgtaggtgaatcggagtctttccttgtgatagagagaaagccaatgatctggtttttcactggagtatcagaatacatggtgactggtgtaataaggtgtaattcagaatctgaaaagtttgcgtgaatgcgatttatccagatagtgtggtacaactgaagacaatggggcttaaaataatgggggacggtttacctttgacnnnnnnnnnnnnnnnnn

SEQ ID NO: 20034 - DNA, 2434 bp, Homo sapiens
  misc_feature 1, 2, 2424, 2425, 2426, 2427, 2428, 2429, 2430, 2431, 2432,2433, 2434: n = A,T,C or G
nncgacccacgcgtgcgctcgaccggaagtcgaggggaggagtctagtgccgcgggctccggagtgacggaagttgtgctcttggtgaatggggttcttccttttttatttaccggtggctgtgcttccaatttaggaagaccccggcgacctgttcctcacccccgcttcgccctcacactttcgggatgtctgcgattcctgctgaggagagcgaccagctgctgatccgaccccttggagctgggcaagaagtaggaagatcatgtattattctcgagttcaaaggaagaaaaataatgctcgactgtgggatccaccctggcctagaaggaatggatgctcttccttatattgatttaattgacccagctgagattgatctcctattaattagtcatttccatttggatcactgtggagctctgccctggtttctacagaagacaagtttcaaaggaagaacatttatgactcatgccacaaaagctatttatagatggcttctttctgattatgtcaaagttagtaacatatcagcagacgacatgctgtataccgagacagatttggaagaaagcatggacaaaattgaaactatcaactttcatgaagttaaggaagttgcgggaatcaagttttggtgttaccatgcaggtcacgtcctaggagccgccatgttcatgattgagatcgcaggcgtgaagcttttgtacactggtgatttctcaagacaagaagataggcacttaatggcagctgaaattcctaatattaagcctgatattcttatcattgaatctacttatgggacccatatccatgagaaacgtgaagagcgagaagcaagattctgtaacactgtccacgatattgtaaacagaggaggcaggggtctcattcctgtctttgctcttggaagggctcaggagctgctcttgattctagatgagtactggcagaatcacccagaactacatgacattccaatatactatgcatcatctttggccaagaagtgtatggcagtgtaccagacatatgtaaatgccatgaatgacaaaatccgcaaacagatcaacatcaataatccctttgttttcaaacacattagtaacctcaagagcatggatcattttgatgacattggtcccagtgttgtaatggcctccccaggcatgatgcaaagtggcttatccagagaattatttgaaagctggtgtactgataagaggaatggtgtcattatagcgggatactgtgtagaagggacacttgccaagcacatcatgtctgaacctgaagaaatcactactatgtctggacagaagttaccactgaaaatgtctgttgattacatttctttctcagctcacacggattaccagcaaaccagtgaatttattcgtgctttgaaaccgcctcatgtgattttagtccatggagaacagaatgaaatggccagattgaaagcagcactgattcgagaatatgaagataacgatgaagttcacatagaggttcataatcctcggaatacagaagcagtgaccttaaacttcagaggagaaaaactagccaaggttatgggatttttagcagacaaaaaaccagaacaaggccagcgggtctcaggaatacttgttaaaagaaactttaattatcacatactttctccttgcgacctgtccaattatactgacctggccatgagcacggtgaagcagacccaagccattccatatactggtccctttaatttgctctgttaccagctgcagaaattgacaggtgatgtggaagaattagaaattcaagaaaaacctgctctgaaagtgttcaaaaatattactgtaatacaagaaccaggcatggtggtattagaatggctggcaaacccttctaatgatatgtatgcagatacagtaacaactgtgatattggaagttcagtcaaatcccaaaataagaaaaggtgcagtacagaaggtttctaaaaaattagaaatgcacgtttacagcaagaggttggagatcatgctccaggacatatttggagaagactgtgtaagtgtaaaggatgactctattcttagcgtcacagtggacgggaaaactgccaaccttaacttggagacacggactgtagaatgtgaagagggaagtgaagacgatgaatccctccgagaaatggtggagctggctgcacagagactgtacgaggccctgacgccagttcactgagactgtgctgtattgacttgaaaatatgattatttgttctaaataatgcttggtttgggaaaaacaacataaaaatttatgtagtataaaaaaaataagggggggctattagggcaaaagctctttaaaggtgtgtatttaaaggggggaaaggaaactgtttacttttgtacaaccgaannnnnnnnnnn

SEQ ID NO: 20035 - DNA, 2387 bp, Homo sapiens
  misc_feature 2261, 2262, 2263, 2264, 2265, 2266, 2267, 2268, 2269, 2270,2271, 2272, 2273, 2274, 2275, 2276, 2277, 2278, 2279, 2280,2281, 2282, 2283, 2284, 2285, 2286, 2287, 2288, 2289, 2290,2291, 2292, 2293, 2294, 2295, 2296, 2297, 2298, 2299: n = A,T,C or G
  misc_feature 2300, 2301, 2302, 2303, 2304, 2305, 2306, 2307, 2308, 2309,2310, 2311, 2312, 2313, 2315, 2351, 2352, 2353, 2354, 2355,2356, 2357, 2358, 2359, 2360, 2361, 2362, 2363, 2364, 2365,2366, 2367, 2368, 2369, 2370, 2371, 2372, 2373, 2374: n = A,T,C or G
  misc_feature 2375, 2376, 2377, 2378, 2379, 2380, 2381, 2382, 2383, 2384,2385, 2386, 2387: n = A,T,C or G
ttagggagtcgacccacgcgtccggcgattgcgacaggccggcctggctcccagcgctccctgtccccgccccgcggccagctcgctccactcccacttcctgagctccgccatgggagccctggaggcccggcctggccgctcccggccctggggtgcacatcggccctgagtcccgtcccaggctctgggctcgggcagccgccgccaccgctgcccaggacgtcgggcctcctgccttcctcccaggcccccacgttgctggccgcctggccgagtggccgccatgctcctgccttgggccacctctgcccccggcctggcctgggggcctctggtgctgggcctcttcgggctcctggcagcatcgcagccccaggcggtgcctccatatgcgtcggagaaccagacctgcagggaccaggaaaaggaatactatgagccccagcaccgcatctgctgctcccgctgcccgccaggcacctatgtctcagctaaatgtagccgcatccgggacacagtttgtgccacatgtgccgagaattcctacaacgagcactggaactacctgaccatctgccagctgtgccgcccctgtgacccagtgatgggcctcgaggagattgccccctgcacaagcaaacggaagacccagtgccgctgccagccgggaatgttctgtgctgcctgggccctcgagtgtacacactgcgagctactttctgactgcccgcctggcactgaagccgagctcaaagatgaagttgggaagggtaacaaccactgcgtcccctgcaaggcagggcacttccagaatacctcctcccccagcgcccgctgccagccccacaccaggtgtgagaaccaaggtctggtggaggcagctccaggcactgcccagtccgacacaacctgcaaaaatccattagagccactgcccccagagatgtcaggaaccatgctgatgctggccgttctgctgccactggccttctttctgctccttgccaccgtcttctcctgcatctggaagagccacccttctctctgcaggaaactgggatcgctgctcaagaggcgtccgcagggagagggacccaatcctgtagctggaagctgggagcctccgaaggcccatccatacttccctgacttggtacagccactgctacccatttctggagatgtttccccagtatccactgggctccccgcagccccagttttggaggcaggggtgccgcaacagcagagtcctctggacctgaccagggagccgcagttggaacccggggagcagagccaggtggcccacggtaccaatggcattcatgtcaccggcgggtctatgactatcactggcaacatctacatctacaatggaccagtactggggggaccaccgggtcctggagacctcccagctacccccgaacctccataccccattcccgaagagggggaccctggccctcccgggctctctacaccccaccaggaagatggcaaggcttggcacctagcggagacagagcactgtggtgccacaccctctaacaggggcccaaggaaccaatttatcacccatgactgacggagtctgagaaaaggcagaagaaggggggcacaagggcaccttctcccttgaggctgccctgcccacgtgggattcacaggggcctgagtagggcccggggaagcagagccctaagggattaaggctcagacacctctgagagcaggtgggcactggctgggtacggtgccctccacaggactctccctactgcctgagcaaacctgaggcctcccggcagacccacccaccccctggggctgctcagcctcaggcacggacagggcacatgataccaactgctgcccactacggcacgccgcaccggagcacggcaccgagggagccgccacacggtcacctgcaaggacgtcacgggcccctctaaaggattcgtggtgctcatccccaagcttcagagaccctttggggttccacacttcacgtggactgaggtagaccctgcatgaagatgaaattatagggaggacgctccttccctcccctcctagaggagaggaaagggagtcattaacaactagggggttgggtaggattcctaggtatggggaagagttttggaaggggaggaaaatggcaagtgtatttatattgtaaccacatgcaaataaaaagaatgggacctaaattaatgccgctcgtgccgaattcctgcagtcgacannnnnnnnnnnnnnnnnnnnnnnnnnnnnnnnnnnnnnnnnnnnnnnnnnnnngngggaggggggggccttttttttttaaaaaaaaaaannnnnnnnnnnnnnnnnnnnnnnnnnnnnnnnnnnnn

SEQ ID NO: 20036 - DNA, 1441 bp, Homo sapiens
  misc_feature 1, 2, 3, 1415, 1431, 1433, 1439, 1440, 1441: n = A,T,C or G
nnnaacctcctggttccaagtgggagacatggtgctgtcggagctagcggcgcgcctcaactgcgtccggtacaagaactgggtgaaggcgggccactgcctgctactgctgcgcagctgcctgcagggtttcgtcggccgcgaggtgctctccttccaccgcggcctactcgccgcagcccccggcctggggccccgcgccgtctgccgcggcggctcacggtgcagccctcgcgcccgccaggtgagcacctggctcggggccttgaccaccgcccccaccccacccctcctcatccccgttcctgtcccagacccagagcgcaagtgtcctgttccctccgcgatgcggggcccaccgcgacgtccctccctcctgggcccctcctcaccgccgccccctgtagtttcagcctcagtgtcaggtgtgcgctgaatggaaaagggagattttgagacatcatgtcaacagaaatggagatgtgcactggggaaactgccggccgggccgctggcccgtggacgcctgggaggtggccaaggccttcatgccccgaggactagcagacaaacaaggacctgaggaatgtgatgcagttgctcttttaagtctcatcaactcctgcgatcacttcgtggttgatcgaaagaaagtcacagaggtaattaaatgtcgtaatgagatcatgcactcttcagagatgaaagtatcttctacgtggcttcgagattttcggatgaagatccaaaattttctgaatgaattcaagaacatcccagagattgtggcagtatactccagaatagaacagctgttgacgtctgactgggctgttcacatccccgaggaagatcagcgagatgggtgtgaatgtgaaatgggaacttacctgagtgagagccaagtcaatgaaatagaaatgcagttactaaaggagaaacttcaagagatatatcttcaagcagaagaacaagaggtgttgcctgaagagctctcaaatcgactggaagtggtgaaggaatttctgagaaacaatgaggatcttagaaatggccttacagaagatatgcagaagctagacagcctctgtctacatcaaaaactggattcacaggaacctgggagacaaacacctgacaggaaggcctgaggttgcccgtcaacaaaaatcaggcatgttctgtgaaagtcagcatggcttccatctcagacatccttttctgtgcaaaaggaaaaagttaccagagtattgtacccaaacaaaaaggaatttttgttgttttgtcctggactttcctctaactctttggaactattttaatatttataaacttggggttgtataatctattgcaataaaaaatattagatactctactcctaaaaaaaaagaaagaaagaaaaaataagaaanaaagggctggccgctngntagagnnn

SEQ ID NO: 20037 - DNA, 4242 bp, Homo sapiens
  misc_feature 1, 2, 4240, 4241, 4242: n = A,T,C or G
nnggcggcggcggcgcctgctgctgcggcggcttcttccgaggcgccagcggcgagtgcgactgcagagcccgaggccggggaccaggacagtcgcgaggttcgagtgttgcagagcctgcggggcaagatctgtgaagcaaaaaatttattgccatatcttggaccccacaaaatgagagattgtttctgtaccataaatttggaccaggaagaagtttatcgtacccaagttgtggaaaaatctttaagcccatttttcagtgaagaattttactttgagattccaagaactttccagtatttgtctttctatgtttatgataagaatgttttacaaagagatctccgtataggaaaagtagccatcaaaaaagaagacttgtgtaatcacagtggcaaagaaacttggttttcattacagcctgttgactccaattcagaggttcagggtaaagttcaccttgaattaaaactgaatgaactgataacggagaatggaactgtatgccagcagcttgttgtacacatcaaggcatgccatgggttgcctctcataaatggccaaagctgtgacccttatgcaacagtttctctagtgggcccttctaggaatgaccaaaagaagacaaaagtaaagaagaaaacaagcaatccgcagtttaatgaaatcttttattttgaggtaaccagatccagtagttacaccagaaagtcccagttccaggtagaagaggaggacattgaaaagctagaaatcaggatcgacttgtggaacaatggaaacctagtccaagatgttttcctaggtgagattaaggttcctgtgaacgtattaagaactgattcctctcatcaagcctggtacttgctacagccaagagacaatggaaacaagtcatccaaaactgatgacctggggtctcttcgattaaatatatgttatacagaagactacgtgcttccttcagagtactatggtcctttgaaaactttgctgctaaaatcaccagatgttcaaccaatatctgcctcagctgcttacattttgagtgaaatatgtcgagataaaaatgatgctgttttgccccttgtacgactgctgctgcaccatgataaacttgttccttttgccactgctgtggctgaattagacttgaaggatacacaagatgcaaacacaatttttagaggaaattccctggctacccgatgtctggatgagatgatgaaaatagtgggagggcactacctgaaagtaacattaaaacctattcttgatgagatatgtgactcctcaaaatcctgtgaaatcgatcctattaaattgaaagagggagataatgtagaaaataataaggagaatctgcgctactatgtagacaagttattcaatacaattgtaaaatcaagtatgagctgccccactgtaatgtgtgatatcttttattctctaaggcagatggctactcagagatttcctaatgaccctcatgttcagtattctgcagtgagcagctttgtatttcttcgtttctttgctgtagccgtagtatcacctcatacttttcatttgcgacctcatcatccagatgcacagacaattagaacattaactctcatctcaaaaactatacaaactttgggaagctgggggagtctgtccaaaagcaagtcaagtttcaaagagacattcatgtgtgaatttttcaaaatgtttcaagaagaaggatatattatagcagttaaaaagttcttggatgaaatttcatctactgaaactaaagagtccagtggtacgagtgagcctgtgcacctgaaagaaggtgagatgtataaaagagctcaaggaagaactcggattggaaaaaagaattttaagaaacgatggttctgcttaacaagcagagagctcacctaccacaaacagccaggcaaagatgcaatctacacaatcccagtaaaaaacattcttgctgtggaaaaactggaagagagctctttcaacaagaaaaatatgttccaagtaatacatacggagaaaccactctatgtccaggcaaataactgtgtagaagctaatgaatggatagacgtactctgcagggtgagccgatgcaatcaaaacaggctcagtttttatcatccctctgtgtatctaaacggaaattggctctgctgtcaggagactggtgaaaacactctcggctgcaagccatgtactgcaggtgtccctgcagacatccaaatagatattgatgaagacagagaaacagaaagaatttattccctttttaccctcagtttacttaagctgcagaagatggaagaggcttgtggaactattgcagtctatcaaggaccacagaaagagcctgatgattattctaactttgtaatcgaggattctgtaacaacctttaagacaattcagcaaataaaaagcataattgagaagctggatgaacctcatgaaaaatataggaagaaaagatccagtagtgcaaaatatgggagcaaggaaaatccaattgttgggaaagcatcttagagtttaacagattggttcagaagaactggaaaatattatttttcttggagcttttcaattcatcatgtattttgttcatggtatttaagaatgagcatccgcttcaatgtcatctgcctccacattgtatttaatatttaataattgaaattaattgtttgggaatcctggtattgatgtattactagagaatttaaagcccaagattcccttcatacctgtgtgaccaaatccatgtttctgcaacttctttttaatcgaaagaatcttcctagaaaagctttgtaacaaagggagaactcctccgtagcaagaaaccatctcttcttgtaacactctgttctgtggacttgttttcactaccatcagtgcctgctctatactgccaacattgtgttttactagaaaactccaattcatgacagttcagagcttttcatttagttcatgtagaccctcccactttaaaaaagaaaaaaaataagaagtgtttttcctttggtccatcagtcattacaggttccattcaagacagtgatagaaactttagaaaactgccagagcatacttgaaagttggtagatccttttgcctaaagatgtaaacaaaactcaagacagaaggaatcagggaatatgtgctattgtgtgcatcttgtttacatttgggatcagtgatggcaaaagaagtaatgagaccactgaaattgttttcattgttttaaataccaggtactcattttcttgatttgaaagtttaacatgacttctaaggacatctcttcaaaaagaaagtaaacagggaatgaaggtggtgggaaaatcacttcacttcacccactatttcatgttgtaataagggccaccataaggatgccctcctcatagtgttcggttctgatcttcctcgagaacagtcacttggcgcactttaataatctggactgctccagatttgactttagatactccatggtatctagtctttatgatcagttgaatgatcagtgtttaagtctaaaaataatgctttcctgaaaatgtttatatttcattgctgtttccttattgcctgctagccaaatggaatttgggcaagcaactctttgaagacttttttaccctagaaatttacttttgtcctaaaaaccctaactgtaaataagcagtcgaagcaagttgccaccttgaagttgagggatacactttgcttcatcagtattaaaaaccatggtactcttattttgtcttttttaattcaaaacattttctaaatgtggtactttgaaccttggagtatttacatgtttctgttcaaaactgtgacttattaatgtcagtctgctagtagtacttcatttcgtctgagcataagctatatttcaagactattacctttgggcccaactcttggttacttgcgtggggtacatcaatcctctacacttcacttttggtctcttcccgctccactcattcttacgcggaacctactggcgatacgatccacagttggttccataaaagcaatataacctgagcacggtacttcttctcactgacctggcacacacatcatgactttcgtccaggctggcatccgggcaaagttatacacccagtacagtcacagaccgtcgcacagagcctgacatttgtagcccgccactccatacatacacgctatcccnnn

SEQ ID NO: 20038 - DNA, 2429 bp, Homo sapiens
  misc_feature 1, 2425, 2426, 2427, 2428, 2429: n = A,T,C or G
natcgaccgatcgtctggcagaacgcggaggccgctcggacgcggttcagctcattccctgaggccggcccgcgtcccgtcaggcgccgcgcggggttagcgcggggtcagcggaggtcagcgggggtcagcagcagcggctccgagggcgcggcggacgcaggatgtacacgctgctgtcgggcttgtacaagtacatgtttcagaaggacgagtactgcatcctgatcctgggcctggacaatgctgggaagacgaccttcctggagcagtcgaaaacccgatttaacaagaactacaaggggatgagtctatccaaaatcaccaccaccgtgggcctaaacatcggcactgtggatgtgggaaaggctcggctcatgttctgggacttaggagggcaggaagagctgcagtctttgtgggacaagtattatgcggagtgtcacggcgtcatctacgtcattgactccaccgacgaggagaggctggctgagtccaagcaggcgtttgagaaggtggtgaccagcgaggcgctgtgcggtgtccccgtcttggtgctggccaacaagcaggatgtggagacgtgcctctcaatccctgacatcaagacggccttcagcgactgcaccagcaagatcggcaggcgagattgcctgacccaggcctgctcggccctcacaggcaaaggggtgcgcgagggcatcgagtggatggtgaagtgtgtcgtgcggaatgtgcaccggccgccgcggcagagggacatcacgtaggcgcagccgcgctgccgtcgggacggctggtcccctggtgctggaggagtggcctcctgttggctcccatgctgctgatctggggggtgggtttgctttgctttggggttcttctatttactttgttttctcgaagacaaactttcctctatgtctggaaaagcgtaggcatccggaggctttggaggggagtctggcagcccggctggcccaggccctgcagcggcagcctttccacagggcgcagcggcggcctttcgaggccctttctggggggtctgagggagacctggttgggaattggggctccagtgctcaggctggcttgggctgcatgaggacagccctgtgggaccctcgggagaccccgtggctgtctccgccccatcgaggaggaggcccgtcagccatggctgccatctggcttctgccctgtgaccccgtgaccccgtgaccccggaagtggtctggggctgatcttgccttgaggaagacccaggccatgttcccaaaggccagcgggggccctggattgtgatgcagcctcgggacagggctgaggcctgcgggggaagacctataccccacgcctgggcctggcttcacctcaccctaatcccccgggagggagctgactgatgcaaaaagctgagggggcctgctgggagtggctgtttttatgccccagccccgcaagttggggagtgtttgtgggggtccagagccctcccccagccaggagagaacctcccggaggggttctctgtggggccctgtgtcccctgctcgggagtaaggctggtcctggggtcctccctgcacggaccccactgggcctgccgagtgctgtgttcttcctcagtctggctgtgggcaggagcggcctgcccagtgtcacccagggtgagtgcaaaataaagacggcgagtgtggctctgtccatcccttccctcctggagggtggaggctcctggctgttggacacggaaaaaaaaaaagagaaaaaaaaaacaaagaaaacaaagaaaagaaaaataaaaaaaaaaaaaagaaagaagaggggggcggcgcgcgcgccacaagagaggctatctctcccacgagggggcgcgcgaccatgctgctcgcgcgcgcgcgccccgcgcggttttctgtgggagacaacggggcgcgcccattatagagggggagcgcgcgattatatatataagagcacgagagcgagcggcgggcgcgcggagggtttcaaacacaagcggggagagagcgggggagagaaaacgcggagagcacccgcggagagcgcctcttgaggggaagaggagacccttaactaatgcgggggggggggggagcgaaaaatattgagtgggggggcgaacaaaacatcacctctagcgaggagaagtttaataaaggcgtctctagagggggggacaaatatataataaacaatatatgcaaagaggggtgtatatccagggggtgtgtgaaaaaacaataaagggggtgaaaatatggtgattgtgaggaggtgagtaaaaaaaaatttgtgggggaaaattagggggggtgagtatatagtaatatgtaaaaagaaacaaatattatattttaccccggggggggggttatgatgtttatgaatataaaannnnn

SEQ ID NO: 20039 - DNA, 3174 bp, Homo sapiens
gcgtccgccccgcgtccgcattttataatactgcagtatcccccccccccccacctttttttttttgagacggactgtctgttgcccaggctggagtacagtggcgcaatcttggctcactgcaacctccacctccctggttcaagcaattcccctgcctcagcctcccatgtagctgggattacgggcgcacaccaccacacctggctaatttgtattcttagtagagacggggtttcaccatgttgaccagactggtctcgaactcctgacctcaggcaatctgcccgcctcagcctcccaaagtgctggaattacaggtgtgagccaccgtgcccggccaagtatctcttttctacagccttattaaactaactacaaacatttattttccaatttagttttactttcagtgcatatcaaagttgttgtactcttcagaccaacaaattaacttgagggcaaattacatagctttccatgtacccttttttcctcaggtgctaatcaaaggctctgaaaatggatactgctttagtgatgtctgctttattcttaaaatgcttatttcttttgctagatgtaaagatttggtgttaacaaaagtggttttaatatgtaaatatgaatgaatgcctttagtttaccctgtttgtctattattaatctgttttcatttatccttcatagaggaggatcctttcatgatcttgaatacatttcattagatattgttgcattttaagaatgaaaatacaactgttttctgtcttagattaatcctgctgctatgagaaactgaaaatcaagaatgtgatgcactttttacattactatataccatacatataccataggttgctttgatacctttcctgtagcacagccactaacaagagtgaatgaattataaaattctttttgggagggaatcaatacaagtaactaattcttagctgatattgtcctatgaaggacaataacttaggaatataagaattctgttaatagtacactttttggccttaaatgtcttctactactgaaaatagtttaaatcttagctttgtttctattattccctctctctgcctcagaaagaggaattgggaagaatggcttaaaggacgtggtgtcattgatttgttgctgatcttttagaaaacatttgtctatgtaagctggggacttattttttgtttgtatatagaggggaaatagtgctgccctgaaccaatcagatttagtttaaatcaaatcaatcaaaactccagctgtttctcttgtctttttacttagcaaaggaaaactttagtgaatgctacttgacaagaagaaaagtcatttctcaagcacatacccaaacttgaaggtgattgaacccaaaataatgggtgggaaacaccaaatgaggtggaggaatgagaaagatgtgtgggccaaagctatctggttatattttgatgttgccaatatcgcaaagccaaaattttaatttgcttatttaatatatttgttggccagagatctatttttatatcaatgtgccttgcatgtatattaaaaaaaaaaaattggaaacgccatgtagtaatgcctgagatagtcgatggttcttaccacctcactaatttttatgcagtatgaaatgctcattctattgcccaactggtgctctctgtttaaagttacagatcttgcgaaactggaactattttataagctggggaagtgatttactttttttgttgtatcttttttgttcttagtctgttagtggctgtcctgtagtgggaaatagtaaaaggattcttcactcccttctcccctcagcaccttcttcaagtaaacatttcttgtgtgctttgaaaaaagtttcagcttgctgtctcttttagtgttttaaagaagtgttatacaaagcattgtttgcaaaatatagggagataatggagtccactttaatttggaattctgtgtgagctatgatccaagttatcagctctttccaactttaaaaattttgttaaaagcaccttgcttagaaaattttaaatatttatgtctgcaacaattgtctcaaaataataaactgtgcaattcttgtcattaaaaaaaaaaaagatctgaattttccctaatgtgacttgttagtttctctctgtatttcctgccagtgtaaatgtgaaagctttgcttgcattacgttttagaaatgcattttgcacactcgaattttgccgaagctccgtgaaaaggttagatctaagtagatgaataaagctatgcacatgttttgaaagtttaatttgtgtgtcattaccaaaagtgaccgatttgtccttactactttgctgttgttagctttaccatctttggaaacttggctcaaagttacatagttctgggctagctcatcagtggaactaggagagaggaaaactggcacctattttaataaagttcaatttaaacgagagcttgacttgtatctattaaagagcttttcttgaaacagggcagttttatcagctttacaaatcattggatgctcttccttagtaatattttggtttatttgatcaaatagaaatggaaagtaattcaaactgaaagacccttttttgtcatatggaacttggtgacgattttttgtcttaaagctggtttaaaggtaggataggcttttacctttattgctttagcataaatttggtttactgaattgactggcttgagattagaattattcagttgtttgtaagatcaaagcactggttgttttaaagataacgtgtatcttttaaaaaattgcccaagctgattagaacaagtttaggagttgggtacatttggttcaagtgctgcaatctgtatgtactaaatagctttactttgtgtatgtgtacttataatgtgtagatgtactactacccaggttttgtcaaatcattcttttctaacggttcttctttctaactgggccggacttgggggaaaggccatatgttacgtagacatattctggtagctttccccggtccattaaaataattttcctttaactttcaaatacgaagggccctcacaaaatggggcttgggagaaacctttttttttgtggggacaattcccaaaggcacatggctaagaaggggaaaaggctccccataa

SEQ ID NO: 20040 - DNA, 1069 bp, Homo sapiens
  misc_feature 1069: n = A,T,C or G
tggcggcccgagtacgcggggagccatcttgggatctgggcaagtgagcgagctccttcctcaccgggctgactagcctctcctttccctgtccccctccatccctgctctgcaggaagccagcccccagggccagtcccggaggggctgatccgcatctacagcatgaggttctgcccctattctcacaggacccgcctcgtcctcaaggccaaagacatcagacatgaagtggtcaacattaacctgagaaacaagcctgaatggtactatacaaagcacccttttggccacattcctgtcctggagaccagccaatgtcaactgatctatgaatctgttattgcttgtgagtacctggatgatgcttatccaggaaggaagctgtttccatatgacccttatgaacgagctcgccaaaagatgttattggagctattttgtaagattcttgagtatcagaacaccaccttctttggtggaacctgtatatccatgattgattacctcctctggccctggtttgagcggctggatgtgtatgggatactggactgtgtgagccacacgccagccctgcggctctggatatcagccatgaagtgggaccccacagtctgtgctcttctcatggataagagcattttccagggcttcttgaatctctattttcagaacaaccctaatgcctttgactttgggctgtgctgagtctcactgtccaccccttcgctgtccagaattccccagcttgttgggagtctacgtcacggcttgtcttgggaaccaatccgtctctctttcttttctttgaagttcccaataaaatgaaaacaggaaatggtttacaaaaaaaagggggggggtctaaaaaattcctcggggcgccacttagcgtacccacgtttctgtgcaaggggccgaaagagggggagtaaaaaaaaggacggggcggcggttaaaagccgcctgggaaaggtgacgggctctttgaggaccaactgcggggggattgagcacaccacaaaaagccgcgaaaaaaggatggaacgcacgcgatggagcatan

SEQ ID NO: 20041 - DNA, 918 bp, Homo sapiens
  misc_feature 917, 918: n = A,T,C or G
gagtcgacccacgcgtccgcggacgcgtgggtttttcacaagggtctattgtttcgattagtttccttgcaggaggtagaaggtttcctccatcccgagtaattcatagagtgtttggcttgtctaccttcctcctgactgaagtcacctgatactttttgttttttcaagaaggaagagagaaccctgttgcctcagttactagcaatgatacaattctcaaaatctggtctttttttgtttctttgaaatagtttctccatgttgtgtgacacagcagcccctgtcttatcatagttgtcttccctccaccacctgtaccagagatgttggatatgttggaggtgaaggtgtgcaaggtttttaactaactgttctaattaaaggattctgcaggaaagaacatgggtttacaaaagagaagcttttgtattattagtaattttttttctttgatgaatttatgtgcttagtttggagaatcgagagttggctgggaaaagatttctgaggagttaagggactctggtgctgtttgggaaaacatttgctgtaactaggtttagggtattcagtctctgccagtgcttaggagctatatttgccaggtgatttccctgtcgcagggattagccagtgatgtgaaacatttgattaagggactaatagaaatctttcctggggtacatgagtggtggctgttactggggtgccccctcctcaactctttctctctgtatttcgagtaagtttgtagtggtgagtcatgggatacagttttttaatcctatgaagaatcttggtaggaagcaaagttctgttaggtatattgttaattaagccctttaaagtttctgcgtagtaactcagaaacgagccttgttgttttgtcagaactatgccatgactcatccacnn

SEQ ID NO: 20042 - DNA, 246 bp, Homo sapiens
  misc_feature 244, 245, 246: n = A,T,C or G
cgtccgtgataaagaagtaagcgatgatgaggctgaagaaaaggaagacaaaactgagtacttggaggaacgaagagtaatgggatatccaataaactgagaatgtttcttcacaatctcctttattcttcgttcctccaagtactcagtttggtcttctttcaggtgtaggaacgtgataaagaagtaagcgatgatgaggctgaagaaaaggaagacaaagaagaagaaaaaaaaaaaaaannn

SEQ ID NO: 20043 - DNA, 539 bp, Homo sapiens
  misc_feature 1, 539: n = A,T,C or G
ncgtccagaatttcttttgttggacaaccacagctggggctaggaatggttcagaaggtttaaggccggaaagggaaatgaaggggcccggcgctaaccctctaaggacctgttttgcttctgtttaaaccaaatgggcagtctgtcattacacacaccctgggtcttcatatgtggccgccagtataatggaatgtgcttacaagggccagcaggagtgcctggtcgagacgggagccctggggccaatggcattccgggtacacctgggatcccaggtcgggatggattcaaaggagaaaagggggaatgtctgagggaaagctttgaggagtcctggacacccaactacaagcagtgttcatggagttcattgaattatggcatagatcttgggaaaattgcggagtgtacatttacaaagatgcgttcaaatagtgctctaagagttttgttcagtggctcacttcggctaaaatgcagaaatgcatgctgtccgcgttggtatttcacattcaatggagctgaatgttcaggan

SEQ ID NO: 20044 - DNA, 2643 bp, Homo sapiens
  misc_feature 1, 2627, 2631, 2634, 2643: n = A,T,C or G
ncgagctgctgctggattgaactcagagaagccggggtgttgaagtgttgttttctaaaggagacaatgattcataatttgtgacactgtaaatcctctcgagctgctgctggattgaactcagagaagccgggggtgctggaaatgtaaacaagaatagactgttcattcctgatggcttttagtctatactaacatattgtttgtcatggcatccgagactgaaaagacccatgctttactgcagacttgtagcactgaatctcttatttccagccttggtctgggggcattttgcctcgtagctgacagacttcttcagttttccacaattcagcaaaatgactggcttcgtgctctctcagataatgcagtacattgtgtaattggcatgtggtcatgggcggtagtcactggaatcaagaagaagactgactttggagaaatcattttagctggatttttagcctctgttattgatgtagaccacttttttctagctggatccatgtctttaaaggctgctttgactctcccgcgaagacctttccttcactgttctactgtgattcccgttgtggttctgaccctgaaatttactatgcaccttttcaagctcaaagactcatggtgctttcttccctggatgttatttatatcctggacttcacatcatatccgagatgggattcgtcatggtttgtggatatgcccatttggaaaaacttctcctttgccattctggctttatgtaataatcacatcatctttacctcacatctgttcattcgttatgtatttaacaggaaccagacaaatgatgtcttcaaaacatggagttcgtattgatgtctgaggtacacggcagtcttagagaagcaaatggctcagatgatgataattaagagtagccaacattaaagttaatttttaaaaatacagttaggtgtttatattatttagttattataattctgcaatcctcttgctcaggaagtgtatacaacttttttaaaaattatacttgttattattctacttctctcttctatgacaactctagtgcaatattagagtttcatttattccacaatatatttttactgtttttttctatttatctggctttactagtagttcttttagattaacatccagttcattttctggaaatatacctggaatttagtccatttcctaatgaaaaacagctcaaattttagggtaactaatttgtaaagagttaacattatatttggatccaattttcctgagatattgaaatagtgaaatcaccaaataaatgatatgaatcatttaactatacaaatgtatagttaatgctaacatgtatttattttcatatatgttgatcctgagtgaaatttaatttgcagaatgctttatgagttatgattactggcaaaaccttcagagcacttgtgacacatcattataatatccagtagctaacattagatctagcttattatttcagaaattaatttaggaaataattattaaaacatgttggctacagtagcactttactgaagtagtattttttggtatctctagcctagaatctcgtgtgttagttttaactgttttgaaaataataagtaacattaacaaaatgttgatatttggatcataaccgtaacatttgaatttatgcaaaaaaaagaccagaaatgtcatttcaaatgtaaattcctgaatgtaccattaaaattattttagttgctatcagtttgtttatatactattttatatactattctaaaatattttactctgcctgatactgaaagacagcatatatttttttcaaaataaagttttaggaaatttgctttttcctttttctttcaggttgatcttctattaaaatgattcctctttattagagaaggaaaatttagttgctatacatcttatatttgcacagtttattaaagtcagtgccctaaaggtacctgcttttctttgtggcatatatggcatctgctgtcttcagattttcttacacttttgtgatttataatgttagtgattggtgccttattctctgaggaaagatggagggttcataaagcaatgccttatccacagcagattttcttgtatattaagttaaacagaattctgtaaattattatgaaggttcaagctctttaggggagttttttttcttgttgttaacaaattggttgcaatctattatattttgcaattgattagatattacagtctacttatttttcaagagtaattattgtataagtttggttggtataatggtaaatattatatagtgggggtaaatttgattagagttttttttttaagcactggcttcagaaatccatggaaataaagtctgtatcttgtgtaacaattcctgactaaatggcaaaaccttttctactttttctttcttcatattaaacaaataaatattattaaaatatagggccttatttaagaatgctacatagattacaggcgtgagctaccgtgcccagtcaaaactctccgtttaattttcacctctttaactcggccctttctgaggcagcaaccttcccactctgacccttaggcagaccacctgggtcctgttncttnggncgggggaan

SEQ ID NO: 20045 - DNA, 2189 bp, Homo sapiens
  misc_feature 1, 2, 2184, 2185, 2186, 2187, 2188, 2189: n = A,T,C or G
nnatcttactccacatacgaagtcttgtaatcctacctgtatagagttgccatgcactgtgacttactttgtataatatagttctcaaccctttgtactcatatgcgtgagaaactctcagtatctctcattacacacagtgatttcaacataccataaatgggctgattaaaagtgaggtcactttatgtacaaggaaatactattctctgagttacatggctcagataactcacaaaaccatctacaccacatcaaagtgcatttggggtacacaagtaaagcctctactatcagctacaaattcatagagcctggaacttccaggaaaatcaagcaaatataaagaatctgaatttagaagtcaactaatacaataaaaaagtaatttttaaaagcctgattaaattttcagttaaaatattcacataatactacacactttgagaacttttagtaattaaaagaatggcttttaaaacttacttaaaactgtttaatgagaacaggtggctagagaagcattttataccacagatgattaaatggactcaccttgtagaggggtcatgaaaaaaatgagttaaaaacaagtaaagtgcgttaccagatcagtaaaataatttggaaagctatacatacttcaagaaaacgttaatacatttccaaaaacactaaatgttaagctttttgtcttgaaaaatacacaaaaatgttttatttaaaagataaaagtagaaattactctttaaaaatcaacaaagtaaaattttgagatacaaaatggtatattaggggtggggggagttttctttttaaaaaataataatgactaaaggaaactcatgaagtttaatatcaatgtgaaaaattactataaaatgatttttagccccacttgttaagaaactatattatatagtattatgtgctatttcttttctagagcaccaaataatcatctgatattaggtgttttacactgtaaatgagctaatttgtttatttatttatggagataggtctcactctgtaatccaggctggagtgcagtggaataaacacagctccttgcagcctcgacctcctgggcccaagcaatcctcctgcctcagcctcccaagcagctgagaccacaggtgcacaccaccatgtctggctaattattaaaaaaaaaaaattgcgtggagttggggtctcaccgtgttgcccaggccggtctcaaactcccgggctcaagcaattctcacatctcagcctcccaaagtgctgggattacaggtgtgagctactgggcccagccctaatttgtttttaaatccaaaaataaatcaacaacagaagatagcactctaacttttactattttaaaatattttctgcatagcttccccaaatattagcattctaattgtgaccagcattatggtttttaatgagcctaatccaagtaaacaataaacaaatgcgcatgaaaactgtgagaaataaccattggtgtatgcttatgttccataaatagttatcaagtttacctttaaattgcatgtttagtttttccttacaacttaacactagatacaggaaactgtagaagtcataaacaaagactaaacaaaatcctctcgtcttgctaagatgtgtacatgattgcagtagacttatgctgaatataaatatatgttacatacatgtctcttattctatacaaaatctcagccaatattttcccacagaggagaggaatttgttctctcaaattgaaagtttttgccctttaaaaaggttattttaaatagccctaaagaaatatgttctgaaaataacagttgtatcatattccacttactattttccggttgaaaacttcaataaaataagtttaccatagtcaataagcctgttcaatgaacactgaaaaatacaaatttatccagagtgattacaaatgaaaatgtgtgctatttcaaaattacatgcacctctttaaaaatcagggcaattaatagagcgcttaaatcatattagctgagttcaaatttggcccctaaacaatacttaaaatttccttattcctttatactattttacaaaataataaattacttgattatcataattttcttttgctacttatttcaaactgtaaagtcaggactgcaaactgatgtaggaatcttatannnnnn

SEQ ID NO: 20046 - DNA, 1131 bp, Homo sapiens
  misc_feature 1, 2: n = A,T,C or G
nncgtccgttcttgtgtgccaatgtatacctaacgggagtcccagaagacagggagagaaaaaaagaaagaaataaaaagaatatttgaatttaaaattgcttgaaaatgtctcaaatttgatgaaaaatattactctgcacattcaacccatgaactataagttgtataaaatcaaaaagtttcacaccaaggcgtgtcatagccaaactgtcaaaagccaaagacacagaatcttgaaagcagtgagagcaaagcagacaagggatccccaataggattaacagcagatttctcatcagaagccatgcaagccagaaggctatgggagacatactcaaaatgctgaaataaaagactgtcaacaaacatttccacatccagcaaaaatcaaaaacgaaggagaaatctgttgcatgtgagctgaatagaatttgtattctgctgttgttggatgaagtattctttaaatgtcaattagatcaatttgattgatgatgctcttcagttcaactatattccctatctgataattccagaatctctatcatgtctgagtctgggtctgatgctttcattgtttcttcagattgtgatttttcttgcctcccagtgtgacttgtaatttttaattgaaagctggatatgatgtatttggcaatgggaagtgagggaaatatgtttttagtgtgagggtttatgttaatctttctcagagttgggctgtttaatgttttgctgtggtctgaatgttccttaaaacttgtgtgttgaaacttaattattattgtcatggtattaagaggtggggcctttgggaagtgattaagacatgaaggctccacattcatgagtggattcatgctttttaaaaggactggaggaaagtagtgtaggctatttttttgcccttgtgccttccaccatgtgaagatatagcattagcccctcctgccatgtaaagactcaggaagaaggccctcagctggacatggtggtgcatgcctgtaatcccagcaccttgggaggccatggcaggaggatcacttgagccctggaggtcgaggctgaagtgagctgtgaacatgccactgcactccagcctgtgtgacagagtaagactctctgtatt

SEQ ID NO: 20047 - DNA, 3084 bp, Homo sapiens
  misc_feature 1, 2, 3082, 3083, 3084: n = A,T,C or G
nncggcacatgcgtgccccagagctgaggggcggccgggccagaacggcttgtgtaactttgcaaacgtgccagaaagtttaaaatctctcctccttccttcactccagacactgcccgctctccgggactgccgcgccgctccccgttgccttccaggactgagaaaggggaaagggaagggtgccacgtccgagcagccgccttgactggggaagggtctgaatcccacccttggcattgcttggtggagactgagatacccgtgctccgctcgcctccttggttgaagatttctccttccctcacgtgatttgagccccgtttttattttctgtgagccacgtcctcctcgagcggggtcaatctggcaaaaggagtgatgcgcttcgcctggaccgtgctcctgctcgggcctttgcagctctgcgcgctagtgcactgcgcccctcccgccgccggccaacagcagcccccgcgcgagccgccggcggctccgggcgcctggcgccagcagatccaatgggagaacaacgggcaggtgttcagcttgctgagcctgggctcacagtaccagcctcagcgccgccgggacccgggcgccgccgtccctggtgcagccaacgcctccgcccagcagccccgcactccgatcctgctgatccgcgacaaccgcaccgccgcggcgcgaacgcggacggccggctcatctggagtcaccgctggccgccccaggcccaccgcccgtcactggttccaagctggctactcgacatctagagcccgcgaagctggcgcctcgcgcgcggagaaccagacagcgccgggagaagttcctgcgctcagtaacctgcggccgcccagccgcgtggacggcatggtgggcgacgacccttacaacccctacaagtactctgacgacaacccttattacaactactacgatacttatgaaaggcccagacctgggggcaggtaccggcccggatacggcactggctacttccagtacggtctcccagacctggtggccgacccctactacatccaggcgtccacgtacgtgcagaagatgtccatgtacaacctgagatgcgcggcggaggaaaactgtctggccagtacagcatacagggcagatgtcagagattatgatcacagggtgctgctcagatttccccaaagagtgaaaaaccaagggacatcagatttcttacccagccgaccaagatattcctgggaatggcacagttgtcatcaacattaccacagtatggatgagtttagccactatgacctgcttgatgccaacacccagaggagagtggctgaaggccacaaagcaagtttctgtcttgaagacacatcctgtgactatggctaccacaggcgatttgcatgtactgcacacacacagggattgagtcctggctgttatgatacctatggtgcagacatagactgccagtggattgatattacagatgtaaaacctggaaactatatcctaaaggtcagtgtaaaccccagctacctggttcctgaatctgactataccaacaatgttgtgcgctgtgacattcgctacacaggacatcatgcgtatgcctcaggctgcacaatttcaccgtattagaaggcaaagcaaaactcccaatggataaatcagtgcctggtgttctgaagtgggaaaaaatagactaacttcagtaggatttatgtattttgaaaaagagaacagaaaacaacaaaagaatttttgtttggactgttttcaataacaaagcacataactggattttgaacgcttaagtcatcattacttgggaaatttttaatgtttattatttacatcactttgtgaattaacacagtgtttcaattctgtaattacatatttgactctttcaaagaaatccaaatttctcatgttccttttgaaattgtagtgcaaaatggtcagtattatctaaatgaatgagccaaaatgactttgaactgaaacttttctaaagtgctggaactttagtgaaacataataataatgggtttatatatgtcatagcatagatgaatttagaaacaatgctcctactgtttaaatacatatggacacatctggtgctgagaaagaaacaaacacattaccattggtgtcaagaaatattactatatagcagagaaatggcaatacatgtactcagatagttacatccctatataaaaagtatgtttacatttaaaaaattagtagataacttcctttctttcaagtgcacaatttcattttgacttgagtcaacttttgttttggaacaaattaagtaagggagctgcccaatcctgtctgatatttcttgaggctgccctctatcattttatctttcccatgggcagagatgttgtaagtgggattcttaatatcaccattcttgggactggtatacataaggcagccgtgaaactggaaagtcattttgatgactgatgtgatacatccagaggtaaaatgcatttaaacatattaaagtatttgccaaagatacaattttcttgctgacataaaaatcacacaaacaagtcccccccaaaccacaactgtctctcaaatagcttaaaaaaattgaaaaacattttaggatttttcaagttttctagattttaaaaagatgttcagctattagaggaatgttaaaaattttatattatctagaacacaggaacatcatcctgggttattcaggaatcagtcacacatgtgtgtgtgtctgagatatagtctaaattagcaaagccttagtattcatacttgaggttggtgaacaaggacaatattctttctgcaaaccagactgtgctgctatgagacagtgtgattcctttggaatgtgaacctgttccttataacattgcaaattggttaccaattcaagaaaacatacttaatagggctagaaaattcatttacagttaatcaagattccgccaattcaggacaagccgcctttgagaaaaacattatttctcggcatcacgcagaaccgggagtatacggcacaaaggtctctcaacacatcacaaannn

SEQ ID NO: 20048 - DNA, 2444 bp, Homo sapiens
  misc_feature 2424, 2425, 2426, 2427, 2428, 2429, 2430, 2431, 2432, 2433,2434, 2435, 2436, 2437, 2438, 2439, 2440, 2441, 2442, 2443,2444: n = A,T,C or G
tcgacccgcgcagcgggccgccgccagtgctgcgggctccgggcaatggatgcccccggggccctggcccagaccgccgcccccggtccgggcaggaaggagctgaagatcgtgatcgtgggcgacggcggctgcggcaagacctcgctgctcatggtgtacagccagggctccttccccgagcactacgccccatcggtgttcgagaagtacacggccagcgtgaccgttggcagcaaggaggtgaccctgaacctctacgacacggccgggcaagaagactatgaccggctgcggcccctgtcctaccagaacacccacctcgtgctcatctgctatgacgtcatgaatcccaccagctacgacaacgtcctcatcaagtggttccctgaggtcacgcatttctgccgcgggatccccatggtgctcatcggctgcaagacagacctgaggaaggacaaggagcagctgcggaagctccgggccgcccagctggagcccatcacctacatgcagggcctgagcgcctgcgaacagatccgagctgctctctacctggaatgttccgccaagtttcgggagaatgtggaggacgtcttccgggaggccgccaaggtggctctcagcgctctgaagaaggcgcaacggcagaagaagcgccggctctgcctgctgctctgacccagggcagacagacctcacgacagcactgacagggcccgggggcccaggtgccgattgcaccagggaggctgccccatcccgaccctccagctcatggtgtctggggcctgcggctagactcttggaacattctggaactctctcctttcctggctggggctctgaccacaaactcccctccaggctgcccctgggacatggtggtgatgtgggtgcaggagccagtgtctgttgtcgggactcgcaagtgccctcatcacagccacccccaccacgagtgtctccccagtgcagactcaagttatgcttgaaatgaaaaagtctatctggtagtgggtaaacgtagacctggcactgttccacgcgggcgccccaagcctgccactcctgtgtccctgcctccctgggctcccgagataggcaccactgtatcctccagctccttccttccttcccccaggaacacggaggccaccgagggggctgggcctatcaggaggacacaggctgcagcctggcacccacccctcccatctccaccccacatggaagacttgtcttcaacttggccactgtctttgcagagctgggcacatgtgcccagggggcagaaaaaatggcttctcagttgttaaaagtataccctggaccacccatctgaccatctccttaaggtttcacccaaagcccccagtgtcagagacttgggatgggaagaacagtcggctcccagtgtggtcatgagcaagttttctgtggactgttccccccactgtggtaggacaggactggcccacttagtcctcaagctcccaacctgctgtccctcaagccccgcttctaccagcctgtggagttcaggaggcgagacatcctggcctcctttgagaactgatgggatctaccccctgtccacgcgggacagtttctcagaactggttcatagaccacctgtgtcaccaacagccagatacctaatccctgagcctcctttgggaaggtctggggccgagggtctgggaatttttttttttttttttttttttgggcagagtctcattctgtcactcaggctagagtgcagtggcatgatcttggctcactgcaagctccacctcctgggttcaagcgattctcttgcctcagcctcctgagtagctgggactacatgcgcacaccaccacgtccggctaatttttgtatttttagtagagacagggtttcaccatgttggccaggctggtcttgaactcctgacctcgtgatccacccgccttagcctcccaaagtgctgggattacaggcgtgagccaccgtgcccggcccaggacttttaaaacaagcatcccaggggattccggtgcctaccagaagtcgcaagctgcttggctctggagggcgcctaggagtcggtgtcgcctaagatgggataatggcttcaggcaactcctagccttccccatatctcctgcctcagcccccctggcccagtgctggggcgtcagctaaacctgagcttccaagaagtcaggttgccaaaggaaggagccttctgagaccctccccaacccacccaggttcccaaggccctgccgtaccctggggaatcaaccaaggagttcttgttctcgaagaaccccaggcctcatgatggtctacggtagaggtccaacaactacagcctgtgggccacatctggccacagcctgatttgtaaataaagttttattggaacacagnnnnnnnnnnnnnnnnnnnnn

SEQ ID NO: 20049 - DNA, 6066 bp, Homo sapiens
ccacgcgtccgctgtgaaggaaactgtttaaccggatcccattgtacccagagtgcagagccgcctttccagcatgcaggggctgctcagcgtttagtcacatcaagaaatagaacagaattcagccatggccccaagaaagagaggtggacgaggtatttcattcatcttttgctgtttccgaaataatgatcacccagaaatcacgtatcggctgcgaaatgatagcaactttgcgcttcagaccatggaaccagcattgcccatgccccctgtggaggagctggatgtcatgttcagtgaactggtggatgaactggacctcacagacaaacacagagaagccatgtttgcacttccagctgagaaaaaatggcaaatatactgtagcaagaaaaaggaccaggaagaaaacaagggagctacaagttggcctgaattctacattgatcagctcaattccatggctgctagaaaatctctgctggctttagagaaggaagaagaagaagaaagaagtaaaactatagagagtttaaagacagcactgaggacaaaaccaatgaggtttgtaaccagattcatcgacttggatggcctatcatgtatcctcaactttctaaagaccatggactacgagacctcagagtctcgaatacatacttctctcattggctgtataaaggcgttaatgaacaactctcaaggccgggctcacgtcctggctcattctgagagtattaatgtaattgctcagagtctgagcacagagaacattaaaacgaaggtggccgtgctggaaatcttgggcgccgtgtgcctggttcccgggggccacaagaaggttctgcaggccatgctgcactaccagaagtatgccagcgaaaggacccgctttcagacattaattaacgacttggataaaagcactgggcggtatcgagatgaagtgagtctcaagactgccatcatgtccttcattaatgcagtgctcagccaaggtgcaggagtggagagtttggactttagacttcatcttcgctatgaatttctgatgttaggaattcaacctgtaatagataaattaagggaacacgaaaattcaacattagataggcatttagacttttttgaaatgctccgaaatgaagatgaactagaatttgccaaaagatttgaactggttcacatagacacaaaaagtgcaactcagatgtttgagctgaccaggaagaggctgacacatagtgaagcttacccgcatttcatgtccatcctgcaccactgcctccaaatgccttacaagaggagtggcaacactgttcagtactggctactactagatagaattatacagcagatagttatccagaatgacaaaggacaggaccctgactccacacctttggaaaactttaatattaagaatgtcgtacgaatgttggttaatgaaaatgaagttaagcagtggaaagaacaagcggaaaaaatgagaaaagagcacaatgagctacaacagaaactggaaaagaaagaacgagaatgtgatgctaagactcaagagaaggaagagatgatgcagaccttaaataaaatgaaagagaaacttgaaaaggagactactgagcataagcaagtcaagcagcaggtggcggacctcacagcacagctccatgagctcagcaggagggccgtctgtgcttcaatcccaggtggaccctcgcctggagcaccaggagggccctttccttcctctgtgcctggatctctccttcctcccccaccacccccacctctaccaggtgggatgcttccccctccaccgcctcccctccctccaggtggccctcctcctcccccagggcctcctcccttaggggcaatcatgccacctcctggtgctccaatgggcctagcactgaagaagaaaagcattcctcagcccacaaatgccctgaaatccttcaactggtctaaactgcccgagaacaaactggaaggaacagtatggaccgaaattgatgatacaaaagtcttcaaaattctagatcttgaagacctggaaagaaccttctctgcctatcaaagacagcagaaagaagcagatgccattgatgacactctgagttccaaacttaaagttaaagagctttcggtgattgatggtcggagagctcagaattgcaacatccttctatcgaggttgaaattatccaatgacgaaatcaaacgggcaattctaacaatggacgaacaggaagatctgcccaaggacatgttggaacagctcttgaaatttgttcctgaaaaaagtgacattgacctattggaggaacataaacacgaactggatcggatggccaaggctgataggttcctttttgagatgagccgaattaatcactatcagcaaaggttgcaatcgctgtacttcaaaaagaagtttgcagagcgtgtggcagaagtgaaacctaaagtggaagcaattcgttctggctcagaagaggtgtttaggagtggtgccctcaagcagttgctggaggtggttttggcatttggaaattatatgaataaaggtcaaagagggaatgcatatggattcaagatatctagcctaaacaaaattgctgacacaaaatccagcatcgacaaaaacattacccttttgcactatctcatcactattgtggaaaataagtaccccagtgttctcaatctaaatgaagaattgcgagatattcctcaagctgcgaaagtaaacatgactgagctggacaaagaaataagtaccttgagaagtggcttgaaagcagtagagacagagctggaatatcagaagtctcagcccccacagcccggagataagtttgtgtctgttgtcagccagttcatcacagtagccagcttcagcttctctgatgttgaagaccttctagcagaagctaaagacctgtttactaaagcagtgaagcactttggggaagaggctggcaaaatacaaccagatgagttctttggcatttttgatcaatttcttcaagctgtgtcagaagccaaacaagaaaacgaaaatatgagaaagaaaaaggaggaagaagaacgtcgagctcgcatggaagctcagctcaaagaacaacgtgaaagggaacgtaaaatgagaaaagctaaagagaatagtgaagaaagcggagagtttgatgaccttgtttcagctttacgctcaggagaagtgtttgacaaagacctttctaaattgaaacggaatcgcaaacgtattaccaaccagatgactgacagcagcagagagagaccaatcacaaaacttaatttctaattttccatgaatactttttttttagaaagctcattagcagccctctaaagtgactagaacgtttcattacactgccttgcaatccaaacagtggcaattttttccttcatctgtgactgaaagtgtgaacgtgtgtatgtaaatgtatgtgtgtatatattaaaaaatgtatatagatgtctgagtgttgtctggagacctatacgtatggttaaaaagatttatgttaatgtatgtgctccaaaacctttcgtgtatgcattcacattgagagtggctcattttctttccccgaacgccatgactgttcagaagcacaatactatctcctgaaagagataagagacattccctagattcaaaggcaaaacagaagaaacaaacaaacaaacaaacaaagcttgcaaaatattttatggtttccaagcttgatatcctttaaaattattttcattgatggaactggagttgttggaaaaacatagatttaaaatgatttttgatagctgacattgtgatgttgatgtatcacatcagtaataggaccagctttgaatttctgacattggtgtggggatacagtctgtaaatgtttattgagaacatcttgcacacaatttgaattatgtagaatgtcaatcaagtttttgtatatttaaaagttggacatcaattttttcccctgatttcatcaagttatctctgccaagtgctcttgataatttcttcagatttttggaaaaaaacactatataaatgcaatccatgcttttttttaaaggacaacattgccagagtatgcttgttctaacaatatagatatataaaccttaaaaataataaaatatctcacccaagacttaaaggaagaattctctgaagggataaagattactaaaaaaaaaaaaaaaaaaaaaaaaaaaattaatggggtgcctttttgttatagtttctattttctgttttgtaggacaagctgcattttctgtaaatataggtctggactaaaggatacataaagaatgcacaaaatgtcaacatcagcagagatgcccagatctatttatctctaagtatatttgaagtgattgctgtttatatgttgtcattttaaaattgtgtgtcagtaaagctacctgtaaaatttcagtccaaaaaaaataaagctctcagggagacatgaataaaatcaatgaacattagaaaataaaatatagatgcttaccattaacctaccaactcttaatatccttaaattatgtgatatataaagaggactgttacttttttactttttttttttttttttttggctttgctttatttatttgtagttgggggctaacgttttctcttttctttctattgatcctgttgtggttgggtttcctgtggagagagtagtttgtcctgttgcactagaacattatttactcactaaattgagtttttcagtcaattaacaaatatttattaagttcctactatgtaccaggcatagtagggctacaatggtaagcaagacagagtccctgcccccaaagagcttatattctaatggggatattaagggatgaatagaataccaatgtgtgcactgtacaggaatcatactatttaaaaataatttgtataaactataatgcttagcacagatggcgagttatctgtgctatgtgaaagctgtgaaatagtgctctaagagttgtcaagagctgtggttttacatcttttcctcattgcaaatttagtgactttctacacactatatggaaataaatgactagcaaataaaacagtcataaatacaaagcagaggttgcactcccccaatcccgagttaacccaggtctgcaataacaccatgttaaaggtgcagatagagacttggctcaaaaaggcttggagatgaggaagattggaatataatgatggttttgtctgttccttaactaaagtgcctctatgtatattcttttctatttgtagcaggataaatttggtctggctcagttttggaactgtattttgaaaatggctttgtcttacagtttaaggaatagacaggtggagggaaagtcacataaaggagcaagtttgtgtagctgtccctcttgccccttttaatcatcctcctttgatatggccatcctggtgggcctcctttgccatttccatttttggtttctttccctgaaaactgtgtgcaggtaattccatgtgccattgttgaaaagaaaaaaaaaaacaaaaaaaaacctactttttagattggtgctggtgtaagtagccacttttctctcttgggtgtgtattttaaactttttttgtttttttaaattaatgccaaaaagaaaatgcataatttgtaaacttaattatatgtcttatatcttattagcttagtagttggaaccacttagtctttaggtgcaagactgttgttagatagtactgagaaaaaaaaaagtatgtgttatgagactgtacatgtttttttaaaaatagcaatatgcaataaagagatgaattcattgggtgtacatatatgctttctatgaattattaaaacagtgtcatcaaactgctttgcagtttccaccattgaatttcaattttgcaaattgttcactgaatcggaaatatatacctgtttttaaacttgtacttactggacctagaagaatatagttttctattatggcagcattcagtatgttcaggttatcata

SEQ ID NO: 20050 - DNA, 2506 bp, Homo sapiens
  misc_feature 1, 2, 3, 4, 5, 6, 2503, 2504, 2505, 2506: n = A,T,C or G
nnnnnncacaagctctggtgccccaaaatggctctggtcctcagatatagttggttgccaccctgggagtgagaggaaccaggaaagcagcacccaggaaggcagggggctccctttatccaaggaggtggctgtgcaggtggccaccacaggtggcaggaaccacaggctggggcactccggagtcaggagtgagtgggcaggttgactggcatcaggcagcctctcagccagggccctctccgcatcagcatgaactccaggaccgcatctgctaggggctggttcagcagccgcccacccacctctgagtctgacctggaacctgccacagatgggccagcctccgagaccactaccctcagcccagaggccaccacctttaatgacaccagaatccctgatgcagctggtggcacggccggcgtgggtaccatgcttctgtcctttgggatcatcacggtgataggcctggctgtggccttggttttgtacatcaggaagaagaagaggctggagaagctacgccaccagctcatgcccatgtacaacttcgaccccacggaggaacaagatgagttggagcaggagctgctggagcatgggcgggacgccgcctctgtacaggctgctacttctgtgcaggccatgcagggcaagactactctgccctcccagggcccactgcagagacccagccggctggtgtttaccgatgtggccaatgccatccatgtgtgagtggcctgggacaagcctggacttctgatagagacccatcacggtgcctacagagctccccactccctgattgtcaagacctactctgaagatcttccctgccaagacacaagagggctgagccaggtcctagctgttctccagacccacctgctgactttagactctaagagagggccctagccaggctggacttctgaccactgacttctcctgacctgagggccctggcacagagggcatccctcatgctgagaaggtcaagagcctctgctggcttcctcatcccctgtccagatccctcacatcagggtctgccccgctaatgtggaggaaatgagggagatacggagtgggagggattgggggaggaaaggggaggtttccctctgttagggagagacctgttttttggaatctggagcctcctctggggtggggagaggaaaccacccaagttatagggacagggtagggcagcatctgttatgggccctgagaagcccagagatggagctgaaactgtccagtatgcaaggatgccaggagaagggcaattcacacccagggtccatccatactacggagggtccaggaggtctcccagccacccatccttggcaaccagatgttactggggccaagctaggatgggagctgagggggaaggaagtaggggaatggaagtggaaggatgcagcccccccagacctgccgagaggcctcatgcatgtgcatgagtgtgcccatgggcagacatgtgcctgtcccagcacagcgggcagaatgagattgtccacactggccccaccctccaagtcgacctctaccccatggtatgtagtggagcatcagggtaggctatcttctctgccttcaatcttcagggactgcagggaagagggaagcacgcacagcacggttcctctctccactgcattgtttcactgggctcacctgcttctgaaaacggctccctgtcttgggctctaatgaggatctggggttgggagaggctgttggtctgagggcagtaatcacaggctgcaggctagagggggcagttatgactgcctgaaagtgggtgagggattgcacttcagaaaaacatctaaaaaacttagtctatgtttgaattccccacctccatcccatctatgggaagagccgttcagtgtttagagagtggggagatgggtccctgcacttggcctctccataagccttggagggtcagggctgataccaggggtcctggcaagccattgggcagagacagaccacaagagcagggcatttttttacgctgggcatacatatgcacacaagcatgcacagaggcatgtcccgtgcccagcctctccaccgtcactgtccgctgctggctggaggggatgcaggggtagtgtatgcagaccttccactgggcaaatgccatgtgtcaggagggaaaggcctaggaagcccccatggggaaggttctggatttattccctcctctaaatgctataaatacgttagcacttgagtcgactggaggctgccaggaattcaggatgcatacagctgtaatttaacccagagcagctccacgtgagagcattaaagatgtaatgaagatgtttaaaaaaaaaaaaggggggtctaaaaattccgggccgattactggcattttgaaggccaaaggggtaaaaagaagggggaaaaggaggaactcggtttggagactctggtgatgaccacgaaggggaatgtgactcgnnnn

SEQ ID NO: 20051 - DNA, 592 bp, Homo sapiens
acgcggggagccgtctctgtccggtgctctcatgtcatctcagagttccagcttatcagaggcatgtagcagggaggcttattccagccataactgggctctacctccagcctccagaagtaatccccaacctgcatatccttgggcaacccgaagaatgaaagaagaagctataaaaccccctttgaaagctttcatgaagcagaggaggatgggtctgaacgactttattcagaagattgccaataactcctatgcatgcaaacaccctgaagttcagtccatcttgaagatctcccaacctcaggagcctgagcttatgaatgccaacccttctcctccaccaagtccttctcagcaaatcaaccttggcccgtcgtccaatcctcatgctaaaccatctgactttcacttcttgaaagtgatcggaaagggcagttttggaaaggttcttctagcaagacacaaggcagaagaagtgttctatgcagtcaaagttttacagaagaaagcaatcctgaaaaagaaagaggagaagcatattatgtcggagcggaatgttctgttgaagaatgtgaagcaccctttcctg

SEQ ID NO: 20052 - DNA, 1236 bp, Homo sapiens
  misc_feature 1229, 1230, 1231, 1232, 1233, 1234, 1235, 1236: n = A,T,C or G
cgacccacgcgtccggactgatcataaaccaatgctggtattgcaccttctggaactatgggcttgagaaaacccccaggatcacttctccttggcttccttattttcttgaggcaggtcgcacgttctacctgcccaagacgtgtgatatcagcttctcagatccagacgacctcctcaacttcaagctggtcatctgtcctgatgagggcttctacaagagtgggaagtttgtgttcagttttaaggtgggccagggttacccgcatgatccccccaaggtgaagtgtgagacaatggtctatcaccccaacattgacctcgagggcaacgtctgcctcaacatcctcagagaggactggaagccagtccttacgataaactccataatttatggcctgcagtatctcttcttggagcccaaccccgagacccactgaacaaggaggccgcagaggtcctgcagaacaaccggcggctgtttgagcagaacgtgcagcgctccatgcggggtggctacatcggctccacctactttgagcgctgcctgaaatagggttggcgcatacccacccccgccacggcacaagccctggcatcccctgcaaatatttatgggggccatgggtaggggtttggggggcggccggtgggggaatcccctgccttggcttgctcccccttcctgccacgtgcccctagttatttttttttttttaacaccatgtgattaaggtcggcgctgccttcccccgagccactcagcgatgggaaatgaatgtggctgtgtatagccccccctgctgggtgcttggtacagcccccactcttgggcttgtggagtgggtggaccaacgggcctggttagctgggcccaaggaaaccaacccttcaacctctggaggtcccaccaggctattaaaggggaatgttcactgcttgcgaacaaactcaaacaaacgaaaacatcacaaacaacaaccagggcggggcgccgaaaacagaatcccccgagggggccccgagatacgcgcaccccgtttgggtgtacgagggggccccataaggagcccaataaagcaagccggcagcggtgttacaacgctgtgcgggaacaagcaccgtcgtcctggcggaccaccatcgggggggcaccagggcaccaccacagaaaaagcccgaccataaagtacgcgaggtacacccaactggcgaagtaggataaaacnnnnnnnn

SEQ ID NO: 20053 - DNA, 548 bp, Homo sapiens
  misc_feature 1, 2, 3: n = A,T,C or G
nnnccgctgtggctgcggcggggccggggctggggtcggggccaggggtcggcggtggcggcggacgggcgtacggtgcctgggctctctccgctccctgaggcgccgctggggagtcgcaccctgatgatgggacctgtgaattcaccggggtgccaagtcgctttctgtgtgggttgagagacaggctgtgcaagccactgttgcatatgactaactactacaaatcatgctgagaccgagctatttttgctgcttaaaggctttgcagccttgagaggaatgtcgttgacagagaataaaatgaggttgtccatatttgactttaagcagcaatcagctaaacattgagctcttcagctccgactttcttgctctgaaaatcggacaaccaagaaggtcttgatgttatgtgtgacgccacctgaatcataaaccactgatgaacataaccaagagtggtctggtgttgttttcagcaaactcgaattcatcatgtatggagctctcaaacattattgcagagcggctaggggtggagatgggca

SEQ ID NO: 20054 - DNA, 1872 bp, Homo sapiens
  misc_feature 1868, 1869, 1870, 1871, 1872: n = A,T,C or G
actttttaatcattatattctgggattatatctcaaataaaccatttgaagtcaagtccttgtctcactgtctgcttccaaggagacccaggctaataatttaataatagattaacccagacttactatccccagactaacgtacgcgggggcaacggcccgcgcttccgggcagccatccccgcggtgctgacatcccggttgttcttctgtgccgggggtcttcctgctgtcatgaaggacgtaccgggcttcctacagcagagccagagctccgggcccgggcagcccgctgtgtggcaccgtctggaggagctctacacgaagaagttgtggcatcagctgacacttcaggtgcttgattttgtgcaggatccgtgctttgcccaaggagatggtctcattaagctttatgaaaactttatcagtgaatttgaacacagggtgaatcctctgtccctcgtggaaatcattcttcacgtagttagacagatgactgatcctaatgtggctcttacttttctggaaaagactcgtgagaaggtgaaaagtagtgatgaggcagtgatcctgtgtaaaacagcaattggagctctaaaattaaacatcggggacctacaggttacaaaggaaacaattgaagatgttgaagaaatgctcaacaaccttcctggtgtgacatcggttcacagtcgtttctatgatctctccagtaaatactatcaaacaatcggaaaccacgcgtcctactacaaagatgctctgcggtttttgggctgtgttgacatcaaggatctaccagtgtctgagcagcaggagagagccttcacgctggggctagcaggacttctcggcgagggagtttttaactttggagaactcctcatgcaccctgtgctggagtccctgaggaatactgaccggcagtggctgattgacaccctctatgccttcaacagtggcaacgtagagcggttccagactctgaagactgcctggggccagcagcctgatttagcagctaatgaagcccagcttctgaggaaaattcagttgttgtgcctcatggagatgactttcacacgacctgccaatcacagacaactcacttttgaagaaattgccaaaagtgctaaaatcacagtgaatgaggtggagcttctggtgatgaaggccctttcggtggggctggtgaaaggcagtatagacgaggtggacaaacgagtccacatgacctgggtgcagccccgagtgttggatttgcaacagatcaagggaatgaaggaccgcctggagttctggtgcacggatgtgaagagcatggagatgctggtggagcaccaggcccatgacatcctcacctagggccccctggttccccgtcgtgtctcctttgactcacctgagagaggcgtttgcagccaatgaagctggctgctcagacggtcgacattgaatttgggtgggggttgggatcctgtctgaagtacagactgttcttgctctaaaaacaggactgtccctgatgggagccaggccacagggaggaggcttctttgtgggtctctcctgcagagggtgggggtctcagggtcttaggtgatacgggagagaaagaacgtgccaggcaggaggccccctgaagtctgtgtactccgaggtggatctccatccccatccacctgtacggacatcttttccgttgcggtttgagaatgttcctataataaacccctctgctttgttcaacaaaaaaaaaaaacaaaagtcggatttcggccgaaagagaatggaggcacgtcggccttgaaggagcggccattcggtatcacgtgactaacaaggtgagaacagtatatagacatgannnnn

SEQ ID NO: 20055 - DNA, 2288 bp, Homo sapiens
  misc_feature 1, 2, 2286, 2287, 2288: n = A,T,C or G
nnagggagtcgacccacgcgtccgcagccggctggctcgagtggccttcgtcgtcccttggcgccctgggagagtcgctgacgggtggactgacggaccgcctgaggacggccggccagggcggtgaaagcgccagccctatggcgcgggtcgcgtgaggcggaaggccgaggacggccggcggcggcgcccgccccggcgatgcgggccccgcccgtcgcctcaggtgccatttggattgtactttagtggcacgatgtactctgagtggaggtcactgcatttggtgattcagaatgatcaaggccataccagtgtgctgcacagctatccagagagcgttggacgagaggtggcaaatgctgtagtccgtcctcttgggcaggtgttaggtaccccttcagtggctggtagtgagaatttgttaaaaactgacaaagaagtaaaatggaccatggaagtaatttgctatggactgacccttccattggatggagagactgtaaaatattgcgttgatgtatatacagactggattatggctttagtgttgccaaaagattctattccattgccagttattaaagagcctaatcaatatgttcaaactatactaaaacacctacagaatctttttgtaccaagacaggaacagggttccagtcagattcgactatgcttacaggtcctgagagccattcagaaactggcccgtgagtcatctctcatggcccgagaaacttgggaagtcttactgttgtttcttctgcagattaacgacatacttctggccccaccaactgttcaaggtggcattgctgagaatctagcagagaagttgattggtgttctctttgaggtgtggttactagcttgtactcggtgcttcccaacacctccttattggaaaacagccaaggagatggtggctaactggaggcatcacccagcagtggtggagcagtggagcaaggtcatttgtgcactcacttccagattgctacgctttacatatggtccttcatttcctgcatttaaagttcccgatgaagatgccagtctgatccctccagaaatggataatgagtgtgttgcacagacatggtttcgctttttacacatgttaagtaatcctgtggatttgagtaacccagctattataagctctactcccaaatttcaggaacagttcttgaatgtgagcggaatgccgcaagaattgaatcagtatccctgccttaaacatctgcctcaaatattttttcgtgccatgcgtggaatcagctgtctggtggatgcattcttaggtatttctagaccccgatcagacagtgctcccccaacacccgtgaatagattaagtatgcctcaaagtgctgctgtcagtaccacccccccacataaccggaggcaccgggctgttactgtgaataaggccaccatgaagacaagcacagttagtactgctcatgcctctaaagttcagcaccagacgtcctccacctctcctctgtcaagtccaaatcagactagttcagaaccccggccactgcctgcccctcggagaccaaaggttaacagcatcttgaatctctttggatcatggttatttgatgcagcatttgttcactgtaaacttcataatgggataaacagagacagcagcatgactgccattacaacacaagctagcatggagtttcgacggaaagggtcacaaatgtccacagacaccatggtttccaatcctatgtttgatgcaagtgaatttcctgataactatgaagcaggaagagctgaggcttgtgggacactgtgtaggatttttgtagcaagaagactggagaagagattctgccagcttatttatccaggtcttggaattttgttgtttttcatttatatagttttgatagtgaagccattgtgggttggccgactgaaccgatgagtgatgttggtctgaaatacctacagatgtctgtaagtgatcgacatttgcctgaaatctttcattttacctgtctcatcagattgtggtaaggacccttaagaacccttttgtttgagaagtgctaatttatgtcatcttatggactctcttaatatggcgaacattcgaaggacccacttcttggtcaccccatttctagcgcgtatccccgttggcgtccgaattagtcagtgtaatctgcccaggagtattcgggaagcccaaaagcgggcctgttcagccccgacgctgtggcgccacagggggggccgcgaacccctttggggaccaannn

SEQ ID NO: 20056 - DNA, 1326 bp, Homo sapiens
  misc_feature 1319, 1320, 1321, 1322, 1323, 1324, 1325, 1326: n = A,T,C or G
gcgtccgcgcccaccccgcctcgcggcccagctccttcccgcggctctgcgatgcggcccgcagggtgacccgggcgggagtccggggacccgcgatcagccccggaggacggggtggggtcgccccaaacaggagcgccgggaccgctgggaccccgcactcggcgtccgccgccgccgggtagccgggcagtggaggtcccggatgaggcgacaatttttccggccccccctcccagtcccgccccacttccggggccgccactttcactttctcttccgccgaagccgctccccttgcgaagaactggggcctcccgggaggagagagggctttgccttgaaacccgggacgccaggggcgctcccgcaagtgggggtcctccgggacttggaacgccccggctgggtggtgtccgggcgtcctttccccgcttcttcccacctcggctggtcccgtttcctcctgcgcccagtgcggacctgtctcggcgcccgctgccctctcaccgccccacgcaggatcccggcctggtcaccgggcagtgtgatgcttcccgactgccgcggggacagcgaggcacacacagggcttgggccgcgccggaggccacacggcctggctgagttgctcctggtctcccgcctctcccaggcgacccggaggtagcatttcccaggaggcacggtcccccccagggggatgggcacagccacgccagatggacgagaagaccaagaaagcagaggaaatggccctgagcctcacccgagcagtggcgggcggggatgaacaggtggcaatgaagtgtgccatctggctggcagagcaacgggtgcccctgagtgtgcaactgaagcctgaggtctccccaacgcaggacatcagattcctcatggtgcaaaatggccattccagctccatccagccatcacatcacaggaggaagggaagaaagacacccctccacactcttctaaagagcatagctcaaaaattgtatacacttcttccgttaattcctgtggaccagaactgatcccacagctacagttcagtgaggggagactgtatagccaagataatcagctagaattcaggggttcgctggtaagggaagggaagagaatggatactgtcggtctggtccggagacttactcaatgctgaaacacttagcagaatgcctggggttggcccacaaacgtgcgtccgtacaaacagggggctaagatcccggcactcgccgttgtacgggccaagggaaacacgggccacacggagaacaggtcggaccgggggagcaaagaaaggtgcnnnnnnnn

SEQ ID NO: 20057 - DNA, 2845 bp, Homo sapiens
  misc_feature 1, 2831, 2832, 2833, 2834, 2835, 2836, 2837, 2838, 2839,2840, 2841, 2842, 2843, 2844, 2845: n = A,T,C or G
naggcttattgatgtgggcatggcagttccttgaagagctggctgtcctgcagctgcggatctcaggagtcgggggttcatgactggaggcccttcggagggcctcacgcgggccgggtgctcttctcccggcccacagcggtgcagcagagggggcctcttacccccaggcccccatgccccgagcctagttccagaacatatggacagacccagagggcaccagctggttctccctcactctgccctttccagggctggccccagcgggcaggcactccctctgtggggacggggagggtctgctgagcttccttgggctcctcggaagctaaaacccatgggcactgggtggaggtaggcgcaaagacgtccctcagcccacagccctggtgctgcacatgtcctctaatctatcttccttctctccctcacaggccatgaacctggaccaggtctccaaggacaaagcccttcagagcatggcgtccatgtcctctgcccagatcgtctctgccagtgtcctgcagaacaagttcagcccaccttcccctctgccccaggccgtcttctccacttcctcgcggttctggagcagcccccctctcctgggacagcagcctggaccctctcaggacatcaagccctttgcacagccagcctaccccatccagccgcccctgccgccgacgctcagcagttatgagcccctggccccgctcccctcagctgctgcctctgtgcctgtgtggcaggaccgtaccattgcctcctcccggctgctaggcctggagtatgcatcagctcaggaggtgcagcgagacctgacacgtacagcaaacacctgttgtgcacatcggccagacgaaccccgccttctcagacccacccctggaggcagtagatgtgcgccagatctatgacaaattccccgagaaaaagggaggattgaaggagctctatgagaaggggccccctaatgccttcttccttgtcaagttctgggccgacctcaacagcaccatccaggagggcccgggagccttctatggggtcagctctcagtacagctctgctgatagcatgaccatcagcgtctccaccaaggtgtgctcctttggcaaacaggtggtagagaaggtggagactgagtatgccaggctggagaacgggcgctttgtgtaccgtatccaccgctcgcccatgtgcgagtacatgatcaacttcatccacaagctgaagcacctgcccgagaagtacatgatgaacagcgtgctggagaacttcaccatcctgcaggtggtcacgagccgggactcccaggagaccctgcttgtcattgcttttgtcttcgaagtctccaccagtgagcacggggcccagcaccatgtctacaagctcgtcaaagactagggtgccctctgcgcctccttaaggatgcagggtgagcatctcctctccacacctgcctggcacccctgggggggtccaggattgaggattcatctacctgccaggcctcaggcccaggacccaggaggcctccccacctaccccagcacacacactccctgccactgttctgcgctttaattgtgggagaagagaggagaggagggctcagcggtggggcagcctgtccggggcgctgacccaccatcaccctgctctgcccagcctcgcgtgacctcagagaggtggggataggggacaccttcagcctccagcatgtgtggccactgtacccccacccacccttgggggagcatgatgggcaggtgagggcaggatggagaccaagggagtcagtgagcagaggccctgggagtgtccggttggggttggactgaggacagaggggcccacacttccttgcccctttgtgtcccaggcctggtgcccagactccttgcatggcttgtgtggtcctcagactccgcacagcgagcgtaggtctctgggtttcagatgaagtgcccaggctccaggaagttgagggacccacaggagaggtgggcagagctggagttctcatccagggctgcttgtccccagagccaggtttatactacctccctggggcgggctggccgcaggtacgggagaggctctgccagtgtggactggagcctcatcggagggcgctggttagggagcccggtttcaagactgcggcttaagaaggacacaagcaggttattaaaccatttgagacgtcttagcgcaaagcatgcatggcccaggtatatggcgcccccgcccctctatggacagctgaggagggtcccctgggcagaccagaggcccagagggagagagtagcagaaggcttttgatttttctcttgcctgaggcttgaatctgacaaacccttggtgggcactgctcccttaggttcttccccacctcaatctacctgcctagagtagcagctcccagacccagttctgggactgaaggttaacccttcacctgctgtcccttcttaacacccaggcccccagagccagctgggcctgtccagcagccacctgtgggtatttatgagtttcatatgaagtactgtgccccttcccttcctcatcccgaccctgcccgagcttcctgaaggtcctcactgtttgcatatcgctcaggccacctccaaaccccacctaggttttataatgtatattatatatttttttgtgtatttttaaaatccagctgtgatgggttatatcataaatgcagcttggggttggagcaggggccctcaaaggcccagctcctgctcaaaaaaaaaaaaaaaaaaaaattaaagttatttgtttgtggggcagtcatgtggnnnnnnnnnnnnnnn

SEQ ID NO: 20058 - DNA, 3839 bp, Homo sapiens
acgctaggtagcgaggcctgggttgagttcgcggcgctccggtggcttcttttatttatatctataatttaattaaattatttatttattgaggccgcgcacgggccgtgcccagcttcctgcccctcgccatccttcgggggagggggaatattttgtccccccgcctggctgtgacacataaataccccgcgggggcctgggcggcgagcacgcggcggcggcggtctctgagcgcctctgctctctctcccggtttcagatccgcatttgctaccagcggcggccgcggcggagccaggccggtcctcagcgcccagcaccgccgctcccggcaacccggagcgcgcaccgcaggccggcggccgagctcgcgcatcccagccatcactcttccacctgctccttagagaagggaagatgagtgagtcgagctcgaagtccagccagcccttggcctccaagcaggaaaaggacggcactgagaagcggggccggggcaggccgcgcaagcaggcctccgaaggagcccagcgaaggtgccaacacctaagagacctcggggccgaccaaagggaagcaaaaacaagggtgctgccaagacccggaaaaccaccacaactccaggaaggaaaccaaggggcagacccaaaaaaactggagaaggaggaagaggagggcatctcgcaggagtcctcggaggaggagcagtgacccatgcgtgccgcctgctcctcactggaggagcagcttccttctgggactggacagctttgctccgctcccaccgcccccgccccttccccaggcccaccatcaccaccgcctctggccgccacccccatcttccacctgtgccctcaccaccacactacacagcacaccagccgctgcagggctcccatgggctgagtggggagcagttttcccctggcctcagttcccagctccccccgcccacccacgcatacacacatgccctcctggacaaggctaacatcccacttagccgcaccctgcacctgctgcgtccccactcccttggtggtggggacattgctctctgggcttttggtttgggggcgccctctctgctccttcactgttccctctggcttcccatagtggggcctgggagggttcccctggccttaaaaggggcccaagccccatctcatcctggcacgccctactccactgccctggcagcagcaggtgtggccaatggaggggggtgctggcccccaggattcccccagccaaactgtctttgtcaccacgtggggctcacttttcatccttccccaacttccctagtccccgtactaggttggacagcccccttcggctacaggaaggcaggaggggtgagtcccctactccctcttcactgtggccacagcccccttgccctccgcctgggatctgagtacatattgtggtgatggagatgcagtcacttattgtccaggtgaggcccaagagccctgtggccgccacctgaggtgggctggggctgctcccctaaccctactttgcttccgccactcagccatttccccctcctcagatggggcaccaataacaaggagctcaccctgcccgctcccaacccccctcctgctcctccctgccccccaaggttctggttccatttttcctctgttcacaaactacctctggacagttgtgttgttttttgttcaatgttccattcttcgacatccgtcattgctgctgctaccagcgccaaatgttcatcctcattgcctcctgttctgcccacgatcccctcccccaagatactctttgtggggaagaggggctggggcatggcaggctgggtgaccgactaccccagtcccagggaaggtggggccctgcccctaggatgctgcagcagagtgagcaagggggcccgaatcgaccataaagggtgtaggggccacctcctccccctgttctgttggggaggggtagccatgatttgtcccagcctggggctccctctctggtttcctatttgcagttacttgaataaaaaaaatatccttttctggaaaaaaaggatattttttttattcaagtaactgcaaataggaaaccagagagggagccccaggctgggacaaatcatggctacccctccccaacagaacagggggaggaggtggcccctacaccctttatggtcgattcgggcccccttgctcactctgctgcagcatcctaggggcagggccccaccttccctgggactggggtagtcggtcacccagcctgccatgccccagcccctcttccccacaaagagtatcttgggggaggggatcgtgggcagaacaggaggcaatgaggatgaacatttggcgctggtagcagcagcaatgacggatgtcgaagaatggaacattgaacaaaaaacaacacaactgtccagaggtagtttgtgaacagaggaaaaatggaagcaaagtagggttaggggagcagccccagcccacctcaggtggcggccacagggctcttgggcctcacctggacaataagtgactgcatctccatcaccacaatatgtactcagatcccaggcggagggcaagggggctgtggccacagtgaagagggagtaggggactcacccctcctgccttcctgtagccgaagggggctgtccaacctagtacggggactagggaagttggggaaggatgaaaagtgagccccacgtggtgacaaagacagtttggctgggggaatcctgggggccagcacccccctccattggccacacctgctgctgccagggcagtggagtagggcgtgccaggatgagatggggcttgggccccttttaaggccaggggaaccctcccaggccccactatgggaagccagagggaacagtgaaggagcagagagggcgcccccaaaccaaaagcccagagagcaatgtccccaccaccaagggagtggggacgcagcaggtgcagggtgcggctaagtgggatgattagccttgtccagagtagcgccatttgtcgctatgcgtgtgaggtgggtcggggtggagctcgggaactgaggccagggcgaaaactgctccccactcagcccatgggagccctgcagcgcgctggtgtgctgtgtagtgtggtggtgagggcacaggtggaagatggggtgtttggccagacggcggtggtgatggtgggcctggggaagggcccgggccgctgggagcggagcaaagcctgtccagtcccagaaggaagctgctccctccagtgaggagcaggccggcacgcatgggtcactgctcctgcctccgaggactcctgcggagatgccctcctcttcctccttctccagttttttttgcttccctttggtcggccccgaggtctcttaggtgttggcacttcgctgggctccttctgactccctaccagcgctgtcccgggactcaccggaggctgcttgcgcggcctgccccggccccgcttctcagtgccgtccttttcctgcttggaggccaagggctggctggacttcgagctcgactcactcatcttcccttctctaaggagcaggtggaagagtgatggctgggatgcgcgagctcggccgccggcctgcggtgcgcgctccgggttgccgggagcggcggtgctgggcgctgaggaccggcctggctccgccgcggccgccgctggtagcaaatgcggatgccttcttggagccgcgccagcgccagaaatagccccggctcggagtcccaattagaggagcgcagccctcggccgaattcaaccccagcctcgtacctagcctagttt

SEQ ID NO: 20059 - DNA, 1505 bp, Homo sapiens
  misc_feature 1, 1501, 1502, 1503, 1504, 1505: n = A,T,C or G
nagtcaccacgcgtccgagcgcgacggcggcggcctctttagcagctgaaaggggatttaggcccggaagatccgagtccatccgcggcggggagagggcaagcgggaccggtaggggccggagcagcggcggcggcgctcggactgtcccatccgccccgtattgaggcgctgggagcggcggggcgacaggaaagcgatggtgaaagcggggccgtgaggggggcggagccgggagccggacccgcagtagcggcagcagcggcgccgcctcccagagttcagacccaggaagcggccgggagggcaggagcgaatcgggccgccgccgccatggagctgagagtcgggaacaggtaccggctgggccggaagatcggcagcggctccttcggagacatctatctcggtacggacattgctgcaggagaagaggttgccatcaagcttgaatgtgtcaaaaccaaacaccctcagctccacattgagagcaaaatctacaagatgatgcagggaggagtgggcatccccaccatcagatggtgcggggcagagggggactacaacgtcatggtgatggagctgctggggccaagcctggaggacctcttcaacttctgctccaggaaattcagcctcaaaaccgtcctgctgcttgctgaccaaatgatcagtcgcatcgaatacattcattcaaagaacttcatccaccgggatgtgaagccagacaacttcctcatgggcctggggaagaagggcaacctggtgtacatcatcgacttcgggctggccaagaagtaccgggatgcacgcacccaccagcacattccctatcgtgagaacaagaactcacggcggacggcgcggtacgcctccataaaacgccccttgggatttgagcattcccgaagagatgactctgggggtctctgaggctacgtggcatggtgtacttcagcctggggctctctcccctggcagtgtggctgtcggtgcttgcaccaagagacaggaacgttcgaagcggattcgcgagcagcccctgtgtgcctcccccatatgaagtgtgggtaaaggtacccttccgaattggcacatactggaatttctggcgtacatgcgtttgagaaaagctggaaacacgtaccagtccgcacgctatacgggaaactgggtcaacacggcgggggttaccccctagagaacgaggtatcggacgggcgacacgcgccacacttggggggccacaaggggcccgcaaatacaccgacacgggcgagcacggacaccgcaaaacagacggaggacaacacacgaaagcacaggacaaagagacacacaaacaaagaaacgaagcgaagcaaacaaaagcagaccgagcaaccgacccagcacacgcgacagagcagacgacacagcagcacaccagaacgacacaacacccaacagcacacgcaacgaacaagacagcacagaacaagcgaacagacagcagacagcnnnnn

SEQ ID NO: 20060 - DNA, 1103 bp, Homo sapiens
  misc_feature 1, 2, 3, 1101, 1102, 1103: n = A,T,C or G
nnnccgcggccgcgtgggcggacgcgtgggggccctccgggaagatggcggccgtgcaggcggccgaggtgaaagtggatggcagcgagccgaaactgagcaagaagtggtggtaatcattagttccagggtgctctgccatgttgacgcaagctgctgtaaggcttgttagggggtccctgcgcaaaacctcctgggcagagtggggtcacagggaactgcgactgggtcaacttgctcctttcacagcgcctcacaaggacaagtcattttctgatcaaagaagtgagctgaagagacgcctgaaagctgagaagaaagtagcagagaaggaggccaaacagaaagagctcagtgagaaacagctaagccaagccactgctgctgccaccaaccacaccactgataatggtgtgggtcctgaggaagagagcgtggacccaaatcaatactacaaaatccgcagtcaagcaattcatcagctgaaggtcaatggggaagacccatacccacacaagttccatgtagacatctcactcactgacttcatccaaaaatatagtcacctgcagcctggggatcacctgactgacatcaccttaaaggtggcaggtaggatccatgccaaaagagcttctgggggaaagctcatcttctatgatcttcgaggagaggggggtgaagtgcaagtcatggccaattccagacattattactcagaagaagacttattcatattaataacaaactggcgtcggggagacatacatggcagtccggggaaatccggtaaaaccaggaaggtgagctgagcatcattccgttgagatccaggcagctcccgttggcttgttacgcaatctacgtggggctcaaagaccggacacgtttcgccagagacctgaatagagcccagcatgactaggggggcgaaaatataacccggcaaaaatcacgattataacaggacacaaaacaaggcacaaagaaaaccgtgcgtacccggagagcagcgacccataatacaaagcgcgagattgtaagagcgccaaagcacgtggagcgcgtcgaataccacgagcagtcacacggcgcacacannn

SEQ ID NO: 20061 - DNA, 2142 bp, Homo sapiens
  misc_feature 1, 2, 3, 10, 1968, 1969, 1970, 1971, 1972, 1973, 2134, 2135,2136, 2137, 2138, 2139, 2140, 2141, 2142: n = A,T,C or G
nnnacgcgtncggctgagaaacggctaccacatccaaggaaggcagcaggcgcgcaaactgctcatggtcaccggcagcttctcggcgagtttgccggtcatagcactcccgagcgacccgcgcgcccggggggaggtgcgagcgtggacctgggacgggtctgggcggctctcggtggttggcacgggttcgcacacccattcaagcggcaggacgcacttgtcttagcagttctcgctgaccgcgctagctgcggcttctacgctccggcactctgagttcatcagcaaacgccctggcgtctgtcctcaccatgcctagcctttgggaccgcttctcgtcgtcgtccacctcctcttcgccctcgtccttgccccgaactcccaccccagatcggccgccgcgctcagcctgggggtcggcgacccgggaggaggggtttgaccgctccacgagcctggagagctcggactgcgagtccctggacagcagcaacagtggcttcgggccggaggaagacacggcttacctggatggggtgtcgttgcccgacttcgagctgctcagtgaccctgaggatgaacacttgtgtgccaacctgatgcagctgctgcaggagagcctggcccaggcgcggctgggctctcgacgccctgcgcgcctgctgatgcctagccagttggtaagccaggtgggcaaagaactactgcgcctggcctacagcgagccgtgcggcctgcggggggcgctgctggacgtctgcgtggagcagggcaagagctgccacagcgtgggccagctggcactcgaccccagcctggtgcccaccttccagctgaccctcgtgctgcgcctggactcacgactctggcccaagatccaggggctgtttagctccgccaactctcccttcctccctggcttcagccagtccctgacgctgagcactggcttccgagtcatcaagaagaagctgtacagctcggaacagctgctcattgaggagtgttgaacttcaacctgagggggccgacagtgccctccaagacagagacgactgaacttttggggtggagactagaggcaggagctgagggactgattcctgtggttggaaaactgaggcagccacctaaggtggaggtgggggaatagtgtttcccaggaagctcattgagttgtgtgcgggtggctgtgcattggggacacatacccctcagtactgtagcatgaaacaaaggcttaggggccaacaaggcttccagctggatgtgtgtgtagcatgtaccttattatttttgttactgacagttaacagtggtgtgacatccagagagcagctgggctgctcccgccccagcccggcccagggtgaaggaagaggcacgtgctcctcagagcagccggagggaggggggaggtcggaggtcgtggaggtggtttgtgtatcttactggtctgaagggaccaagtgtgtttgttgtttgttttgtatcttgtttttctgatcggagcatcactactgacctgttgtaggcagctatcttacagacgcatgaatgtaagagtaggaaggggtgggtgtcagggatcacttgggatctttgacacttgaaaaattacacctggcagctgcgtttaagccttcccccatcgtgtactgcagagttgagctggcaggggaggggctgagagggtgggggctggaacccctccccgggaggagtgccatctgggtcttccatctagaactgtttacatgaagataagatactcactgttcatgaatacacttgatgttcaagtattaagacctatgcaatattttttacttttctaataaacatgtttgttaaaacaaaaaaaaaaaaaaaagctaaagtcccgggcaaggccgttgtaagccaagggaaaaagggggcaggggagaagtggaccgggtggcacaagatattgtgcgtcatacnnnnnnattaggcggggctcgaaaaaaaactttaaaaaaaaacccttgaacctgtaccttaaaacgaaaacaaaggggggggtcaactggtttattgaaccttttaatgggcccaaaaaaggggttccaataacagttttcccaaataaagcctttttttaacggcnnnnnnnnn

SEQ ID NO: 20062 - DNA, 1977 bp, Homo sapiens
  misc_feature 1, 126, 1977: n = A,T,C or G
nggatattcggataaaaacaaccaaacaaaaaactggctaaatacccattcccctcaataacttggataagatacctaaaaaaggtcgaccttcggtacctttctgtcttctcccctctcgctatntgcctacactggcttcctcacctccactttttctcacgtttatctgagcgaaaacaagcacggttcggcagcctcctttcccagccctacctttgtgctgcaaaagcgaaaattcaaaagccaagtacaataggagaccgcccaccctggctccctcgtgacacgagcggcacgagcggagggcgcctcgcggcaggagcgggatttccggggtcacgggaaccggcaggggaacgggataaagttcccggagaaaggaaaggagagcgtgggatagtaaaagagaagacgcggagaagaggagaggacctacaagaacggaggacaggggcgcacgatggtcccggggggagcggaaacaaaggcacgcaaaacggaaaagcgtgtgtaggggagcggaaaaggaagtcaccaccgtggcctgcgacgaaatggcgaaaagtcttttgaagacagcctctctgtctggaaggacaaaattgctacatcaaacaggattgtcactttatagtacatcccatggattttatgaggaagaagtgaaaaaaacacttcagcagtttcctggtggatccattgaccttcagaaggaagacaatggcattggcattcttactctgaacaatccaagtagaatgaatgccttttcaggtgttatgatgctacaacttctggaaaaagtaattgaattggaaaattggacagaggggaaaggcctcattgtccgtggggcaaaaaatactttctcttcaggatctgatctgaatgctgtgaaatcactaggaactccagagacttcctttaataagtgttgcgctggttcaaggttgggcattgggtggaggagcagaatttactacagcatgtgatttcaggttaatgactccagagagtaagatcagattcgtccacaaagagatgggcataataccaagctggggtggcaccacccggctagttgaaataatcggaagtagacaagctctcaaagtgttgagtggggcccttaaactggattcaaaaaatgctctaaacataggaatggttgaagaggtcttgcagtcttcagatgaaactaaatctctagaagaggcacaagaatggctaaagcaattcatccaagggccaccggaagtaattagagctttgaaaaaatctgtttgttcaggcagagagctatatttggaggaagcattacagaacgaaagagatcttttaggaacagtttggggtgggcctgcaaatttagaggctattgctaagaaaggaaaatttaataaataattggtttttcgtgtggatgtactccaagtaaagctccagtgactaatatgtataaatgttaaatgatattaaatatgaacatcagaattactttgaaggctactattaatatgcagacttacttttaatcatttgaatatctgaactcatttacctcatttcttgccaattactcacttgggtatttactgcgtaatctggaacatttagctaaaatatacacttttggcttaaaaattattgctgtcaattccaataataattcttagcttataaccaaagagcagtgtttaaaaggagagcttctatacaaaacctattcctggcgttacttttcatacaatttttgttctgttttacctggaatatttaccaaatacgggtgttgtgtaagacaacagggggggttcggcaccgacaccgaacggttgcaaccttttcggcccaggggtaaactggaaggcccttaaaagtgcctcacccaatggatgggtcaacatttggtgaccaaacgcgcgcggaaagatagatttgcccacaaatagaagagccaatttttgcttagan

SEQ ID NO: 20063 - DNA, 802 bp, Homo sapiens
  misc_feature 1, 2, 665, 704, 726, 733, 734, 736, 786, 787, 788, 789, 790,791, 792, 793, 794, 795, 796, 797, 798, 799, 800, 801, 802: n = A,T,C or G
nngtcgacccacgcgtccggtcgcccgcccagtcgcccctcagccgcttcccctcgccatggaggcgaggccgccgccgccgccgcggggctcggagccgcgggccgggcggcggccctgagggctagtggcggcccgaaacgccgccgcggagccgaggcggagccgctgtcctcgtccccagcggtcccgcccaacgcccgactctgtgacacaactaaaaaaaaacaaaggtatttatggaattccactgagtggtaatggatgatgcagttcaaataactaagataagcatggattcctggttcattcttgttctgctcggcagtggtctgatatgtgtcagtgccaacaatgctaccacagttgcaccttctgtaggaattacaagattaattaactcatcaacggcagaaccagttaaagaagaggccaaaacttcaaatccaacttcttcactaacttctctttctgtggcaccaacattcagcccaaatataactctgggacccacctatttaaccactgtcaattcttcagactctgacaatgggaccacaagaacagcaagcaccaattctataggcattacagtttcaccaaatggaacgtgggcttctagataaccagttcacggatgccagaacagaaccctgggagggganttccagcaccgcaggcaaccactccagaaactttccctncttcaggtaattctgactcganggacagnngnggtgagctgctcacctttatatctgttgttccttttacacagtgtacagnnnnnnnnnnnnnnnnn

SEQ ID NO: 20064 - DNA, 2849 bp, Homo sapiens
  misc_feature 1, 2, 3, 2847, 2848, 2849: n = A,T,C or G
nnnaattcccgggtcgacccacgcgtccggccacatggccgccgccgccgcttggagctgaagtgccgccgccgccgggcagccacggggaatccgcccgcatcgccgccctcgccggccgggcggccgtggggcccagagcgccggaggccagggctggggcggcaccgcgcagcggccacggggtcccgttagagcagcgcccggcggctatgccgagagcccggagcggccggaggagcagaggggccggcgggagggaggaaacctttctgcgagtacgagccaaccggcagacccgactgaatgctcggattgggaaaatgaaacggaggaagcaagatgaagggcagagggaaggctcctgcatggctgaggatgatgctgtggacatcgagcatgagaacaacaaccgctttgaggagtatgagtggtgtggacagaagcggatacgggccaccactctcctggaaggtggcttccgaggctctggcttcatcatgtgcagcggcaaagagaacccggacagtgatgctgacttggatgtggatggggatgacactctggagtatgggaagccacaatacacagaggctgatgtcatcccctgcacaggcgaggagcctggtgaagccaaggagagagaggcacttcggggcgcagtcctaaatggcggccctcccagcacgcgcatcacacctgagttctctaaatgggccagtgatgagatgccatccaccagcaatggtgaaagcagcaagcaggaggccatgcagaagacctgcaagaacagcgacatcgagaaaatcaccgaagattcagctgtgaccacgtttgaggctctgaaggctcgggtcagagaacttgaacggcagctatctcgtggggaccgttacaaatgcctcatctgcatggactcgtactcgatgcccctaacgtccatccagtgttggcacgtgcactgcgaggagtgctggctgcggaccctggtgaggtggcatgggggtcggggaatgggaggccgctccgggcactgcccagatgtctgtgcttatgcctgagcctgcctgggggaagtggggagcatggcgcaaaggagaacagagccaggagccaggatatttacccgcaggatatttacccccaggctcgctgcctctcctccccaactgcaggtttaggaacttctccccctccatgagttcactgcattctcccttccccgccccggtccccgaaggcccactgcatcacacagactggtgaggcctggggtcaggaggaggctggctgtaggtaaacaggaccagggccttggcccctccccctcccattactaagctccttctgctcctgcccctgttcttcgctcaggagcagccattaaaatgtcgcccggagacagtaataaaaggctcggacgtgggctctgtgtcctgatcaaaggccgcgtgtaatctcgttagggctgcggctgccacagctggacccagccttgttctcattactggggctcctgctgcggggctggccaggcggtttgatcctggcgtccccccaacacaggagcgtgcctgcctgctcacagaagctgcctatgcgtccccagcctgggctgacaggaccaaggtctcagcacacactggtgcagagagacatggctgcaggcccaggtgctcacatgcgcacacatggctcattgtgtagaccagagccctccctgttctccctgcagggtgccaagaagctctgccctcagtgcaacacgatcacagcgcccggagacctgcggaggatctacttgtgagctatctgccccaggcaggcctcgcctccagcagccccacctgcccccagcctctgtgacagtgaccgtctccctttgtacatacttgcacacaggttccccatgtacatacatgcacatactcaaacatgcgtacacacacacacatttacacacgcaggactctggagccagagtagaggctgtggcccaggcactacctgctggctcccacctatggtttgggggccatacctgttccagctctgttcccagggtggggcagggaggtgggggttgggggagtagtggggcacggctcctaagatccagcccccatactgacagacggacagacagacatgcaaacaccagactgaagcacatgtaatatagaccgtgtatgtttacaatgttgtgtataaatgggacaactcctcgccctctacctgtcccctccccctttggttgtatgattttcttcttttttaagaacccctggaagcagcgcctccttcagggttggctgggagctcggcccatccacctcttggggtacctgcctctctctctcctgtggtgtcccttccctctcccatgtgctcggtgttcagtggtgtatatttcttctcccagacatggggcacacgccccaagggacatgatcctctccttagtcttagctcatggggctctttataaggagttggggggtagaggcaggaaatgggaaccgagctgaagcagaggctgagttagggggctagaggacagtgctcctggccacccagcctctgctgagaaccattcctgggattagagctgcctttcccagggaaaaagtgtcgtctccccgaccctcccgtgggccctgtggtgtgatgctgtgtctgtatattctatacaaaggtacttgtcctttccctttgtaaactacatttgacatggattaaaccagtataaacagttaaaaaaaaaaaaaacgagggctctatgcgggggggaacagggttttgaagggcatgtcataggggtccggaccatttttggtcaaggggaannn

SEQ ID NO: 20065 - DNA, 2324 bp, Homo sapiens
  misc_feature 1, 2321, 2322, 2323, 2324: n = A,T,C or G
ngccgtcgccttctctgcctcttctcatcctttctcgctctgctgctctgcagtgtgacgagtccgaatcctcttcccacccagcccgcgcctttcttcttttgcctgcgctgttctatttctccttcggccgccgccgccactgctgcacacagctggtgtcggtgccgcgcttttacccccaagtcgttcccgcagcctatggcccaggccgccttgggtatttctgctcaaggtcttactacatattgcaacagaagataatattggaggtgaagagggtaacatgaagtttggcactaccctgaagaactgtaggcatctcttggaatgtgctaaggaacttgatgtccaaataattggggttaaatttcatgtttcgagtgcttgcaaagaatctcaagtatatgtacatgctctatctgatgctcgatgtgtgtttgacatggctggagaaattggctttacgatgaacatgttagacattggtggaggattcacgggaactgaatttcaattggaagaggttaatcatgttatcagccctctgttggatatctactttcctgaaggatctggtgttaagataatttcagaacccggaagctactatgtgtcttctgcatttacactcgcagttaatatcatagcaaagaaagttgttgaaaatgataaatttccctctggagtagaaaaaaccggaagtgatgaaccagccttcatgtattatatgaatgatggtgtttatggttcttttgcaagtaaactgtctgaggacttaaataccattccagaggttcacaagaaatacaaggaagatgagcctctgtttacaagcagccgtccgcagcttttccgctgaagcttaaacaggcattaacgcttctttagatctgaagttgcaggttaagcttgtctggtcaacattccagtgtggaaaaataatttaaacaatcttattctcttaattcttttggcaacaaaaactattagtaatagctatttgggaccagacaaaatcagctttcatctataattcattggggataatgggagatttagataatgtatccagatttaaacctaccagtttgtcctaccccttaagcgtttaaaataaaatatgcaacaaaatggatgacttagtggagatggaagcccattaattgggttccccattaaatcgtttacatacaagaacacagtttttatactaaggatttgtgtttaaagtcttgtaaagttcatgtctttcacccagatatatcaaatgttagaagaccagtgtgacttcattagataacgtttagtgtatttagaatgtgtaaatttgtgctttgaactgtagtttaataaatgtaaaattgcatcatagtatttgttgacctaatgtaacccttgtatgattgcaataaaattttgtgtagattttactgttttttcaggctaaaactttgggaaaggggctagctagcaaaggtagttttgaaatagatgtgtatatggactgttttgaagggtttttttctttatagcccagttaagttttgtttggctcggtgcatttttcatttatttaattagtaatttaagtaaagtgtttggtaaatcattgtgaagttcagattcattatggagagttgatgtgcagtaagcatgatgtttaacaattttaacaccaaaaatgttaatcctgcataaatcaactgtaataataaataggtgtttctgtatagatagaatgcatagagtaccttagtaaatctttgaatcacaatcttttggctgaaatggaagattctgttaaatactttgaataaacttggggggagggaaataaaattgcagaaaactgcagagcactaaaacttaaagaagggctacatctttatccagaaacctgttgctcttttgcacggaatgtttaaattcagagttgggatgggggttggggtgaagcacacttattatcttcagttgcagtgatttcaaatttaggattttttgttgttggtttgaactgtccccttagtttcttgttatttccaatttgttctgcttagtcattacttttaattcttttcttactaaaattttatggtggttgggggaagggagttagcatcactaacctgacagtgttgcccggaatttgctttgttactgctgtttttagaatcctaatccccaatccaatgttttacaaaggggctctttcctacatactcggtcaggtgaattcttgtccaagagaagtactctttggccggggaaatccgtcaaggaaggtgacacaaggtacgttaggagagtccatatannnn

SEQ ID NO: 20066 - DNA, 2254 bp, Homo sapiens
  misc_feature 1, 2, 3, 2247, 2248, 2249, 2250, 2251, 2252, 2253, 2254: n = A,T,C or G
nnngctacctccacaaacaggcccagagaacagccttgaagccacctttcccctcaaggggactgaccctgtctttaatgctacagtggcatccagggatcagtggaacattgctttgagaaccctcctgctgttacggaggcagcacaaagctggtgacccctgagccaacacggcactgggatggctttctaggacagaaccctgtcggcgactgtcacatctcaaactaatagctgattttaaaagccagcagcagcgacgccatgtacctgagtacaggtggcagttgcagagccgtgggctgtagaaggtcagatggggcttcccacaggggaaatctgggcgtgctgtagctcagggtgactcccagctccgtcactagcagggcgacccccttccttctggagccttagctctgaaagcccccagtgggggtgccctttcagatgccccctttccatttcaaaggctctgactcttgatcttgaagccggacgcggcactggcactcggcttcagtttccactgtgacagatggaggtctcctttcgccccagcccaggtggccaagcccatcctggcctcagaacatgctgagcacattttgtagggtggcacctttttatccaagttactagctacacatcagtgtttaaagagaaaaaagtgacctttcattttttttttcttgaaacttgaggaaacaagatacatactactgattttttttttttcttaaaactaaatgcatgactgcagagcggtagaggtgtatatttttcatactgtggggcaaagtatttgtgctgctttttggagatggactggaacgtctggtttctgtccccgggcccggcagctacgtctattttctgtagaaggtgccacagtgagacctggagccaccccttcctgccctggcgccgtttagagctgggagcccgtggactcccggcctgtttctaccttctattcaaccactctgacgtggggagacaagaagaaatagaactttttgatagtgtggtaaaaacattgatttgaactattttagtaaaaggagtaacaaacaagattgtgatagtgtctactttgagctagataaataaaggcctctttgtgagcctcctggctgggtgctcagtgcttgtttctgtcgtgggtggcagggtcagcaggcagagacagggccaaggcccctcaagcaccgcagatgggggctcagtcggggccccttccacagacagagccgtggcccctcaaggtggacagtgaggccgctgctcctccagctgcctctgtctcatcacaggccagaagtggaaagggtttcaaatccaagcccccgggttcctgtgtgcgttctacgcagcaaggcttcaaagtttcaaactggtttggaactcaaccaggtcctccaaaggaaaccaaggcaggcacaggatgggggcaggctggcttggcaggcagctgtgcggatccacccagagtgccttgggaggcagtggggttggctgtggctgctgtgagctgcagccaggcctctcccgcgtccccagggtctggaaggagggcctctgcacattttataagccacagactgcgaaggcctggagccccaccttccacccataacaaagaaagggatagtttcagaactgcttttatttggataactgactgaaggagtctcatttgtaaccaagatggaattcacagtatgttgttacattcacacttaaaaaatatatctctatgtacaggaatttgcaaagagatgtaaacatacattaatttccaagtacatttctccccttctccctggaggaaaaaaaaaaagccatccaatgaggcaaccccttcaaaataattttaatacaaaggatgcaaacatctataaatgaaaaatgtggttcttctgccccttctgggtgtcatgggagagaatgtcaccgaatgaaaatgacaacagcttggcttcagatggaattggactatttaaaattgagtttccaggaaaaataggcactgatttctagaaggaaattaactccttaccgaagctatttattgagccaatatggctggttaacgtcctcactagtataaagtaacccagtgcaggactctcagacattagctgaaccaagtgtacacagtcagactgcaagggcactgatgaggctactctgaaagctggttgtccccgtcctctagtgtgaggaccactctgatttaacccannnnnnnn

SEQ ID NO: 20067 - DNA, 589 bp, Homo sapiens
  misc_feature 589: n = A,T,C or G
cgacccacgcgtccggcgccccctcccggccgccatgttggctggtgtgtgggtgtcaaactgagccagacgcggcggtggcggcggctccgcgggctacggtcgctcccgcctctcgagcgctgccggtggccgcagcggcgcacccacgccggcccggaggagcagagtgctaagtgctgggtgctcactggtgatgaggcagatgaaggttaccaaacttgtggacaggagcctcatatcagagacgtggacctcactgtagcctggtcatggcttccagcttttcgaatctgaggctccaaaggaggaaatgaccattcagggatcttactccagcttgattacggagactgaaccttcatagggtgcgcacttaccaaggacaggaaggtttctctgtttgaagggctttaaacttataacaaagaaaataaaaatgacgacttcgtctatcagacggcagatgaaaaacatcgtgaacaattactcagaggcagaaatcaaagtccgggaagccacctccaatgacccgtggggcccgtccagttctctgatgaccgagattgccgacctgacctacaacgtn

SEQ ID NO: 20068 - DNA, 1294 bp, Homo sapiens
  misc_feature 1, 1240, 1259, 1266, 1287, 1293, 1294: n = A,T,C or G
ncgttcgagacagttcatactggagacaaaccctacaaatgtaatgaatgtggcaaaacctttaaacggaactcaagcctcactgcacatcatataatccatgcaggaaagaaaccatatacatgtgatgtatgtggcaaggtcttttatcagaattcacaacttgtaaggcaccagataattcatactggagagacaccttacaaatgtaatgaatgtggcaaggtcttctttcaacgttcacgtcttgcagggcaccggagaattcatactggagagaaaccctacaaatgtaatgaatgtggcaaggtcttcagtcaacattcacatcttgcagtgcatcagagagttcatactggagagaaaccttacaaatgtaatgaatgtggcaaagcctttaattggggctcattactaactgtacatcagagaattcataccggagagaaaccttacaaatgtaatgtgtgtggcaaggtctttaattacggtggatacctttcggttcatctgagatgtcatactggagagaaacctctccatggtaataaatgtggcatggtcttcacttactattcatgcctagcacgtcatcaaagaatgcataccggagagaaaccttacaaatgtcatgtgtgtggcaaggtcttcattgacagtggaaacctttcacttcataggcgaagtcatcccggagagaaacctttccagtgtaacgaatgcggcaaggtcttcagttactactcatgcctagcacgtcatcggaaaattcataccggagagaaaccttataaatgtaatgattgtggcaaagcctatactcagcgttcaagcctcactaaacatctggtaattcatactggagagaacccttaccactgtaatgaatttggtgaggcttttatccaaagttcaaaactttgcaagatatcacagaaatcctactggggagaaaccacacaaatgtagtgaatgtggtagaacttttagtcataaaacaagtctggtgtaccatcagagaagacatactggagagatgccatacaaatgtattgaatgtggccaggtctttaactccacttcgaccctggcaaggcatcggagaattcacactggagagaaaccttacaaatgtaatgaattgtggccaaggtccttccgtcatcgctcagccctcagcacgtcatcgggagtatttcaatactggaagagaaaccttacgtgtgtaatgaagtgttgncaaagcttttaggagttgngttccantttcctggttaaatccatcangaaaann

SEQ ID NO: 20069 - DNA, 1613 bp, Homo sapiens
ttttttttttttttttttatatggcagaatcgtggatttattatttgattcccctcccaactccttggatcattcttctatggtctccccatggatcgaataatcattggcacatagcaaacatttcataaaaacagatacaattggcaacattatattcatacaaacctaatacacgcacacactgggcatgatgatggtgcagtccttgagcagggtttacaggcaggatcctcttcccgatgcttcacccgtggtatctgatacaaccccacttcattcagaggcgaacaccttccccacgggctcctgtgcccccacccagctctatgccatccctctcctctcactcaccagcccaccttgctttgcaccgctcccccttagggcctttgctgtcaaggtggtctccatgtgtcaaacagggactctgaccaactacttcatctcaaataccaccttcacagtaaggcctgcctgccctcctctttaataccatgactgttaccagcccctccccagcactcctgacttcctgatgcctctccactttcctttttttctgtagcacagatcaaagagagcaggtcatgttactgattttgcttcctccaatagccagttgtgttcacagatgtacctgagcacctggaaggctggctgcctagcactcatgaatgtacagtaggtactcggtataggtttgctgaatgactgaatctttgatcctgcacaaccatccaatgaggtagacagcatcatccctgttttctggatgaggaagttgaggtacacagcatgccgccatggcagcaaagctggaatcagtgagatgtttgaggggcatcaaggaccaatcactggcatccattgtcatgcagctgttggagcagtagacttctcacatctttttgtcacttcatcgtttgactggacagtaaagctttggacaactaagaataacaagcctttgtattcatttgaagataatgcagactatgtttatgatgttatgtggtcacctacccacccagccctgtttgcctgtgtggatggcatggggagattggatttgtggaatctcaataatgacacagaggtaccaactgccagcatttctgtggagggtaatcctgctcttaatcgtgtgagatggacccattctggcagagagattgctgtgggtgattctgaaggacagattgttatatacgatgtgggagagattgctgttccccgcaatgatgaatgggcacggtttggccgaacacttgcagaaattaatgcaaaccgagctgatgcagaggaggaagcagctacccgaatacctgcttagttcctgaaaaggggagtgtaactagtggatttgggaaaggttcttaagtagatcctgagactatttgcatgcttctgtctaaatgataattaaaaggaaatttcatggattaaaccatgggtttaatgcagcaaggaaacttacaatgtccctttatatataacatgcatcttgttttggatttgtgtcattttttaatataactgattgacttcacagaaagcagcttttttgaattctaatacataggtgtatatttggtattagttattttgag

SEQ ID NO: 20070 - DNA, 1688 bp, Homo sapiens
  misc_feature 1688: n = A,T,C or G
agggagtcgacccacgcgtccggcgctaggttggctcttctgcgcgcctgcgccttggcgagctctgcgcaggcgcatttccaacgcttggaggagagggcggggtgtcgtttcctttcgctgatgcaagagcctagtgcggtggtgggagaggtatcggcaggggcagcgctgccgccggggcctggggctgacccgtctgacttcccgtccgtgccgagcccactcgagccgcagccatgtctggggacgagatgatttttgatcctactatgagcaagaagaaaaagaagaagaagaagccttttatgttagatgaggaaggggatacccaaacagaggaaacccagccttcagaaacaaaagaagtggagccagagccaactgaggacaaggatttggaagctgatgaagaggacactaggaaaaaagatgcttctgatgatctagatgacttgaacttctttaatcaaaagaaaaagaagaaaaaaactaaaaagatatttgatattgatgaagctgaagaaggtgtaaaggatcttaagattgaaagtgatgttcaagaaccaactgaaccagaggatgaccttgacattatgcttggcaataaaaagaagaaaaagaagaatgttaagttcccagatgaggatgaaatactagagaaagatgaagctctagaagatgaagacaacaaaaaagatgatggtatctcattcagtaatcagacaggccctgcttgggcaggctcagaaagagactacacatacgaggagctgctgaatcgagtgttcaacatcatgagggaaaagaatccagatatggttgctggggagaaaaggaaatttgtcatgaaacctccacaagtcgtccgagtaggaaccaagaaaacttcttttgtcaactttacagatatctgtaaactattacatcgtcagcccaaacatctccttgcatttttgttggctgaattgggtacaagtggttctatagatggtaataaccaacttgtaatcaaaggaagattccaacagaaacagatagaaaatgtcttgagaagatatatcaaggaatatgtcacttgtcacacatgccgatcaccggacacaatcctgcagaaggacacacgactctatttcctacagtgcgaaacttgtcattctagatgttctgttgccagtatcaaaaccggcttccaggctgtcacgggcaagcgagcacagctccgtgccaaagctaactaatttgctaatcactgattttgcaaagcttgttgtggagatgtggctggacaggtttgccatcagagtggatataccgttgtattaaaaacaagataaaaaagctgccaagatttttggcgagtggttggtctgaagtccttgcaagacgctgatgctcaagctgttgacatactcattgcctactttaacacctgtcagagaaacgtgatatggggtaaggaggtgcttttttaaaatcgttcatagacttctgtaaaatgcaagataaattaaagttattataacagtgattctaaaaaaaaaacggggcgggccccccctaaatacccggggccagttcgcgtcccgttttggagggcctagggcgttaagcgcgcgcgttcacccgcgcgaagcctggctgtggaccccgggcgcatcccccccgcgcgaacgtgcactcggtcn

SEQ ID NO: 20071 - DNA, 2018 bp, Homo sapiens
  misc_feature 1, 2, 2018: n = A,T,C or G
nncttcatcgagccgcacgagatgcagcagccgctggtggtccttggggtcggcgtggccgggctgctggtcaacgtgctggggctctgcctcttccaccatcacagcggcttcagccaggactccggccacggccactcgcacgggggtcacggccacggccacggcctccccaaggggcctcgcgttaagagcacccgccccgggagcagcgacatcaacgtggccccgggcgagcagggtcccgaccaggaggagaccaacaccctggtggccaataccagcaactccaacgggctgaaattggaccccgcagacccagaaaaccccagaagtggtgatacagtggaagtacaagtgaatggaaatcttgtcagagaacctgaccatatggaactggaagaagatagggctggacaacttaacatgcgtggagtttttctgcatgtccttggagatgccttgggttcagtgattgtagtagtaaatgccttagtcttttacttttcttggaaaggttgttctgaaggggatttttgtgtgaatccatgtttccctgacccctgcaaagcatttgtagaaataattaatagtactcatgcatcagtttatgaggctggtccttgctgggtgctatatttagatccaactctttgtgttgtaatggtttgtatacttctttacacaacctatccattacttaaggaatctgctcttattcttctacaaactgttcctaaacaaattgatatcagaaatttgataaaagaacttcgaaatgttgaaggagttgaggaagttcatgaattacatgtttggcaacttgctggaagcagaatcattgccactgctcacataaaatgtgaagatccaacatcatacatggaggtggctaaaaccattaaagacgtttttcataatcacggaattcacgctactaccattcagcctgaatttgctagtgtaggctctaaatcaagtgtagttccgtgtgaacttgcctgcagaacccagtgtgctttgaagcaatgttgtgggacactaccacaagccccttctggaaaggatgcagaaaagaccccagcagttagcatttcttgtttagaacttagtaacaatctagagaagaagcccaggaggactaaagctgaaaacatccctgctgttgtgatagagattaaaaacatgccaaacaaacaacctgaatcatctttgtgagtcttgaaaaagatgtgatatttgacttttgctttaaactgcaagaggaaaaagactccactgaaattctaagtttgccaagtagtgtaattgaagtccttgtctggtcacacagtttaattctatttttgtaagaacataatgggactgcataacagagttctatattacaattttgtgattattagtacagagtacagctatgctgtgactgttttggaaagccagttttaacactatgttacatttttgtttaaagtaagttaaaccttatataacataatgacatttgatttctggatttttcccatgataaaaattagggggataaataaaattgttactggaatttctctgcttttcttttccccccagtgttatactttattagaattataattgatagaactttaaaatcatcaacagtttgtttcctttgacattttaggtgataattgccctttgagatccattacatagcataatggcagcatattattaagagtgactcatggctaatcagtaggaaataaagatcagttactatcctgtattctgtattgctggctattaaacagtaaggtaattaacaaattgaactacagtttacacacaatggggcaaatggggtagtaagagcaaggaagaaagtttaccaaactaaatatttaggttattgtatgataatattgagactacatttctaaattattttgagaatttcaactttttattctacccaaagtaatctgaacttggacttgttccacgcttactttcttgaagaatggttaaaaccn

SEQ ID NO: 20072 - DNA, 2886 bp, Homo sapiens
  misc_feature 2876, 2877, 2878, 2879, 2880, 2881, 2882, 2883, 2884, 2885,2886: n = A,T,C or G
gtcttgatctcctgacctcatgatctgcctgcctcggcctcccaaagtgctgggattataggtgtgagccaccatgcccagccccttctgtcccttctaacgtgaggacccagcaacaaggtaccatcttgaaagcagcaactggggactcagcagacaccaaaccaactggtgcttaaccgtgacttcccagcctccagagctgtaagaaaataaatttctattatttatagattacccagttgaagatactttgttaaggcagtacaaatggactaagacaagggggaagaaatttgcattcctgatcttcccaacttcttcaaattcacaacacttgaatgacagtcttatttcagcacttactgctatcacctattacttttatgtgtgtcttacctatttgagatgccagattccttggaagtagagaccgtgtctgaatcatcattgtattaaaccactcatccttaacaaatgcccaagccatggttaaagttcaataaatactttgttgaatttattaataaaatggcagaaatgtcattctcttccatatatgtttaataaatccctgataggtgctaagcactgcactaggtaaaaattctcttctgatgctgtctttttggccaaccatttttttatcatttattcattagctgacatttgctaagtgctttggaggggtcaaaaggggaagtaatgagaaatcaaagatggtccctacatcaaggataaactatctttttttagtcactcaaagtcataaccctttggaaacaaaacccaccagtaccccagattttgaccacagatgaatcagtactacaaggactggttagagggttgaatgaatctgtatactcagcacttaacacagcactctgggtaaaagaaaaaagatcctcaaagatattagttggttacatcaagaaaggacaaacttaggttaatctataacttcatctcagaggaacaggaactttggagataaacagggctctgccacttgcaagttgcaccatccctggtttctccatctgtaaattgattaaaacactgcctatctaataagattaaataagttagaagcattcagttaaatgtcaactgaaactattgttcatgtaaattgtgcttgatgctttttctttctagattcaatgattattgtcattttacctccataggccctcaatagaaatcagttgcagagggcagaagcctagatattttcaccttaaaattggagggtgaaagacattgaggtgaagtagagatagagggtacacagaaaaatcgtataagtaaaactaacatcgttaacattatttactgtaagttatctttgtaagagtggtaaaatacattgtgttgttaaataatttcatttaaaaaatgcatcactttgtgtgtttttatattgctaaaaccataaggccagtctacaaggtttgtagataaaatagaaacataccttccttgaaaagcagaataaattttttaaaggcaggaaggaagtgtttgaaccatgtgtcaacaagctttactgtcaaagcaggcttttggtatgggaagaaaaatacttataaatacttgttttaatatttgctttattaaaatacatttaaaatacagcatttttaaatctctaagctcaacttgaagatataagaacagtaaatttgataaaaatgagaaattacattcccatttctttaacaatttgtaaattccaattatcctgaacatttaacaccatttacatattttattaatcacattttcttaaacatttgataagagatttaatattttgatccaactaccaaaaaagcagacttgtgtacttgacagatttttctaaacacttcacaactcacgattcaaacaaagacaaaatagcatatcaaaagttaatcactcagttggaaagcactcataccataggcttttattcatttcttgaataattttgttatatcttcctcttttaggctgcaatgagctataattgcactactgcactccacgctgggtgacagagcaagaccctatctctaaaaataaaaaagtatatatatataaaaatatcttcctctattataatttaactcattaagccatttatttagatgtaaacttgcccccctgacatgtggtatgaaacaaatagaaacctagaaatttagtgcatattcaaatattaagacagacactggtgtggtgacttttgtctgtcgcttcattgggacgttttcttctttctgatcaacttaatgaaattataatttactataattcaagtgtagccatttttactgtagagttcaatgatctttgatgaacgtgtacacccatgtaaccaccacccccaatcaaagtaaagaacattttcttaccagaataaatttcctctcagtttgcagtcattctccccaggccctaggtcaacactgatccaccttctgtcacctggcaaggttagtttcttccctgatttagaattcatatacattaaatcagatagtatatactcttgtgttagtttcttaagcttacaatgttcagagatattgctgaagcctgagtctgacagctcaagtctaatgctgaattgtattccatgcatattcccagcggttatgtatggcggacacatcgcgtaatccagcgtggatggtatgactaagtgtacaacttaaccacacacaacaccaaacactggccgcccgcccaaacttaaaaaaccacggggggcaacaaaaccaaccgtcacgcacggaacagggtgatcccaaaaccggcaagcgagaatcggctgctagaaagacccacactgacaatacacagacacacggaaacacgacaannnnnnnnnnn

SEQ ID NO: 20073 - DNA, 2126 bp, Homo sapiens
  misc_feature 2125, 2126: n = A,T,C or G
tctggacaagaagtcgtagggggtgagggtggaggcagcggcggcggcggcggcggcggcggcggcggcggagcagatcttctggtgaccccacttctcgctgctcatgccgctgggactggggcgccggaaaaaggcgccccctctagtggaaaatgaggaggctgagccaggccgtggagggctgggcgtgggggagccagggcctttgggcggaggtgggtcggggggcccccaaatgggcttgcccccccctcccccagccctgcggccccgccttgtgttccacacccagctggcccatggcagtcccactggccgcatcgaggggttcaccaacgtcaaggagctgtatggcaagattgccgaggccttccgcctgcggcggcggaggtgatgttctgcaccctgaacacccacaaagtggacatggacaagctcctggggggccagatcgggctggaggacttcatcttcgcccacgtgaaggggcagcgcaaggaggtggaggtgttcaagtcggaggatgcactcgggctcaccatcacggacaacggggctggctacgccttcatcaagcgcatcaaggagggcagcgtgatcgaccacatccacctcatcagcgtgggcgacatgatcgaggccattaacgggcagagcctgctgggctgccggcactacgaggtggcccggctgctcaaggagctgccccgaggccgtaccttcacgctgaagctcacggagcctcgcaaggccttcgacatgatcagccagcgttcagcgggtggccgccctggctctggcccacaactgggcactggccgagggaccctgcggctccgatcccggggccccgccacggtggaggatctgccctctgcctttgaagagaaggccattgagaaggtggatgacctgctggagagttacatgggtatcagggacacggagctggcggccaccatggtggagctgggaaaggacaaaaggaacccggatgagctggccgaggccctggacgaacggctgggtgactttgccttccctgacgagttcgtctttgacgtctggggcgccattggggacgccaaggtcggccgctactaggactgcccccggaccctgcgatgatgacccgggcgcaacctggtgggggcccccagcagggacactgacgtcaggacccgagcctccagcctgagcctagctcagcagcccaaggacgatggtgaggggaggtggggccaggccccctgccccgctccaatcggtaccatcccctccctggttcccagtctggccggggtccccggcccccctgtgccctgttccccacctacctcagctgggtcaggcacagggaggggagggatcagccaaattgggcggccacccccgcctccaccactttccaccatcagctgccaaactggtccctctgtctccctggggccttgggttctgtttgggggtcatgaccttcctagtttcctgacgcagggaatacaggggagagggttgtccttccccccagcaaatgcaataatgccctcacccctcctgagaggagccccctccctgtggagcctgttacctccgcatttgacacgagtctgctgtgaaccccgcaacctcctccccacctcccatctctccttccaggcccatccctggcccagagcaggagggagggagggacgatggcggtgggtttttgtatctgaatttgctgtcttgaacataaagaatctatctgctgttaaaaaaaaacacgaaagaaaaaaacaacacacaacagagaggacagaccaaagaaaacacaaagaggagacacaagaaaacggaaacacacagacaaagagaaacaagggccacccacaaaaacacaaccaccaaacaagaaaacagacgcacaaagacaaaacagccacaacgggcaaaccacgaccacggcgaacccgtcaaacgacccgataatcagagggggggggaaaaacagaggacaaatacacagagaaatcaagcacctcgggcaacatacataaacagagaaaagggaaacaccagggaactcacgcgaggaagaatatgcaccgcgaatacagcgcagttttacgcgcagtann

SEQ ID NO: 20074 - DNA, 5752 bp, Homo sapiens
  misc_feature 1: n = A,T,C or G
ntatagggagtcgacccacgcgtccccagccgttgtctgggtggcgcggtcgagtcatcgcagggcctcaccgcttcgttctcccgtccctccccgcgccttggcgcggggggtcgactagccaagtgaggcgggaggcgactcggacctttccctgcatttcgtttcggccagtgccgggggctacccgccctggggcctgggatccttggggcccgtgaggcccactcttagcggccggggcctaccgcggcccgccgctggccctcatgaggcatagcctgaccaagctgctggcagcctcgggcagcaactccccaacccgcagtgagagcccggagccggctgcaacttgttcgctgccctctgacctgacccgggctgcagcgggggaggaggagacggcggcggccggatctcccggccgcaagcagcagtttggcgacgaaggagagttggaagccgggagggggagccgcggcggcgtggccgtgcgcgcgccctcccccgaggagatggaggaggaggcgatcgccagcctcccgggggaagagacggaggatatggactttctgtctgggctggaactggcggatctcctggaccccaggcaaccggactggcacctggaccccgggcttagctcgccggggcctctctcctcgtctggcggaggctcggatagcggcggcctgtggagaggggacgatgacgatgaggccgcggctgctgaaatgcagcgcttctctgacctgctgcaaaggctgttaaacggtatcggaggctgcagcagcagcagtgacagtggcagcgccgaaaagaggcggagaaagtccccaggaggaggcggcggtggcggcagcggtaacgacaacaaccaggcggcgacaaagagtccccggaaggcggcggcggccgctgcccgccttaatcgactgaagaagaaggagtacgtgatggggctggagagtcgagtccggggtctggcagccgagaaccaggagctgcgggccgagaatcgggagctgggcaaacgcgtacaggcactgcaggaggagagtcgctacctacgggcagtcttagccaacgagactggactggctcgcttgctgagccggctgagcggcgtgggactgcggctgaccacctcgctcttcagagactcgcccgccggtgaccacgactacgctctgccggtgggaaagcagaagcaggacctgctggaagaggacgactcggcgggaggagtctgtctccatgtggacaaggataaggtgtcggtggagttctgctcggcgtgcgcccggaaggcgtcgtcttctcttaaaatgtagggtcaagtaatctgctctttatccgcgtttacccctttcaactcccttacaccatgtcaaacttaccttagtgggacatcttcaccggacacatttcagaggagagaaaaaaagtaatattgaatcttaaagtgtttagctaaaagcatgaatgtgacacagtaaccaactcctaatgataacatgtgactattaaatctctctgacagtttcttttttaggtgatttccttcctgccaggctccgttgtaggggttacagaacagtcgttcccgcctcacaacctgtggatacagctgttggggcagaagagacgggaccagctgctggccacatttcctgctttattttaaaaggtagtataagaaatgaggaaaaagaggtaatatcagggcttctgctgttttttatttttaacatgttcataattaaaaagtattttccagcagtccaaagatgtaagttatcttacacataaaatgttttattttgttatttggttatgaaaatggaatccttgttcttgcacaactgtaaatgttttgttgctagataatacgatttgagacctgaattggtctttggtttccagtgcatcacagcatattttgtaaaatcatctactactgcacttgagcatgaatgggtagtagccaaactcacaaattggagtgatgaacctgcttatacctaagggcaggagcaagcccctcacaatgcagctgcatgggtttttagtgcctactgaattatatatatatatacatatatatatatatatataaaccaaaagtagttggaaagattatttgaaatgactaatttgtgctatctttatgaaatatgttaaatgtagcttttttgaaacagaagccttgaattgaaatttaactaatacttgaacattttgtatatatttctttgtatataattttgtgcagtaccaatgacaaaaatatggtgtcataataaaaccaggtttgttgatcttttagttatgggctcaaagaatttattcatctctaacatgatattggaaaataatggatgaaaataggaaaaatgattgttaatgctgactgtgggtcttaaaaggttctggaaagcagtaagttcatttttctaaaaactataacattctgttggagtattttcttccttacgtcaatacttttcctgcattatttgaaattgtgggctggggagaaacagtagtcaaagctttctgaattgagatactttgaaattccaagtgtagatttttagaatgtcattttataaatggcagtttttggaattacttgataagaacttttgaaaatggaaggattagtatggcctatttttaaagctgctttgttaggttccttatgttttattaactgtcttttctcagtttccatttcatttttttttttctagttttggtgacttagtgattttgtcattttttacatcaacttcatggtcttgtttttacatggtaattgcatgtacttaggatctatctaataggggctttaaataaatttggtcatatttatgtgtaagcacattttactgtaaatgtttgggtttctgaatttaaacagatctgtttatttcagtatgtagtaaacaatatcttaaagtgtccgattcactacttgttaattaaaaaagttatgattaatgtgaaactgttgtcttactatttttagaaaattgtgttctggatgattagcacatggataaaggagatttctggaatataaaatggattgtttttgaaatttctaggtttggctctatttactgtaatggttgaaaacaatttagtatttgggtgacccttttgtttttcttctaaatgtgcctctggtaaaatacagaactagactaaagatgtagctttttaatatttgtcttttgatggtggcaggagttcatacattaattgaactaacacatcatattttgacctactatttctatcatattgacttactgtttctgcacttctttgaccagacttatcttaaaaagtccacttttgttaaaatgtagtcacacctctgatataatccaacaagaagtgttcaaaatattttaaatatttgtgcattttataatcactaaattaatctctctctcttctctttgaacagcttagcagtgtctgcaaaaacgaatcttttcctacaacctgttaactgactggactgttggtaacaaagtaattgtgagaaccatgtcggtcaaaaatttggcatctgctgaaaaaaatgaatgccattttcaagttcccaaattacttctatactgatttcactttccagaaatggagatatgaaaagattctctggaatccttgaaagacttaatagagatacatgagactaagttaatcttggaacaaaattatactttttttgtctttcatgggagtgatactcagttattgcatatctttacaaaattgtaacctttggagaattacagtatttcatcaagaaattagagtttttacataatcaagagcatattctatggaattaacatttagtggactagaattacataagcaggccatcagtgatcacaaggcatatgagtttgtatttatttcctggaacatgagagctaatttggagtacagacagacaccctgctgagtagaatataaaagttaatgtaaagttctgaactataaagagtagtccttttaaatagatgcattgatttgtatatctttgaaaaagttgattatgattaaatgtgtgggtagttaattacaatttagggtaacaaccaggatgtatggattcttgaggttttggcttcttgagctttctcttgagtacttgatactgttttctgaatattttgaggtttctaattaatggtatgctagtttctactgttttatataaaaatttatctagtgttgtataaggactttagtattgtggatgatgggagtggctttttgtggcatatggttgttttaattgaaatattttttcagtttattacaagtgtgaaaaaacactcaaaactctggattgttttatttcatttttgttggattatgttaatacattccttcacgtggtttagattgagtcattttatctcacttacttggaaatgtgcagctgatagaagagggattgggtaggagattggcttttacttcataataaatatacagttggttattgtattattcaaaacttattaaatccattcagtttcttaccattttaagtgtattcagtgcctgtgaagccaggcagcagagtattcccactggcttaaaacttaggcgctgatgctcctacagtacagctagttataattccagaaccaaaggcaccaacattatttggtgaccttaactactactttgatagaacagactgggtaattcactgataatgagtcattacctttttaatatgtgattatctagttcagcattttgaatgtgtagtttaaggtctgatttagtaaaattttaaagctaaataatctgatgactcttgaaagtttaattggtagtatgacatttatgtttttttcccccagactcacagccaatacaaagttttgagactcctaaatgttaatatttttgctgtttttctgagctgtttttttatttacttaccacctaagctgcggatcaaaaagggaattcttccattagaaatttgtagtgttgtgtggccagcacagtatttttcagatttgaatttcagtacctctgtgtagcctcagtactctcaacaccagtcactctttattgtcttaaaatattccatactttttgttgacccaaaattgttgaaaatattttgctcagttttcacaatgaactaattgaaaagtgtagttactgtgttgtaaacatttgtgtagttctgttaatacactgatttgaattttatttatctcaacttcctttagcgtctgcctccaaattttgtctttgctgtatacccactgagatcaattccctagacccctctggctcttagtgtactataatttgggctttataaaatatattgtcttaatttaaatagaatgtgagccctctttttttttttttaagccaaataactacacaaagtaaattataaaagatttaaatagtttgtctacagtgactagactgaaatataaaaattgattgagggtagtttacttcaggtgttagctacaaatgactaaatgtccttaaataatgcagatatctgcccctctgaacaaaaattttggcaaagtaaatttgtagcaacagacttaacatgatttattgcttatgttgcccatttctgctaatggaaaagataatttaaaaatatgtggcagaggacagatattagaaatactttttggttacagaaaccattgtaaactcatcctcattt

SEQ ID NO: 20075 - DNA, 6021 bp, Homo sapiens
  misc_feature 5930, 5954, 5961, 5994, 6018: n = A,T,C or G
aaaaattgggagctcggcccgccgcgctcaggtctccgcttggagcccccgcacgccgggacggtgcgtagcgctggaagtccggccttccgagagctagctgtccgccgcggcccccgcacgccgggcagccgtccctcgccgcctcgggcgcgccaccatggggccccggctcagcgtctggctgctgctgctgcccgccgcccttctgctccacgaggagcacagccgggccgctgcgaagggtggctgtgctggctctggctgtggcaaatgtgactgccatggagtgaagggacaaaagggtgaaagaggcctcccggggttacaaggtgtcattgggtttcctggaatgcaaggacctgaggggccacagggaccaccaggacaaaagggtgatactggagaaccaggactacctggaacaaaagggacaagaggacctccgggagcatctggctaccctggaaacccaggacttcccggaattcctggccaagacggcccgccaggccccccaggtattccaggatgcaatggcacaaagggggagagagggccgctcgggcctcctggcttgcctggtttcgctggaaatcccggaccaccaggcttaccagggatgaagggtgatccaggtgagatacttggccatgtgcccgggatgctgttgaaaggtgaaagaggatttcccggaatcccagggactccaggcccaccaggactgccagggcttcaaggtcctgttgggcctccaggatttaccggaccaccaggtcccccaggccctcccggccctccaggtgaaaagggacaaatgggcttaagttttcaaggaccaaaaggtgacaagggtgaccaaggggtcagtgggcctccaggagtaccaggacaagctcaagttcaagaaaaaggagacttcgccaccaagggagaaaagggccaaaaaggtgaacctggatttcaggggatgccaggggtcggagagaaaggtgaacccggaaaaccaggacccagaggcaaacccggaaaagatggtgacaaaggggaaaaagggagtcccggttttcctggtgaacccgggtacccaggactcataggccgccagggcccgcagggagaaaagggtgaagcaggtcctcctggcccacctggaattgttataggcacaggacctttgggagaaaaaggagagaggggctaccctggaactccggggccaagaggagagccaggcccaaaaggtttcccaggactaccaggccaacccggacctccaggcctccctgtacctgggcaggctggtgcccctggcttccctggtgaaagaggagaaaaaggtgaccgaggatttcctggtacatctctgccaggaccaagtggaagagatgggctcccgggtcctcctggttcccctgggccccctgggcagcctggctacacaaatggaattgtggaatgtcagcccggacctccaggtgaccagggtcctcctggaattccagggcagccaggatttataggcgaaattggagagaaaggtcaaaaaggagagagttgcctcatctgtgatatagacggatatcgggggcctcccgggccacagggacccccgggagaaataggtttcccagggcagccaggggccaagggcgacagaggtttgcctggcagagatggtgttgcaggagtgccaggccctcaaggtacaccagggctgataggccagccaggagccaagggggagcctggtgagttttatttcgacttgcggctcaaaggtgacaaaggagacccaggctttccaggacagcccggcatgccagggagagcgggttctcctggaagagatggccatccgggtcttcctggccccaagggctcgccgggttctgtaggattgaaaggagagcgtggcccccctggaggagttggattcccaggcagtcgtggtgacaccggcccccctgggcctccaggatatggtcctgctggtcccattggtgacaaaggacaagcaggctttcctggaggccctggatccccaggcctgccaggtccaaagggtgaaccaggaaaaattgttcctttaccaggcccccctggagcagaaggactgccggggtccccaggcttcccaggtccccaaggagaccgaggctttcccggaaccccaggaaggccaggcctgccaggagagaagggcgctgtgggccagccaggcattggatttccagggccccccggccccaaaggtgttgacggcttacctggagacatggggccaccggggactccaggtcgcccgggatttaatggcttacctgggaacccaggtgtgcagggccagaagggagagcctggagttggtctaccgggactcaaaggtttgccaggtcttcccggcattcctggcacacccggggagaaggggagcattggggtaccaggcgttcctggagaacatggagcgatcggacccccctgggcttcaggggatcagaggtgaaccgggacctcctggattgccaggctccgtggggtctccaggagttccaggaataggcccccctggagctaggggtccccctggaggacagggaccaccggggttgtcaggccctcctggaataaaaggagagaagggtttccccggattccctggactggacatgccgggccctaaaggagataaaggggctcaaggactccctggcataacgggacagtcggggctccctggccttcctggacagcagggggctcctgggattcctgggtttccaggttccaagggagaaatgggcgtcatggggacccccgggcagccgggctcaccaggaccagtgggtgctcctggattaccgggtgaaaaaggggaccatggctttccgggctcctcaggacccaggggagaccctggcttgaaaggtgataagggggatgtcggtctccctggcaagcctggctccatggataaggtggacatgggcagcatgaagggccagaaaggagaccaaggagagaaaggacaaattggaccaattggtgagaagggatcccgaggagaccctgggaccccaggagtgcctggaaaggacgggcaggcaggacagcctgggcagccaggacctaaaggtgatccaggtataagtggaaccccaggtgctccaggacttccgggaccaaaaggatctgttggtggaatgggcttgccaggaacacctggagagaaaggtgtgcctggcatccctggcccacaaggttcacctggcttacctggagacaaaggtgcaaaaggagagaaagggcaggcaggcccacctggcataggcatcccaggactgcgtggtgaaaagggagatcaagggatagcgggtttcccaggaagccctggagagaagggagaaaaaggaagcattgggatcccaggaatgccagggtccccaggccttaaagggtctcccgggagtgttggctatccaggaagtcctgggctacctggagaaaaaggtgacaaaggcctcccaggattggatggcatccctggtgtcaaaggagaagcaggtcttcctgggactcctggccccacaggcccagctggccagaaaggggagccaggcagtgatggaatcccggggtcagcaggagagaagggtgaaccaggtctaccaggaagaggattcccagggtttccaggggccaaaggagacaaaggttcaaagggtgaggtgggtttcccaggattagccgggagcccaggaattcctggatccaaaggagagcaaggattcatgggtcctccggggccccagggacagccggggttaccgggatccccaggccatgccacggaggggcccaaaggagaccgcggacctcagggccagcctggcctgccaggacttccgggacccatggggcctccagggcttcctgggattgatggagttaaaggtgacaaaggaaatccaggctggccaggagcacccggtgtcccagggcccaagggagaccctggattccagggcatgcctggtattggtggctctccaggaatcacaggctctaagggtgatatggggcctccaggagttccaggatttcaaggtccaaaaggtcttcctggcctccagggaattaaaggtgatcaaggcgatcaaggcgtcccgggagctaaaggtctcccgggtcctcctggccccccaggtccttacgacatcatcaaaggggagcccgggctccctggtcctgagggccccccagggctgaaagggcttcagggactgccaggcccgaaaggccagcaaggtgttacaggattggtgggtatacctggacctccaggtattcctgggtttgacggtgcccctggccagaaaggagagatgggacctgccgggcctactggtccaagaggatttccaggtccaccaggccccgatgggttgccaggatccatggggcccccaggcaccccatctgttgatcacggcttccttgtgaccaggcatagtcaaacaatagatgacccacagtgtccttctgggaccaaaattctttaccacgggtactctttgctctacgtgcaaggcaatgaacgggcccatggccaggacttgggcacggccggcagctgcctgcgcaagttcagcacaatgcccttcctgttctgcaatattaacaacgtgtgcaactttgcatcacgaaatgactactcgtactggctgtccacccctgagcccatgcccatgtcaatggcacccatcacgggggaaaacataagaccatttattagtaggtgtgctgtgtgtgaggcgcctgccatggtgatggccgtgcacagccagaccattcagatcccaccgtgccccagcgggtggtcctcgctgtggatcggctactcttttgtgatgcacaccagcgctggtgcagaaggctctggccaagccctggcgtcccccggctcctgcctggaggagtttagaagtgcgccattcatcgagtgtcacggccgtgggacctgcaattactacgcaaacgcttacagcttttggctcgccaccatagagaggagcgagatgttcaagaagcctacgccgtccaccttgaaggcaggggagctgcgcacgcacgtcagccgctgccaagtctgtatgagaagaacataatgaagcctgactcagctaatgtcacaacatggtgctacttcttcttctttttgttaacagcaacgaaccctagaaatatatcctgtgtacctcactgtccaatatgaaaaccgtaaagtgccttataggaatttgcgtaactaacacaccctgcttcattgacctctacttgctgaaggagaaaaagacagcgataagctttcaatagtggcataccaaatggcacttttgatgaaataaaatatcaatattttctgcaatccaatgcactgatgtgtgaagtgagaactccatcagaaaaccaaagggtgctaggaggtgtgggtgccttccatactgtttgcccattttcattcttgtattataattaattttctacccccagagataaatgtttgtttatatcactgtctagctgtttcaaaatttaggtcccttggtctgtacaaataatagcaatgtaaaaatggttttttgaacctccaaatggaattacagactcagtagccatatcttccaaccccccagtataaatttctgtctttctgctatgtgtgggtactttggcagctgcttttgcaggaaatcacaattttcctgtgggaataaagatgggtccaaaaatagtcaaaaatttaaatatatatatatattaggtaatttatataggatgtcaggcaattagggcaggtccaggggtttaggttttaacttcccactggtttaaaataaaggctttacataggtttttctttcccnttggaaggactgtggctggtcccntttaacntaggggtttttaaagggccgggggtatttggantgtgggaacctcccgtttttccantgg

SEQ ID NO: 20076 - DNA, 3758 bp, Homo sapiens
  misc_feature 1, 2, 3, 3757, 3758: n = A,T,C or G
nnncccaggaactccgggccgcgttgttcgctggtacctccttctgacttccggtattgctgcggtctgtagggccaatcgggagcctggaattgctttcccggcgctctgattggtgcattcgactaggctgcctgggttcaaaatttcaacgatactgaatgagtcccgcggcgggttggctcgcgcttcgttgtcagatctgaggcgaggctaggtgagccgtgggaagaaaagagggagcagctagggcgcgggtctccctcctcccggagtttggaacggctgaagttcaccttccagcccctagcgccgttcgcgccgctaggcctggcttctgaggcggttgcggtgctcggtcgccgcctaggcggggcagggtgcgagcaggggcttcgggccacgcttctcttggcgacaggattttgctgtgaagtccgtccgggaaacggaggaaaaaaagagttgcgggaggctgtcggctaataacggttcttgatacatatttgccagacttcaagatttcagaaaaggggtgaaagagaagattgcaactttgagtcagacctgtaggcctgatagactgattaaaccacagaaggtgacctgctgagaaaagtggtacaaatactgggaaaaacctgctcttctgcgttaagtgggagacaatgtcacaagttaaaagctcttattcctatgatgccccctcggatttcatcaatttttcatccttggatgatgaaggagatactcaaaacatagattcatggtttgaggagaaggccaatttggagaataagttactggggaagaatggaactggagggctttttcagggcaaaactcctttgagaaaggctaatcttcagcaagctattgtcacacctttgaaaccagttgacaacacttactacaaagaggcagaaaaagaaaatcttgtggaacaatccattccgtcaaatgcttgttcttccctggaagttgaggcagccatatcaagaaaaactccagcccagcctcagagaagatctcttaggctttctgctcagaaggatttggaacagaaagaaaagcatcatgtaaaaatgaaagccaagagatgtgccactcctgtaatcatcgatgaaattctaccctctaagaaaatgaaagtttctaacaacaaaaagaagccagaggaagaaggcagtgctcatcaagatactgctgaaaagaatgcatcttccccagagaaagccaagggtagacatactgtgccttgtatgccacctgcaaagcagaagtttctaaaaagtactgaggagcaagagctggagaagagtatgaaaatgcagcaagaggtggtggagatgcggaaaaagaatgaagaattcaagaaacttgctctggctggaatagggcaacctgtgaagaaatcagtgagccaggtcaccaaatcagttgacttccacttccgcacagatgagcgaatcaaacaacatcctaagaaccaggaggaatataaggaagtgaactttacatctgaactacgaaagcatccttcatctcctgcccgagtgactaagggatgtaccattgttaagcctttcaacctgtcccaaggaaagaaaagaacatttgatgaaacagtttctacatatgtgccccttgcacagcaagttgaagacttccataaacgaacccctaacagatatcatttgaggagcaagaaggatgatattaacctgttaccctccaaatcttctgtgaccaagatttgcagagacccacagactcctgtactgcaaaccaaacaccgtgcacgggctgtgacctgcaaaagtacagcagagctggaggctgaggagctcgagaaattgcaacaatacaaattcaaagcacgtgaacttgatcccagaatacttgaaggtgggcccatcttgcccaagaaaccacctgtgaaaccacccaccgagcctattggctttgatttggaaattgagaaaagaatccaggagcgagaatcaaagaagaaaacagaggatgaacactttgaatttcattccagaccttgccctactaagattttggaagatgttgtgggtgttcctgaaaagaaggtacttccaatcaccgtccccaagtcaccagcctttgcattgaagaacagaattcgaatgcccaccaaagaagatgaggaagaggacgaaccggtagtgataaaagctcaacctgtgccacattatggggtgccttttaagccccaaatcccagaggcaagaactgtggaaatatgccctttctcgtttgattctcgagacaaagaacgtcagttacagaaggagaagaaaataaaagaactgcagaaaggggaggtgcccaagttcaaggcacttcccttgcctcattttgacaccattaacctgccagagaagaaggtaaagaatgtgacccagattgaacctttctgcttggagactgacagaagaggtgctctgaaggcacagacttggaagcaccagctggaagaagaactgagacagcagaaagaagcagcttgtttcaaggctcgtccaaacaccgtcatctctcaggagccctttgttcccaagaaagagaagaaatcagttgctgagggcctttctggttctctagttcaggaaccttttcagctggctactgagaagagagccaaagagcggcaggagctggagaagagaatggctgaggtagaagcccagaaagcccagcagttggaggaggccagactacaggaggaagagcagaaaaaagaggagctggccaggctacggagagaactggtgcataaggcaaatccaatacgcaagtaccagggtctggagataaagtcaagtgaccagcctctgactgtgcctgtatctcccaaattctccactcgattccactgctaaactcagctgtgagctgcggataccgcccggcaatgggacctgctcttaacctcaaacctaggaccgtcttgctttgtcattgggcatggagagaacccatttctccagacttttacctacccgtgcctgagaaagcatacttgacaactgtggactccagttttgttgagaattgttttcttacattactaaggctaataatgagatgtaactcatgaatgtctcgattagactccatgtagttacttcctttaaaccatcagccggccttttatatgggtcttcactctgactagaatttagtctctgtgtcagcacagtgtaatctctattgctattgccccttacgactctcaccctctccccactttttttaaaaattttaaccagaaaataaagatagttaaatcctaagatagagattaagtcatggtttaaatgaggaacaatcagtaaatcagattctgtcctcttctctgcataccgtgaatttatagttaaggatccctttgctgtgagggtagaaaacctcaccaactgcaccagtgaggaagaagactgcgtggattcatggggagcctcacagcagccacgcagcaggctctgggtggggctgccgttaaggcacgttctttccttactggtgctgataacaacagggaaccgtgcagtgtgcattttaagacctggcctggaataaatacgttttgtctttcaaaaaaaaaaaaaaagggggggggatttaaaattccctgggggggccaagttaagcgttccaggttcttgacaaaggggccctaaggagtgataaaaggaggaagggcggcgttaaagtggatggaaann

SEQ ID NO: 20077 - DNA, 548 bp, Homo sapiens
  misc_feature 548: n = A,T,C or G
cgacccacgcgtccgagcaaacataagaaaccatgagtcattttgtcatttagagtattctgataaaatctcttgaaaatactgaaatcaaaaggttaatgattttttgttcattctgatttgtcattttattatctgtctagcagaaaaatcaaatgggtaaattagcactttagacagccaacatagtgaaaccctcatctctactaaaagttggcaattaaatctgaatttacagatacagataacagtttatcagaaatcatatttttcctgaagaaaatttaaaattaggagttgtgggcctggtgcggtggcttacgcctgtaatcccagcactttgggaggctgaggtgagcagatcacttgaggtcaggagttcgagaccagcatagccaacatagtgaaaccctcatctctactaaaagtacaaaaattagccaggtgtggtggcgtgtgcctgtagtcccagctactcgggaggctgaggcgggagaatcgtttgaacccgggaggcggaggctgcagtgagccgagattgcgccacn

SEQ ID NO: 20078 - DNA, 3592 bp, Homo sapiens
  misc_feature 1, 2, 3, 4, 3590, 3591, 3592: n = A,T,C or G
nnnncgacccacgcgtccggtcggcgtctgggcctcgtccccttctctctgtctcccttgcctcccccatcacgtcccctgacaccgacaccccattgctcccacagtctccccagtctccactttggtccccagcgctgtctgcccgaggatttgcctgaaggctgcccccaactctgcacccgccccccgagggccaccgaggaccatgactaagacagatcctgccccgatggccccgccaccccgaggagaggaggaagaagaggaggaggaggatgaacccgtccccgaggcccccagccccacccaggagcgccggcagaagcctgttgtgcacccctcggcacctgcccccctccctaaggactacgctttcaccttcttcgatcccaatgacccggcgtgccaggagatcctgtttgaccctcagaccaccatccccgagctgtttgccattgtgcgccagtgggtgccccaagtccagcacaagatagacgtcatcggcaatgagattctgcgccgaggctgccatgtgaacgatcgtgacgggctgaccgacatgacactgctccactatgcgtgcaaagctggggcccacggagtcggggaccccgcggcagccgtgcgcctctcgcagcagctgctggcgctgggcgcagatgtgacgctgcgcagccgctggaccaacatgaacgcgcttcactacgcggcctattttgatgtgcccgacctcgtgcgtgtgctgctgaagggtgcgaggccgcgagtggtgaactccacgtgcagtgacttcaaccacggctcagccctgcacatcgctgcttccagcctgtgcctgggcgccgccaaatgtttgctggagcacggcgccaaccctgcgctgaggaatcgaaaaggacaggtgccggcggaggtggtcccagatcctatggacatgtccctggacaaggcagaggcggcactggtggccaaggagctgcggacgcttctggaagaggcagtgccactatcttgcgccctccccaaggtcacgctacccaactatgacaacgtcccaggcaatctcatgcttagcgcactgggcttgcgcctgggagaccgcgtgctgctggatggccagaagacgggcacactgcggttctgtgggaccacggagtttgccagcggccagtgggtgggcgtggagctggacgaacctgagggcaagaacgatggcagcgttgggggcgttcggtacttcatctgccctcccaagcagggtctctttgcctccgtgtccaagatctccaaggcagtggacgcacccccctcctctgtcacctccacaccccggaccccccggatggacttctcccgtgtcaccggcaaaggccgcagggaacacaaaggcaagaagaagaccccatcatccccatctctgggcagcttgcagcagcgtgacggggccaaggctgaggttggagaccaggtccttgtcgcgggccagaagcaggggatcgtgcgcttctacgggaagacagactttgccccaggttactggtatggcattgagctggaccagcccacaggcaagcatgatggctctgtcttcggtgtccggtacttcacttgccccccgaggcatggggtcttcgcaccagcatcccgtattcagaggattggcggatccactgattcccccggggacagcgttggagccaaaaaagtgcatcaagtgacaatgacgcagcccaaacgcaccttcaccacagtccggaccccaaaggacattgcatcagagaactccatttccaggttgctgttctgctgctggttcccctggatgctgagggcggagatgcagtcttagaggccctggacacctgacaaagagacagagtccccactagcatctcctgacacccgaggagccctgagtcaccctgagatagagattcccagtaacacatccagagtagagacccctgttagccagccctcgatcattgaggccccattattaacagatactcccataataacccccaaatacagaccccatgtcacccagaaagagattccctgagtagcaccttcaggctagtccctatccccaacccctcagagcagattcccagattaacagatttccatatcaccccaaatgatggtgaccctctccacataatgcattacaacagaacattcttgaatcacccaaccctggatcagaaacctccccattaacaaacactgccccttaagtcctcttgaaataaacataggtcacacccccaaagcaaaagagtaacagacattcatgtcattgttccccatttaacatcagtcctctcaagatgtcgtgaccccatggtcaccctgaagcccttagattccaacccctcaatcagagacttccttcattaacaaagacccttgttcttatccctcaagaagaaacccaccataaccagcccactgtcacccctaatttacagacaccaaaacagtcctggaagtgctaattacaggaccccccaagtcttcctaccctctgcaccctcaagaaacccccagtgccttgtatgaagcccaccccacatggcccacagctcctgtgctggccagactcccagaaaattctctattttttaagtaacgacttccccctttgggggaccccaaaatttggaggccccattctaggactctggggatcccaaaccctagagtacacacgtcccaaactcccctgtgccctcaagtcctacagcccctagaagaccccaatgccgtaactcctaggacccccaaatcatggaatcccaaatccccagggaatcccaaatttgaaaatccaatcccaagtccccaggaaacccaatcatgaggtccttgtgcctggtatggaggagactgcagtcaggatatgcattccaggctcccagacacctcaagccctattcacaggcaccaggaaaccccacacaggaattcccatccctggaaactggagaatttcaatgccccgagtccatgggtttcaagacaccaaattccaagagccccagccctaagggaaccccaaatcctaaagcctccatctctaataaatggaaggccccaaggccctgaggggatctcaaatcctggaaccccgatttcaatctacgttctagtcactggcctcaaaggaccccacagcacctgggccagaccaacagctcgagggagaacctgaaggcccagggggtccagggcggacctggggccccgaccaccaaggacagctcacgactgccccttcactgcatgtccccaaactcagcatgactcctgtcctcttcaataaagacgtttctatggccaaaaaaaaagacaaaacgaaacaaaagcaacacatcataacacacaaacaggtgcggctctaaacaccacccgagggccacataagacatccacgttttgacagggaccgtgcaggaataaaagaagagacggccacacacggtcggaaacgcacgtgatcagaaggctccgtgtgcaagtgcacccagaaacgcgagcaaaacgggtctgtacctgcgatgtcacagtatcaaacaacnnn

SEQ ID NO: 20079 - DNA, 1903 bp, Homo sapiens
  misc_feature 1892, 1893, 1894, 1895, 1896, 1897, 1898, 1899, 1900, 1901,1902, 1903: n = A,T,C or G
gcgtccgcattggctgaattcctgcaccggctcgtcggaggcgggacccaaagtaggctaggcctacggaagctgggtcttcttgctgtgaggtcgcgttccccagtgttacggagggtccttgaggcaggagtgaaaattgggtctgggggttagtcctggggtggaggtctgggcacgccgggtcggaccccctccatcttcggttttgcacaccccgctttccagcgcggagtcgcggcgggtagggcggcgtcgcgtgcgtgacgtcatccagcggcgcctcgcgaggctccagtggccttgacctcccgcggcgtgggaggctgcgcggcgatgctgcagttcgtccgggccggggcgcgggcctggcttcggcctaccggcagccagggcctgagttccctggcggaagaggcagcgcgtgcgaccgagaacccggagcaggtggcgagcgagggtctcccggagcccgtgctgcgcaaagtcgagctcccggtacccactcatcgacgcccagtgcaggcctgggtcgagtccttgcggggcttcgagcaggagcgcgtgggcctggccgacctgcaccccgatgttttcgccaccgcgcccaggctggacatactgcaccaggttgctatgtggcagaagaacttcaagagaattagctatgccaagaccaagacgagagccgaggtgcggggcggtggccggaagccttggccgcagaaaggcactgggcgggcccggcatggcagcatccgctctccgctctggcgaggaggaggtgttgcccatggcccccggggccccacaagttactactacatgctgcccatgaaggtgcgggcgctgggtctcaaagtggcactgaccgtcaagctggcccaggacgacctgcacatcatggactccctagagctgcccaccggagacccacagtacctgacagagctggcgcactaccgccgctggggggactccgtactcctcgtggacttaacacacgaggagatgccacagagcatcgtggaggccacctctaggcttaagaccttcaacttgatcccggctgttggcctaaatgtgcacagcatgctcaagcaccagacgctggtcctgacgctgcccaccgtcgccttcctggaggacaagctgctctggcaggactcacgttacagacccctctaccccttcagcctgccctacagcgacttcccccgacccctaccccacgctacccagggcccagcggccaccccgtaccactgttgatgtgaagcacctcttctgagccaggccgagcccctggccgacttgggagcctcaggcccacgcccacccttcgaggaaggtgtcacctggaccccttcattccacggaggaagctgaggccacagggagcggccatcgccattgggaaggggcgactccacggagagcccagacgggcttctgcatccattccctctttttgtttttaaaataaattgtatttttgaatcaaggaggataaaaaaaaaaaaaaaataaaataaaaaaaaaaaaaaaaaaactaaaaaaataaaaaaatcctttataatatacacctctcggtcatcccccctaatcccaattttccctttcattctgactgtttcccattacatggccgcgctattacaacacctgtggtgcaaaacacttggggtacccactctattttccctttggccatattccccttttactcgtcgcgggcaatcctgaaaggccctcgcatatgggcctttccaaaatttgcgaccctttaaggggaatgggaacttttatgggtaatcctttcgttaaattggtggcaaccttttgtttaaacccttcactcttaatcaatgagccgccttctgatatatccnnnnnnnnnnnn

SEQ ID NO: 20080 - DNA, 2718 bp, Homo sapiens
  misc_feature 2690, 2691, 2692, 2693, 2694, 2695, 2696, 2697, 2698, 2699,2700, 2701, 2702, 2703, 2704, 2705, 2706, 2707, 2708, 2709,2710, 2711, 2712, 2713, 2714, 2715, 2716, 2717, 2718: n = A,T,C or G
cgcgtccgcccggctgagctctggaaagctgtgccttgaactggagccacttcggggatgagatcctgacccgcaccctgagggcagccccgggagggcctgcaccctccttctgcctgagaagttccaccgcagtaccaagtccccagcttcccatcagtgctccttgatgaaatcccctggagatggtttcaagatataggatccttatatgtgaagtatcccaaatgaagttggagcatccatgttgaaattgcttcatgttgtggaattgatgagtgccatcagaaagctgtatcatgagctgcctgcacttctaaagtgtccagtggatttttaatcacatgagcctggaaatagggttatgagaagaagctcagagcagagcaccgaaagtggccactaccagcatgaagagcccaacaattcaaactggtgaagtgagaaaaacagaatgcagctttcaaggttcgtttcaagcagttggcttgtgggactctgagagatgctgctgcccatgacatgcgggaattatcatgatcaactacccagcttggatttcacccagtggcccgacccacgcgtccggggacgcgtggggttggatttttcaaaagagtaaaccagacccgtgaccaaggtgtagactaagaagtggagtcatgcttcacacggccatatcatgctggcagccattcctgggtctggctgtggtgttaatcttcatgggatccaccattggctgccccgctcgctgtgagtgctctgcccagaacaaatctgttagctgtcacagaaggcgattgatcgccatcccagagggcattcccatcgaaaccaaaatcttggacctcagtaaaaacaggctaaaaagcgtcaaccctgaagaattcatatcatatcctctgctggaagagatagacttgagtgacaacatcattgccaatgtggaaccaggagcattcaacaatctctttaacctgcgttccctccgcctaaaaggcaatcgtctaaagctggtccctttgggagtattcacggggctgtccaatctcactaagcttgacattagtgagaataagattgtcattttactagactacatgttccaagatctacataacctgaagtctctagaagtgggggacaatgatttggtttatatatcacacagggcattcagtgggcttcttagcttggagcagctcaccctggagaaatgcaacttaacagcagtaccaacagaagccctctcccacctccgcagcctcatcagcctgcatctgaagcatctcaatatcaacaatatgcctgtgtatgcctttaaaagattgttccacctgaaacacctagagattgactattggcctttactggatatgatgcctgccaatagcctctacggtctcaacctcacatccctttcagtcaccaacaccaatctgtctactgtacccttccttgcctttaaacacctggtatacctgactcaccttaacctctcctacaatcccatcagcactattgaagcaggcatgttctctgacctgatccgccttcaggagcttcatatagtgggggcccagcttcgcaccattgagcctcactccttccaagggctccgcttcctacgcgtgctcaatgtgtctcagaacctgctggaaactttggaagagaatgtcttctcctcccctagggctctggaggtcttgagcattaacaacaaccctctggcctgtgactgccgccttctctggatcttgcagcgacagcccaccctgcagtttggtggccagcaacctatgtgtgctggcccagacaccatccgtgagaggtctttcaaggatttccatagcactgccctttctttttactttacctgcaaaaaacccaaaatccgctttgcccaggatcaagacagcgggatgtatgtttgcatcgctagcaatgctgctgggaatgataccttcacagcctccttaactgtgaaaggattcgcttcagatcgttttctttatgcgaacaggacccctatgtacatgaccgactccaatgacaccatttccaatggcaccaatgccaatactttttccctggaccttaaaacaatactggtgtctacagctatgggctgcttcacattcctgggagtggttttattttgttttcttctcctttttgtgtggagccgagggaaaggcaagcacaaaaacagcattgaccttgagtatgtgcccagaaaaaacaatggtgctgttgtggaaggggaggtagctggacccaggaggttcaacatgaaaatgatttgaaggcccacccctcacattactgtctctttgtcaatgtgggtaatcagtaagacagtatggcacagtaaattactagattaagaggcagccatgtgcagctgcccctgtatcaaaagcagggtctatggaagcaggaggacttccaatggagactctccatcgaaaggcaggcaggcaggcatgtgtcagagcccttcacacagtgggatactaagtgtttgcgttgcaaatattggcgttctggggatctcagtaatgaacctgaatatttggctcacactcacggacaattattcagcattttctaccactgcaaaaaaaaaaaaaaaaaaaaaaaaaaaaaaaaaaaaaaaaaaaaaaaaaaaaaaaaaaaaaaaaaannnnnnnnnnnnnnnnnnnnnnnnnnnnn

SEQ ID NO: 20081 - DNA, 894 bp, Homo sapiens
aagagatttttctgaacgatattcctgaacaaaggcaactgtaacaacgataagtattgccacagtgatactgacggcatcatcaaactgatgcattaaaacactgatgactgcagaagccagaagcagcataataaggggatttttaaactgagaaatatacttcttccacagtggctcatcttcactaatatcaaactcattccagccatgaaaggctcgcctatgactaacttcacatttgtttagaccattctgaagatcagcttggagaatgcttgcaacttcactgactggtaattcacttgctttttttgatgtcaatacaggaatcattgtctcattttcaccattaggtattttttgaaaacgtgcaaccttcattttccatcgaaactgcactcgggttgatggctacaaagtctttagtgtcagccacggccacactgggaatagagaggagaggaggaggacaaggaagagaagcccccggaatcccaggctgtcacccccgctcccggccacgcgtcccacggctgctcccaccacccctagcagcagcatccaaagccccggacagccctcctccaggctgcggggtctcagccgcggggctcgcgggggcgccccgcgcgcctcgggagaagaggagctgctcgcggggcagcggtgcgaggcgggagcctgctcccggcgtgagaagaagcgagcgggagggaggaagggagggagagagggcgggcggggaggggagagaagaggaggtgaggggacccgtcacggtccgccgggccggctccgcgaggccgtgctggtctgctcccgcctccgactcctgcgctccgcccctccccgccgccggccgcccagtcgcgccccgcacttgtggaggac

SEQ ID NO: 20082 - DNA, 1314 bp, Homo sapiens
  misc_feature 1, 2, 1310, 1311, 1312, 1313, 1314: n = A,T,C or G
nngatgtggaagcgccgactgacttattgtttgattcaagaatcgtcttattgctggaagtagatctgaataggctaccggagccttgtttttctaaaggggggcgctgtctagcacttaactagggtaagcattcttaacatgtatttccacttgccctgagtaaatctgtggtgagagaagcttcctttctgcagtttaaaaaagctactgcttccttaggcttcatcaggaagccaccttcagttgtgaatcctatggtgttatttattttgttcctgaaatgggatttagtgcaaaaagtttacaactacagtctttaacacatttttttcagggtatgacgacttgaatgtttatacttttattctataatttgccctgcacttattttacaacctagtaataatgtggataaatgtatctacatgacacatgtcaagaccaaaataactgtgaatgacacaccttgctgtaaatgaactgtgctaaccctgactgtgggcttgagaacaaagatgaactctagaactctagcagcctaactgctgcttctcaaataactgtgtgaacagtgagatattactgtttgtttctaaaaatcctactgtgcccagtttccttcactacatgccctgcattttttatttaaatatttagctgtagcgccatcagatatggatgccttctaacaattgctgtttgtaaaataaatcaggatggtagaaagtgattatatggaaaattggaacctggatgagaccttttcgttgaattctgaagagtaatgatgtgaaaattgatacagggcaagagatgattcttttgtttttcttctacttcatgtccagaagagtaagagggaaaatggacatatgtttcatatccaagggtattcaaactgtagttagttggtacctctgaaaaatgagaatggtgagcgcacgggttggttgttctagcatgaatacaattctggaaactgttatgcaatttcccttttttaacccacattactttaggggtgcattaagtcgccaaactatactagttctttgtatccctagacttgctgatatttacctctctctgtctcttcagagtaatggttcccttctttccttcctactttcctttattctctcttcttcctccttctatttttttcttctcttcttttcttaaactttttaaaggtgacccggtgtaggtaatcaacttatttgacccattaactgttttcgcagacatttatagaaccggacgcaagagtttacccggattacttaccagattaactggcggcctannnnn

SEQ ID NO: 20083 - DNA, 9169 bp, Homo sapiens
cgaccgggcaccgcgtgaggatgtgccgggcggtcctttcctcctcctcttcctcctcctcccggctccctgcctagtctccatataaaagcggggccgcctccccgccctctctcactccccgctcctctccgccgcgcactctccgcggcgctgggagagggcggagggggaggcggcgcgcggcgccagaggaggggggacgcagggggcggagcggagacagcaccttcggagataatcctttctcctgccgcagaggagaggagcggccggagcgagacacttcgccgaggcacagcagccggcaggatggcgaccgtggtggtggaagccaccgagccggagccgtccggcagcatcgccaacccggcggcgtccacctcgcctagcctgtcgcaccgcttccttgacagcaagttctacttgctggtggtcgtcggcgagatcgtgaccgaggagcacctgcggcgtgccatcggcaacatcgagctcggaatccgatcatgggacacaaacctgattgaatgcaacttggaccaagaactcaaactttttgtatctcgacactctgcaagattctctcctgaagtcccaggacaaaagatccttcatcaccgaagtgacgttttagaaacagtggtcctgatcaacccttctgatgaagcagtcagcaccgaggtgcgcttaatgatcactgatgctgcccgacacaagctgctcgtgctgaccgggcagtgctttgaaaataccggagagctcattctccagtccggctctttctccttccagaacttcatagagattttcaccgatcaagagatcggggagttactaagcaccacccatcctgccaacaaagccagcttaaccctgttctgtcctgaagaaggggactggaagaactccaatcttgacagacacaatctccaagacttcatcaatattaaactcaattcagcttctatcttgccagaaatggaaggactttctgagtttaccgagtatctctcagaatcagtggaagtcccatctccctttgacatcttggaacctcccacatcgggtggatttctgaagctctccaagccctgctgttatatttttccaggagggaggggcgattctgccttgtttgcagtgaatggtttcaatatgctcatcaatggcggatcagagagaaaatcctgcttctggaagctcatccgacacttagaccgagtggactccatcctgctcacccacattggggatgacaatttgcctggaataaacagcatgttacagcggaaaattgcagagctcgaggaagaacagtcccagggctccaccacaaatagtgactggatgaaaaacctcatctcccctgacttaggagttgtatttctcaatgtacctgaaaatctcaaaaatccagagccaaacatcaagatgaagagaagcatagaagaagcctgcttcactctccagtacctaaacaaattgtccatgaaaccagaacctctgtttagaagtgtaggcaatactattgatcctgtcattcttttccaaaaaatgggagtaggtaaacttgagatgtatgtgcttaatccagtcaagagcagcaaggaaatgcagtattttatgcagcagtggactggtaccaacaaagacaaggctgaattcattctgcctaatggtcaagaagtagatctcccgatttcctacttaacttcagtctcatctttgattgtgtggcatccagcaaaccctgcggagaaaatcatccgagtcctgtttcctgggaacagcacccagtacaacatcctggaagggttggaaaagctcaaacatctagactttctgaagcagccactggccacccaaaaggatctcactggccaggtgcccactcctgtggtgaaacaaacaaaactgaaacagagggctgatagccgagaaagtctgaagccagccgcaaaaccacttcctagcaaatccgtgcgcaaggagtcaaaagaagaaacccctgaggtcacaaaagtgaatcacgtggaaaaagccacccaaagttgaaagcaaagaaaaggtaatggtgaaaaaagacaagccagtaaaaacagagaccaaaccttcagtgactgaaaaggaggttcccagcaaagaagagccatctccagtgaaagccgaggtggctgagaagcaagccacagatgtcaaacccaaagctgccaaggagaagacggtgaaaaaggaaacaaaggtaaagcctgaagacaagaaagaggagaaagaaaagccaaagaaagaagtggctaaaaaggaggacaaaacacctatcaagaaggaggaaaaaccaaaaaaggaagaggtgaaaaaagaagtcaaaaaagagatcaagaaagaagagaaaaaagaacccaagaaagaggttaagaaagaaacaccgccaaaggaagtcaagaaggaagttaagaaggagagagaagaaggaagtgaaaaaggaagaaaaggaacccaaaaaagaaattaagaagctccctaaagacgcaaagaaatcatctactcctctgtctgaagcaaaaaaaaccagctgctttaaaaccaaaagtacccaagaaggaagagtctgtcaagaaagattctgttgctgccggaaagccaaaggagaaggggaaaataaaagtcattaagaaggaaggcaaggccgcagaggctgtcgctgcagctgtcggcactggagccaccacagcagctgtcatggcggcagctggaatagcagccattggccctgccaaagaactcgaagctgagaggtcccttatgtcatctcctgaggatctaaccaaggactttgaagagttaaaggctgaagaggtcgatgtaacaaaggacatcaagcctcagctggagctaatcgaagacgaagagaaactgaaggaaactgagccagtcgaagcctacgtcatccagaaggagagagaagtcaccaaaggtcctgccgagtcccctgatgagggaatcactaccactgaaggggagggcgaatgtgaacagacacctgaggagctggagcccgtcgagaagcagggagtagacgacattgaaaaatttgaagatgaaggagccggttttgaagaatcttcagagactggagactatgaagagaaggcagaaactgaggaggctgaggagccagaagaggatggggaggaacacgtatgtgtgagcgcctccaagcacagccccactgaggatgaggaaagtgccaaggcggaggctgatgcatacatcagggagaagagggagtctgtggccagtggggatgaccgagccgaagaagacatggatgaggccattgagaaaggagaggctgaacaatctgaagcaggaggctgatgaggaggacaaagctgaagatgccagagaggaggaatatgagccggaaaaaatggaagctgaagactatgtgatggctgtggtcgacaaggctgcagaggctggtggtgccgaggagcagtatggattcctcaccacaccaaccaagcaactaggagcccagtctcctggccgagaacctgcatcttcaattcatgatgagactttacctggaggctcagagagcgaggccaccgcttctgatgaggagaatcgagaagaccagcctgaggaattcactgccacctctggctacactcagtctactattgagatatccagtgagcccacccccatggatgagatgtctacccctcgagacgtgatgagtgatgagaccaacaatgaagagacggagtccccttctcaggaattcgtaaatatcaccaaatatgaatcttcattgtattctcaggaatactctaaacctgctgatgttacaccgctcaacggattttctgaaggatcaaaaacagatgccactgatggcaaggattacaatgcttcagcctctaccatatcaccaccctcttccatggaggaagacaaattcagcagatctgctttacgtgatgcttactgctctgaagtgaaagccagcaccactttggacatcaaagatagcatctcagctgtttcaagtgaaaaggtcagcccatcgaagagcccgtccctgagtccatctccaccatcacccttagaaaagacccccctgggtgaacgtagtgtgaacttctctctgacgcccaatgagattaaagtctctgcagaggcagaagtagccccggtgtctcctgaggtgacccaagaagtagttgaagaacattgtgctagtcctgaggacaagactctggaagtggtgtcaccatctcagtccgtgactggcagtgctggtcacacaccttactatcaatctcctactgacgagaaatccagtcatctccctacagaagtcattgaaaaaccaccagcagttccagtgagttttgaattcagtgatgccaaagatgagaatgaaagggcttcagtaagccccatggatgagcccgtgcctgactcagagtctcctattgaaaaagttttgtctcctttacgcagcccgcccctcattggatccgagtctgcttatgaaagttttctaagtgctgatgacaaggcttctggcagaggtgccgaaagtccttttgaagaaaagagtggaaaacaaggctctccagaccaagtaagtccagtttctgaaatgacttctactagtctttaccaagacaaacaggaagggaaaagcacagactttgcaccaataaaagaagactttggccaagaaaagaaaactgatgatgttgaagccatgagttctcaaccagcactggctctggatgaaaggaaattaggagatgtttctcccacacaaatagatgtcagtcagtttggatcttttaaagaagacactaagatgtccatttctgaaggtactgtctcagacaagtcagctactcctgttgatgagggcgtagcagaagacacgtactctcatatggagggtgtggcctcagtgtccacagcctcagtggctacgagctcatttccagagccaacaacagatgatgtgtctccatctctgcatgctgagtttggctccccacattccacagaagtagatgactccctttcagtgtctgttgtgcaaacacctaccacattccaggaaacagaaatgtctccatctaaagaagaatgcccaagaccgatgtcaatttctccaccagatttctcccctaaaactgcaaagtccaggacacccgttcaagatcacagatctgaacagtcctcaatgtctattgaatttggccaagaatctcctgagcaatcccttgctatggacttcagtcgacagtctccagatcaccctacagtgggtgcaggcgtgcttcacatcactgaaaatgggccaactgaagtggactacagtccttctgacatgcaggactccagtttatcacataagataccacctatggaggagccgtcctacacccaagataatgatctttctgagctcatctcagtatctcaggtagaggcctccccgtccacctcttctgctcataccccttctcagatcgcttctcctctccaagaagatactctatccgatgttgctcctcccagagatatgtccttatatgcctcactcacctctgaaaaagtgcaaagtctggaaggagagaagctctctccaaaatctgatatctctccactcaccccacgagagtcctctcctttatattcacctactttttcagattctacctctgcagtcaaagagaaaacagcaacttgccacagttcctcttctccaccaatagatgcagcatccgcagagccctatggcttccgtgcctcagtgttattcgatacaatgcaacaccatctagccttgaatagagatttgtccacacctggcctggagaaggacagtggagggaagacacctggtgactttagctatgcctatcaaaagcctgaggaaacaaccaggtccccagatgaagaagattatgactatgagtcttatgagaagaccacccggacctcagatgtgggtggctattactatgagaagatagagagaaccacaaaatctccaagtgacagtggctactcctatgagaccattgggaaaactaccaagacccctgaagatggtgactattcctatgaaattattgagaagaccacacggacccctgaagagggtgggtactcatatgacataagtgaaaagaccaccagcccccccgaagtgagtggttacagctatgaaaagactgagaggtctagaaggcttctggatgacatcagcaatggctatgatgactctgaggatggtggccacacacacttggggaccccagctactcttatgaaaccactgagaaaattaccagtttccctgagtctgaaggttattcctatgagacatctacaaagacaacacgaacccctgatacttccacatactgttacgagactgcagagaaaatcactagaacccctcaggcatccacatattcctacgagacttcagacctatgctacactgcagaaaagaagtccccctcagaagcccgtcaggatgtcgatttatgcctcgtgtcctcttgtgaatacaagcaccccaagacagagctttcaccctctttcattaatcccaatcctcttgagtggtttgccagtgaagaacccactgaagaatctgaaaagcccctcactcaatcagggggagccccaccgcctccaggaggaaagcaacagggccgacagtgtgatgaaacccctcccacctcagtcagcgagtcagccccatcccagaccgactctgatgttcccccggagactgaagagtgcccctccatcacggccgatgccaatatcgactctgaagacgagtcggaaaccatccccacagacaaaactgtcacgtacaaacacatggacccacctccagctcccgtgcaagaccgcagcccttcgccacgccaccctgatgtgtccatggtggacccagaggccttggccattgagcagaacctgggcaaagctctaaagaaagatctgaaagagaagaccaaaaccaaaaagccaggtacaaagaccaagtcatcttcacctgtcaaaaagagtgatgggaagtctaagcccttggcagcttcaccaaaaccagcgggcttgaaagaatcctcggataaagtgtccagggtggcttctcctaagaagaaagaatctgtggaaaaggcagcaaaacccaccaccactcctgaggtcaaagctgcacgtggggaagagaaagacaaggagaccaagaatgctgccaatgcctctgcatccaagtcggccaagaccgccactgcaggaccaggaactaccaagacgaccaagtcatctgctgtgcccccaggcctccctgtgtatttggacctgtgctacattcctaaccacagcaatagtaagaatgttgatgtggaatttttcaagagagtgcggtcttcctactacgtggtgagtgggaatgaccctgctgctgaggagcccagccgggctgtcctggacgctttgttggaaggaaaggctcagtggggcagcaacatgcaggtgacactgatcccaactcatgactcagaagtgatgagggaatggtaccaggagacccatgagaaacagcaagatctcaacatcatggttttagcaagcagcagcacagtggttatgcaagatgaatccttccctgcatgcaagattgaactgtaaaaaccaaggccagccacaccacaggatctgaactttgtttccagaaattcttcaatttgaaatcaccttttctaaaaagtcaattcatctagttaagtcgctgaacaattacctgccaaatgctatactgtgtcatggtgatgcaagtcactaaatttctcagtttttgctgattgctaagggaaataacagtatttccacaatagggttcaaattcctgcaaaattacctaccccagttcatctctgctgaacatttggaaaccatgcactagccaacccaactgacttctgctaggtagaggcatttgtcttagagagagagagagcgcgggagagagtgagagagagtgagagcacaaagataacgcaggagagagagagagaaagaatgagaaagaaaaggaatgcaagagaaggagatgtaatgacagagagttctggtgagatacccagagagaaaaagagagagcagggtggggtaaggaggagaaaataaaccaacaattaggtctgcattttctcaggcagtaggcattctttagtctacataggcaaagttttccatttttgtcagtctgagtcatcaaaaagagtcttaattttctaaaacaagttggctagaagaaagtaaaaagaacaacacttgttatgagggcatgtgatattttcacatcttaattaagctccttcagtttgaaggctgcacactgacataatgtagtgagtgtagactggccatgcaagtggtttgggccccattcagaactctcagactctaaacacacaagtagattgatctaaggcatgctcccagcatttgtccacccacttagtccactctgagtcgattaacctgcatgcagcaacacccaagtccaccccaattaactgaagcaaataccaaagcagttgggagtacatatggtagacaatttgccttaggaagtgacttgaatgtacaaagatacttgatgcacttattttttaatgtgagacagcaagtttataaaacatccatataggattatagatacttaaaggaacacgtgggtgagcgtgtgtgggggtactagaagctgatctgattggtccaacagtttgatgctgagtcatgcgtgttgaatcccacttcagtgcacctgtggcctctcagtcaaacaagttgtgcctttcacagcttctttactactgcaagttcaagactgaaatggcttctatgatcagaactgggaaaacagtgaatcttatggtggaagaggttctcagcaagtgtacagtatttaccttcctttgtcttacattggctttttaaattttccattaatttcaacataattatgggaacaagtgtacagaagaattttttttttaagatatgtgagaacttttcatagatgaactttttaacaaatgttttcatttacaggaaattgcaaagaaaa

SEQ ID NO: 20084 - DNA, 1097 bp, Homo sapiens
  misc_feature 1097: n = A,T,C or G
agttttcttttctggagtccaaacgaggtgcgggacggaagagggggtgaaggccagaggctcggggcttcaagaccgctgtctggagtccccctttccaggccatgtcggggcccacctggctgcccccgaagcagccggagcccgccagagcccctcaggggagggcgatcccccgcggcaccccggggccaccaccggcccacggagcaggtaaggcagcccttgtgagacagaagagccacccagctggggcgctcacctctgtcctaccgctccagcctcccgccctggctgcttcctcctgccccttccccaagccgaggcggggggaacagccgcctgcgctctcttgggaccctagatttgggggaggaggtaacgagaggcggagagggtggctcctcaggtatacacccctcctgtcctccgccaccccacctttgatgtctcttccctcaacccagcactccagccccaccccagggtcaatttttgcccccttccatctgagcagtgttaccaggccccagggggaccggaggatcgggggccggcgtgggtggggtcccatggagtactccagcacacgcaggggctccctgcagcggggggggccttcgccctggaagcctggacgccgagatagacttgctgggcagcacacgctggccgagctgaatgggggtcggggtcatgcgtcacggcgaccagaccgacaggcatatgagcccccgccacctcctgcctaccgcacgggctccctgaagccaaatccagcctcgccgctcccagcgtctccctatgggggccccactccagcctcttacactaccgccagcaccccggctggcccagccttccccgtgcaagtgaaggtggcacagccagtgaggggctgcggcccacccaggcggggagcctctcaggcctctgggcccctcccgggcccgcactttcctttccaaggccgaggtgaagtctgggggcctggctataggagccagcctccagaggatgagctggataggctgacaaagaagctggttcacgacatgaaccacccgcccagcggggagtcctttggccagtgtggn

SEQ ID NO: 20085 - DNA, 639 bp, Homo sapiens
cgggagtcgacccacgcgtccggagcagctgccgaagtcagttccttgtggagccggagctgggcgcggattcgccgaggcaccgaggcactcagaggaggtgagagagcggcggcagacaacaggggaccccgggccggcggcccagagccgagccaagcgtgcccgcgtgtgtccctgcgtgtccgcgaggatgcgtgttcgcgggtgtgtgctgcgttcacaggtgtttctgcggcaggcgccatgtcagaaccggctggggatgtccgtcagaacccatgcggcagcaaggcctgccgccgcctcttcggcccagtggacagcgagcagctgagccgcgactgtgatgcgctaatggcgggctgcatccaggaggcccgtgagcgatggaacttcgactttgtcaccgagacaccactggagggtgacttcgcctgggagcgtgtgcggggccttggcctgcccaagctctaccttcccacggggccccggcgaggccgggatgagttgggaggaggcaggcggcctggcacctcacctgctctgctgcaggggacagcagaggaagaccatgtggacctgtcactgtcttgtacccttgtgcctcgctcaggggagcaggctgaagggtcccca

SEQ ID NO: 20086 - DNA, 1001 bp, Homo sapiens
  misc_feature 1, 2, 994, 995, 996, 997, 998, 999, 1000, 1001: n = A,T,C or G
nnaggctaggtcgaggccggtgtttaatcggccgaggcgctcttgccgggagctgttccgcatcgccccgggggcccctacgcgaggatctccggggccgttggcagcgcctggcacttctgagctcggcggacgagagcctgcaggtttcctccagtcagggacggcgaagggcggaaagcgcaggaggaggcagtgttaggccttaggccgggtgggccgggtcaggagagacgcgcccatctttcgccatccggggtgcgcgaggtcctctcgggacccggccggcgacccgtagctcgggcacgcgcctgtcgcatcccgcaggaaggaggggtccggcctgaggcccggggcggcgtccgccatggagatcccctcggtccaggccggcgcctgggacctggcgggcggccctgaccgccttcctccctgcgcgggctgggtcgcggacgtgcccttcgcggcactcggcctcctctgcgtctccgccttccctgggccgcactgctgcctgggcgcggcggcgtgcgacggcgccctgttgaatgggctgtgagggcccaggtttaaagcgctggcgaacgcggctccgggggcgcacggcagctgcagcggtggcgaccaaacgggtgtggagttggcggcggcatggagggcctggctggctatgtataacaaggcggcagcgagggcaaggtgctgactctggccggcctttgctttcttcaaaccgggtctcgaaaagcgaaattcccggtatctgtttgggtatgtcaggcaagcagggaagggcagagcgtccaagccccctcaaatattaggaggcccggaatgggacaccgaaagggttgtacgcttggtccatagaacattacccggtgggactcacagacaatggacgccgcttcgagggttgccttgatgggcccgtctttgggtgcacggcagaattgaacttacttatccgggcaagagaaacaaagaaaaaccnnnnnnnn

SEQ ID NO: 20087 - DNA, 1234 bp, Homo sapiens
  misc_feature 1066, 1233, 1234: n = A,T,C or G
tcgacccacgcgtccggcgctcgcgccggaccggaaagccggggaagtggccgaggagggagggctgcgagccatggcgaccaagacggcgggcgtggggcggtgggaggtagtgaagaagggtcggcggcctggggtcggcgccggcgccggcggccgaggaggcggcaggaaccgcagggcgctcggggaagcaaacggagtgtggaaatacgacctgacccctgcaatccagaccacaagcaccctttatgagcggggctttgagaatatcatgaagcggcagaataaggagcaggtcccaccccctgctgtggaacctaagaaaccagggaacaagaagcagccaaagaaggtggcaactcctcccaaccaaaaccagaagcagggccgcttccgcagcctggaggaagcactgaaagctctggatgtggcagacctgcagaaggaactggacaagagccagagtgtgttctctggaaacccatccatatggttgaaggacctggccagctatctcaactacaagctacaagctcctctaagtgaacccacgctgagccagcatactcatgattatccctacagcctggtgagccgggagctacgtgggatcatccgagggctgctggcgaaggcagcagggtctctggagctcttttttgaccactgtctgttcaccatgttgcaagagctggataagacaccaggggagtcactacatggttaccgcatctgtatccaggccatcctgcaagacagagcccaagattgccacggcaacacctaggccaggttcctggaactgctgagggtcccaccacgagtcgatccaagcaaaggtgtctcaaccaatcatgttgggccctggggtcacgcaggtgtggcaagactcaccggtggggactgcacactggtggcccggggattcttgctggcctgtgtccggggggaataacgggcaccgtgtcccccgcattgaccccttcacaataccctggcacaacgggctggcacccgtaaatactacatcacaaacgctgaccacaaaggaggctatgtgacnaactatccgagcatgccccaagacgagtatattccacacatctggaactgtgccgatatgctagcaacacagactcccagaaccacacaccgctcatccgaccagtattctgccacacacacacaaaagctacgatcaggagaatcgacccacccctcacaaccacnn

SEQ ID NO: 20088 - DNA, 3299 bp, Homo sapiens
  misc_feature 3295: n = A,T,C or G
ctctgtcggcgttttcgcccgcgacgtggcgggtgttcgccacacagccagcggggtgatgtcccgcgcggcgcgatattcatgcttggggtcggggttccctcccatttctgcccccccgccgacgtgggggtgtgcgctcggcagtattcctcggtcgagtgttgttcgtgcgccgtccgtcggtgtgtggttggggctcgcgtgctcgctcgttgttgtaggtcgtccttcctgctgtgggtgcgccctgcgcttcccatactgacaccgtctggtgccgtctcggttctgtgcgtctccccgctgggttgtgtgtgttattgtgcgcccccccccctctgtgtgtttgtttttttttgttctttgttcttgtctttgtgttttccttttttttttttttttttgttgttttctttttgtttttgtttttttttgtttttttttttttttgtttttttttccttgcaaaaaccctcagctcacccgagggccaatggaaatttattaattttttttgtccttttccatctttccccaagtggcttttccttgcaaaatgcctgacatgacaccagaggggaacctgggagcgggggggcaccccaagggggcagcccagggacttaaatacaagctggagggcagggcacaggtgggacaggcaagagacagcacgagggacatggcttctcagggagaccaaagacttgctttcttgcaggaagcagctgtgccagagggcaggggactaggatcctgggtgcagagtgggtgagcagagaggcccccaatcctggatggaacccacattccccagagaagtagcggcaggggatgagggccttccctggtgggctccagagacggagtggggagtgagccagatgtgctaccttggggaaagggaggaggtgctagcagagtgagggttaaggctggtgcccagcctctggcacggtgggccttccgcctccgcctgacatggggacaaaggggcacggtgggcaggcagcgcatgggtctgtctctggcagggcagagggcggcaggagcagactccctccaggctcaagacacaggcccagcactgctacccgcccacccgccctagatatactcagatcccaccgcagctggacggctcgagctgggagtgtaggaagggagaggaggcagtggggagaggaaagggtgggctgctgggcccctgtggcctccatgcctgtcctgaggtccagcccagggccctggatcccaggtcctggatcccctggccacattcctcgccctgggcactgactgcagccagggcagtagaggccggggagaccctcagttcttgggcaggacagcaggaagaagaaggagagaacccagtgcagcatacatgggggtgggagggacaccgacagaagagccctcgttccaaagaaaggtgtgtaggggggcatcttggaaagtcacctagaggcaacagcacagcaggcctccgccctgcctggccacaggccctgagtgtcctcctttagggaccctgacagaaccggggctcagggcagcaggcagatgggccagaaggagatggggagcccaggacaccccaaagccacagactcaaatgccccaggagagggagagggaggtacctcctgccccctccagggacatcatctggagaaggtgccccctcctgtcccactccatgtgcccctcctagcaacagccaccgccagccggctttacaggggtgctgtcgatcttgagattgggccgctcgcccccagaggctgctccaggccccatccgctttttgatttcagcagccatggtcatgaacgcctgctcgacattggtggcattcttggcgctcgtctccaagaaggggatgcccagagagtctgcaaactccttggctgtggtgttgtccaccaccttcttggtggtgaggtcgctcttgttgcccaccaggagcttattgacgttctcgctggcatagcggtcaatctcctgcagccactgcttcacgttggcgtaggattcctggtcagtgacgtcatacaccacgatgatgccatgagccccccggtagtagctggaagtgatggtccggaaccgttcctggcccgctgtgtcccagatctgaagtttgatagttttgccatccagctcgatggttcggatcttgaagtccaccccgatggtgctgatgtagctctctgtgtacgtgtcatcagcaaaccgcaggagcaggcatgacttgcccacgcctgagtcgccaatcaaaagcagcttaaacaggtagtcacctgtgtgaagtactttaaatgcaccatctcatttaatcttcacaacagttcaatgaagtcagttttgtcattgtcaactaatgaggaaaccagaggccagagaaggtaagtgacttgccctaacttacacagtttatcgctttaagactcaaaccaggtttctcagactccaaagtcccttcgagagcctgctggttcccttctctgttcccctcccaatccagctcagagcttcacccttccccaaggaaatctgagacctggatgtggagtagaaaaaggaagtggcagaaaaggaagaagataactgatacttggggaaaactattagtcctgggcatgatatgtgggccacctacccgcagggggagtgaccaagagtgaggagagtttgaggaccagagaatcccacaggaagggggagagcaaattccatattcatctaaacttcacaggcagtgtgacagccaaggtaaggggtgtgacggtggcgttgggggcctgagcaaaagcgaggagagggcgggaaaggacggaccggcgggagcgacaggacagcgcgacccaggcaaagggtaggaggcagccccggaagagaggacctgcgggagacgcgacccaagcggcgcttcggggcctcccgcgtagttggctagcttctgggccggccccaggagccgggcttcaggagaaagagaagggtagagggattcactgcccgacctaaagggcccaagcctgaacccgagaccagaaactatcaagacgggctccaaaactccgggacagttgtcaagcagcaggtggggaaactgaggcctgaagtgaccgggactgcggggtcatctgaccgataaggcctggtaggaccgatgtctcgagctccaagagctgcccctgggggtcgccacgtctgggccccgggtgcgagggctcggggttttgagccggggtcctggggcccctggggggaggggcagaacccngatg

SEQ ID NO: 20089 - DNA, 3905 bp, Homo sapiens
ccacgcgtccggcgccgcgccgcttgccgccgggctagcactgacgtgtctctcggcggagctgctgtgcagtggaacgcgctgggccgcgggcagcgtcgcctcacgcggagcagagctgagctgaagcgggacccggagcccgagcagccgccgccatggcaatcaaatttctggaagtcatcaagcccttctgtgtcatcctgccggaaattcagaagccagagaggaagattcagtttaaggagaaagtgctgtggaccgctatcaccctctttatcttcttagtgtgctgccagattcccctgtttgggatcatgtcttcagattcagctgaccctttctattggatgagagtgattctagcctctaacagaggcacattgatggagctagggatctctcctattgtcacgtctggccttataatgcaactcttggctggcgccaagataattgaagttggtgacaccccaaaagaccgagctctcttcaacggagcccaaaagttatttggcatgatcattactatcggccagtctatcgtgtatgtgatgaccgggatgtatggggacccttctgaaatgggtgctggaatttgcctgctaatcaccattcagctctttgttgctggcttaattgtcctacttttggatgaactcctgcaaaaaggatatggccttggctctggtatttctctcttcattgcaactaacatctgtgaaaccatcgtatggaaggcattcagccccactactgtcaacactggccgaggaatggaatttgaaggtgctatcatcgcacttttccatctgctggccacacgcacagacaaggtccgagcccttcgggaggcgttctaccgccagaatcttcccaacctcatgaatctcatcgccaccatctttgtctttgcagtggtcatctatttccagggcttccgagtggacctgccaatcaagtcggcccgctaccgtggccagtacaacacctatcccatcaagctcttctatacgtccaacatccccatcatcctgcagtctgccctggtgtccaacctttatgtcatctcccaaatgctctcagctcgcttcagtggcaacttgctggtcagcctgctgggcacctggtcggacacgtcttctgggggcccagcacgtgcttatccagttggtggcctttgctattacctgtcccctccagaatcttttggctccgtgttagaagacccggtccatgcagttgtatacatagtgttcatgctgggctcctgtgcattcttctccaaaacgtggattgaggtctcaggttcctctgccaaagatgttgcaaagcagctgaaggagcagcagatggtgatgagaggccaccgagagacctccatggtccatgaactcaaccggtacatccccacagccgcggcctttggtgggctgtgcatcggggccctctcggtcctggctgacttcctaggcgccattgggtctggaaccgggatcctgctcgcagtcacaatcatctaccagtactttgagatcttcgttaaggagcaaagcgaggttggcagcatgggggccctgctcttctgagcccgtctcccggacaggttgaggaagctgctccagaagcgcctcggaaggggagctctcatcatggcgcgtgctgctgcggcatatggacttttaataatgtttttgaatttcgtattctttcattccactgtgtaaagtgctagacattttccaatttaaaattttgctttttatcctggcactggcaaaaagaactgtgaaagtgaaattttattcagccgactgccagagaagtgggaatggtataggattgtccccaagtgtccatgtaacttttgttttaacctttgcaccttctcagtgctgtatgcggctgcagccgtctcacctgtttccccacaaagggaatttctcactctggttggaagcacaaacactgaaatgtctacgtttcattttggcagtagggtgtgaagctgggagcagatcatgtatttcccggagacgtgggaccttgctggcatgtctccttcacaatcaggcgtgggaatatctggcttaggactgtttctctctaagacaccattgttttcccttattttaaaagtgatttttttaaggacagaacttcttccaaaagagagggatggctttcccagaagacactcctggccatctgtggatttgtctgtgcacctattggctcttctagctgactcttctggttgggcttagagtctgcctgtttctgctagctccgtgtttagtccacttgggtcatcagctctgccaagctgagcctggccaagctaggtggacagacccttgcagtgatgtccgtttgtccagattctgccagtcatcactggacacgtctcctcgcagctgccctagcaaggggagacattgtggtagctatcagacatggacagaaactgacttagtgctcacaagcccctacaccttctgggctgaagatcacccagctgtgttcagaattttcttactgtgcttaggactgcacgcaagtgagcagacaccaccgacttcctttctgcgtcaccagtgtcgtcagcagagagaggacagcacaggctcaaggttggtagtgaagtcaggttcggggtgcatgggctgtggtggtgttgatcagttgctccagtgtttgaaataagaagactcatgtttatgtctggaataagttctgtttgtgctgacaggtggcctaggtcctggagatgagcaccctctctctggcctttagggagtcccctcttaggacaggcactgcccagcagcaagggcagcagagttgggtgctaagatcctgaggagctcgaggtttcgagctggctttagacattggtgggaccaaggatgttttgcaggatgccctgatcctaagaagggggcctgggggtgcgtgcagcctgtcggggagaccccactctgacagtgggcacacggcagcctgcaaagcacagggccaccgccacagcccggcagaggggcacactctggagaccttgctggcagtgctagccaggaaacagagtgaccaagggacaagaagggacttgcctaaagccacccagcaactcagcagcagaaccaagatgggccccaggctcctccatatggcccagggcttaccaccctatcacacgtggccttgtctagacccagtcctgagcaggggagaggctcttgagacctgatgccctcctacccacatggttctcccactgccctgtctgctctgctgctacagaggggcagggcctcccccagcccacgcttaggaatgcttggcctctggcaggcaggcagctgtacccaagctggtgggcagggggctggaaggcaccaggcctcaggaggagccccatagtcccgcctgcagcctgtaaccatcggctgggccctgcaaggcccacactcacgccctgtgggtgatggtcacggtgggtgggtgggggctgaccccagcttccaggggactgtcactgtggacgccaaaatggcataactgagataaggtgaataagtgacaaataaagccagttttcaggtcaacacaaaaagggggcggcaaaaaccccaggggccaactagcgaccccctttgtgaacggggcccaaaaggcgcgctataaacagacgggcgcggttaacacgtgtgtggaaggagtgggtgattgtggagccaactggggggagtgtgggaccacacagaggcggggatgacaaagtgtgagacagacgcggagggtgaaacatcataagccatgtagaagtgatgagctagagagatcataggcgcaccgagcacacgatcgatctgagctgctgctgcagtgcatgtgtggtgtgg

SEQ ID NO: 20090 - DNA, 4053 bp, Homo sapiens
ccgcactcagcgccacgcgtcgaaagcgcaggccccgaggacccgccgcactgacagtatgagccgcacagcctacacggtgggagccctgcttctcctcttggggaccctgctgccggctgctgaagggaaaaagaaagggtcccaaggtgccatccccccgccagacaaggcccagcacaatgactcagagcagactcagtcgccccagcagcctggctccaggaaccgggggcggggccaagggcggggcactgccatgcccggggaggaggtgctggagtccagccaagaggccctgcatgtgacggagcgcaaatacctgaagcgagactggtgcaaaacccagccgcttaagcagaccatccacgaggaaggctgcaacagtcgcaccatcatcaaccgcttctgttacggccagtgcaactctttctacatccccaggcacatccggaaggaggaaggttcctttcagtcctgctccttctgcaagcccaagaaattcactaccatgatggtcacactcaactgccctgaactacagccacctaccaagaagaagagagtcacacgtgtgaagcagtgtcgttgcatatccatcgatttggattaagccaaatccaggtgcacccagcatgtcctaggaatgcagccccaggaagtcccagacctaaaacaaccagattcttacttggcttaaacctagaggccagaagaacccccagctgcctcctggcaggagcctgcttgtgcgtagttcgtgtgcatgagtgtggatgggtgcctgtgggtgtttttagacaccagagaaaacacagtctctgctagagagcacttcctattttgtaaacatatctgctttaatggggatgtaccagaaacccacctcaccccggctcacatctaaaggggcggggccgtggtctggttctgactttgtgtttttgtgccctcctggggaccagaatctcctttcggaatgaatgttcatggaagaggctcctctgagggcaagagacctgttttagtgctgcattcgacatggaaaagtccttttaacctgtgcttgcatcctcctttcctcctcctcctcacaatccatctcttcttaagttgacagtgactatgtcagtctaatctcttgtttgccagggttcctaaattaattcacttaaccatgatgcaaatgtttttcattttgtgaagaccctccagactctgggagaggctggtgtgggcaaggacaagcaggatagtggagtgagaaagggagggtggagggtgaggccaaatcaggtccagcaaaagtcagtagggacattgcagaagcttgaaaggccaataccagaacacaggctgatgcttctgagaaagtcttttcctagtatttaacagaacccaagtgaacagaggagaaatgagattgccagaaagtgattaactttggccgttgcaatctgctcaaacctaacaccaaactgaaaacataaatactgaccactcctatgttcggacccaagcaagttagctaaaccaaaccaactcctctgctttgtccctcaggtggaaaagagaggtagtttagaactctctgcataggggtgggaattaatcaaaaacctcagaggctgaaattcctaatacctttcctttatcgtggttatagtcagctcatttccattccactatttcccataatgcttctgagagccactaacttgattgataaagatcctgcctctgctgagtgtacctgacagtagtctaagatgagagagtttagggactactctgttttagcaagagatattttgggggtctttttgttttaactattgtcaggagattgggctaaagagaagacgacgagagtaaggaaataaagggaattgcctctggctagagagtagttaggtgttaatacctggtagagatgtaagggatatgacctccctttctttatgtgctcactgaggatctgaggggaccctgttaggagagcatagcatcatgatgtattagctgttcatctgctactggttggatggacataactattgtaactattcagtatttactggtaggcactgtcctctgattaaacttggcctactggcaatggctacttaggattgatctaagggccaaagtgcagggtgggtgaactttattgtactttggatttggttaacctgttttcttcaagcctgaggttttatatacaaactccctgaatactctttttgccttgtatcttctcagcctcctagccaagtcctatgtaatatggaaaacaaacactgcagacttgagattcagttgccgatcaaggctctggcattcagagaacccttgcaactcgagaagctgtttttatttcgtttttgttttgatccagtgctctcccatctaacaactaaacaggagccatttcaaggcgggagatattttaaacacccaaaatgttgggtctgattttcaaacttttaaactcactactgatgattctcacgctaggcgaatttgtccaaacacatagtgtgtgtgttttgtatacactgtatgaccccaccccaaatctttgtattgtccacattctccaacaataaagcacagagtggatttaattaagcacacaaatgctaaggcagaattttgagggtgggagagaagaaaagggaaagaagctgaaaatgtaaaaccacaccagggaggaaaaatgacattcagaaccagcaaacactgaatttctcttgttgttttaactctgccacaagaatgcaatttcgttaatggagatgacttaagttggcagcagtaatcttcttttaggagcttgtaccacagtcttgcacataagtgcagatttggctcaagtaaagagaatttcctcaacactaacttcactgggataatcagcagcgtaactaccctaaaagcatatcactagccaaagagggaaatatctgttcttcttactgtgcctatattaagactagtacaaatgtggtgtgtcttccaactttcattgaaaatgccatatctataccatattttattcgagtcactgatgatgtaatgatatattttttcattattatagtagaatatttttatggcaagatatttgtggtcttgatcatacctattaaaataatgccaaacaccaaatatgaattttatgatgtacactttgtgcttggcattaaaagaaaaaaacacacatcctggaagtctgtaagttgttttttgttactgtaggtcttcaaagttaagagtgtaagtgaaaaatctggaggagaggataatttccactgtgtggaatgtgaatagttaaatgaaaagttatggttatttaatgtaattattacttcaaatcctttggtcactgtgatttcaagcatgttttctttttctcctttatatgactttctctgagttgggcaaagaagaagctgacacaccgtatgttgttagagtcttttatctggtcaggggaaacaaaatcttgacccagctgaacatgtcttcctgagtcagtgcctgaatctttattttttaaattgaatgttccttaaaggttaacatttctaaagcaatattaagaaagactttaaatgttattttggaagacttacgatgcatgtatacaaacgaatagcagataatgatgactagttcacacataaagtccttttaaggagaaaatctaaaatgaaaagtggataaacagaacatttataagtgatcagttaatgcctaagagtgaaagtagttctattgacattcctcaagatatttaatatcaactgcattatgtattatgtctgcttaaatcatttaaaaacggcaaagaattatatagactatgaggtaccttgctgtgtaggaggatgaaaggggagttgatagtctcataaaactaatttggcttcaagtttcatgaatctgtaactagaatttaattttcaccccaataatgttctatatagcctttgctaaagagcaactaataaattaaacctattcttccaaaaaaaaaaaaaaaaaaaa

SEQ ID NO: 20091 - DNA, 1774 bp, Homo sapiens
  misc_feature 1, 2, 3, 4, 5, 6, 7, 8, 1760, 1761, 1762, 1763, 1764, 1765,1766, 1767, 1768, 1769, 1770, 1771, 1772, 1773, 1774: n = A,T,C or G
nnnnnnnncctgcgcttccgctcgcgagggggaggcgggacccgcgaggagtcgcgcggaggacggaggccacgatacctgcgtggctggggctgcgggctccggggtcaccaccctgggcgacccggaggtggcgcctccgccggccgcagctggagaggagcgtgtccccaagccgggggagcaggacttgagcaggcacgcggggtcaccgccgggcagcgtggaggagccatctcctggaggagaaaactcacctggtggcggaggctccccttgtttgtcctcccggagcctggcgtggggttcttctgcgggaagagagagtgcgcgcggagatagcagtgtggaaacgcgcgaggagtcggagggcacgggcggccagcgctcagcctgcgccatgggtggtcccgggaccaagagcggggagcctttgtgtcctccgttactgtgtaatcaggacaaagaaaccttgactctgctcattcaggtgcctcggatccagccgcaaagtcttcaaggagatttgaatcccctctggtacaaattacgcttctccgcacaagacttagtttattccttctttttgcaatttgctccagagaataaattgagtaccacagaacctgtgattagcatttcttcaaacaatgcagtgatagaactggcaaaatctccagagagccatggacattggagagagtggtattatggtgtaaacaacgattctttggaggaaaggttatttgtcaatgaagaaaatgttaatgagtttcttgaagaggtcctgagctctccattcaaacagtctatgtccttgaccccaccattaattgaagttcttcaagttactgataataagattcaaattaatgcaaagttgcaagaatgtagtaactctgatcagctacaaggaaaggaggaaagagtaaatgaagaaagtcatctaactgaaaaggaatatatagaacattgtaacacccctacaactgattctgattcatctatagcagttaaagcactacaaatagatagctttggtttagttacatgctttcaacaagagtctcttgatgtttctcaaatgatacttggaaaatctcagcaacctgagtcaaaaatgcaatctgaatttataaaagaaaaaagtgctacttgttcaaatgaggaaaaagataacttaaacgagtcagtaataactgaagagaaagaaacagatggagatcacctatcttcattactgaacaaaactacggttcacaatatacctggattcgacagcataaaagaaaccaatatgcaggatggtagtgtgcaggtcattaaagatcatgtgaccaattgtgcattcagttttcagaattctttgctatatgatttggattaattctatataattttggacttttaaatattaaggttaaaaaatacctgtatctaaaattgattctgttaactgttgtcttaaaactaaaggtattaaagtataaaattaaaatttgcaattttttttaaaaaattgcaattttgattctcatgggggaaattggagataatttttttttttttgcctctggagtttaaagtttccttatggagataagttttgtgattcctgtaatagatgtgtatgttttctatttgagagttaaaacatttgagagttaaaacatttagttttaatacaacctatgtatatatacttctgtgttaatttttgctttgtcattaataaaatttaaaaatattcacaaaaaaannnnnnnnnnnnnnn

SEQ ID NO: 20092 - DNA, 3676 bp, Homo sapiens
  misc_feature 3648, 3649, 3650, 3651, 3652, 3653, 3654, 3655, 3656, 3657,3658, 3659, 3660, 3661, 3662, 3663, 3664, 3665, 3666, 3667,3668, 3669, 3670, 3671, 3672, 3673, 3674, 3675, 3676: n = A,T,C or G
gcgtccgcttgccctttcaagccttatacagtagtacactgtacttgtttttagtagtaagacctactttcccactatatttagatagtttgttttcactgtgccagaatctcaggtgcctgcttagagtatttctttaatcacagtcactgggaagtaaggagatgtatatatgtgtatatatggtaacaaagcatagcagttctctaggggagaggcctggcattgcacatggtgttacatggctacaagtaaggaaaaaatcagaaagtgaaagaactgatgtaataaaaggttgatttggttggttcccatgaaagttagtaagatgcccttttaaatataaggatcagtgctttgttctgcagcagagtttgctgataaatgtctgttggattctttttggatttctttaattaatttgtaagtaaccaagataattattttcccccttgctctctatgttaatacgtagctataaagcaacagttggttttcttatcctttgataaaagcatcccataaaatataaagtagtaagttaacatagtattattgtcacacacaatgctttttttggttaaatgttgatacgaggcaatgttttggaattactttaattgatggagtagtggtggtagagagaaattaataacaaaaagagtgaaaatattttaattagcagtagatggtgctactggctttcatttgctgacttgattattccctttctcttaaaaaccatggcattagactgcactaaattaacaagcatgttagttgctggtagaggttttggaggttaatttaccttaaattggaagacttttaattgcagtctctttctaccttccctctgttagtcatttgtaaattctaaatggtcaccataaaatgtattaggtaggagaagatacgttttatgtataatatatctcagactgagttactgcctgtcttatcaggatggataaaacactacagtctcttatcaggaaatagagatgatgtggatatttatatattacatatataaccaccagactccattttatatattagcattttccttgcttatgggaaaatagcaaaacaacatttcatttatacttttgtttacccctctctgagacaggttttgataaccactgaaatggtagaatatgtgagatacaaatattgagttgtagaactttctttttaaggtgaataagtcatgccttaacatccaaataagagttcatcttcagagtggttcttttgggagcactgtttattccagctatactgcaaaagtataatgtttttggaactgttctagagcataccatgaaaagcagtttgttattatgcaggaaaatcagtttcatcattttagttacactaaacacttttggcagcttaatatgacctttttaaattttttttattttttttatttttatttctttaagatggagtcttgctctgttgcccgggctggagtacaatggcatgatctcagctcactgcaacctccacctcctgggttcaagcatttctcctgcctcagcctcccaagtagctgggattacaggcagcaccacacctggctaattttcatatttttagtagagatggggtttcaacatattggccaggctggtctcaaactcctgacctcaagtgatccgccctccccagcctcccaaagtgctgggattacaggtgtgagccaccacagccagccagtatgacctatcttaatcatcagctcaactgtaatttaaatttggctgttctctggagctaaaccattagggaagttcaaaggaatgtgccatgatttccgaatttgcacaagagaatgttttaagcattggtagcatcattgaataaaagaatagtttcctgatgtcactattttgaagtggaaattatcacttggatgtggaggttttactttttaaaaacattcagcttaattaccttaccttaattaccttagttagatatactaatggaaaaaaaccaagtcctttctctagaacttgttttctatttttgttccttttcatgaaaacttctcaatttaattttaactactgtaggatagtattgattgaatggatactatggaaaagtggatccaatatttaagatagaagtagtttaaggagacaacagcctttactgccatttttttttaaatgttttcactcagatgaacaatttgactttaataaaagactggagatttttgtacaaagaaataggaataagtttcatatactaattatgctgagttttaagcctacatatcacaaaatatttagaattgtataaccttttcatatatttataacttttaatgtctttttaaaagatgtgggaccaaaaatatatttataatttggaaatgtgactgcataccaataagaaaacttaccttattttgaaatttatctgggatattaaagaatctaccaattcttaaaaacacagatttatactttaagcttattttaaaattaaagaatatataccaattcttagaaacactttaaggactactcttaaataacttaaatatcagagttttgttgtaatattaaaatttaccatggaaatcactgttgttcagctatcaccttaattgtgtatgatatgataaatgtttagcagtaaagctatcttaagatttaatggaaaagtttaatttgaagatgtaacaaaaattctgaccacagttgattctgaatttttaaggctttcctaataggctgatcacagagaataatccattttgaaggtataaaactgcactgtatgtctgtcacttgtagctgaactgattcacattttgacaaaagagagaaaatacaaaaatgagttttgcaaatgtaataactttttctgcatatagaactaaataattgaaaaatatgggctatagttctcaaaggtagatagtaaaatcactggctttttccagctgtatgtttttccactgtgcgtgtacacacacactggaaaataattaggctgattttgcaggtcttcattgttagagattctgaagtatttactgtcaattcataggtttcagtttatttaggaaattagtgtttgacagctttttttaaattatttcactgaagctgagattattagtgatacaaagttaaaatttcaatatttaatttctctatatattattaatattaaattgttttttacttataaattcatgttctcatctgatttaatattaaatttgtataggtgggcgtttcttaccattttgcacaagtttttgtttttctgaaatacttaattgtgcaggttgtaaaaaagattagtgcattttcattttaaggatgctttgctccttaaattgttcgacagaaatgactttttagggaaagtagttttttggagctactaacttgtttttctgtccatgcatacagggtggtgaggccctatctgtaggacccctctgctgtttatggacttcctttggtaacttacaggatgattaccagaaaggttttaactcagttgagggaacagttttgaaacataagtatgaaatctgagagaagcgagatttatggcagaggaaaggggctacgggatgaaaagaaagaaaccgcgaattataannnnnnnnnnnnnnnnnnnnnnnnnnnnn

SEQ ID NO: 20093 - DNA, 4100 bp, Homo sapiens
  misc_feature 4100: n = A,T,C or G
gcgtccgaggaaaaggagtcgtatagggctatcaataggtgcctcccactaaattttcggaaagatgaattaaaaggcatttataaagatcgaatgaaaattggagcaagccttgccgatgttgatccaatgcaactagattcttcagtacgatttgatagtgttggtggcctgtctaatcatatagcagctctaaaagagatggtggtgtttccattactttatccagaagtctttgaaaaatttaaaattcaacccccaagaggttgtttgttttatgggccacctggaactggaaagactctggttgccagagcacttgccaatgagtgcagtcaaggggataaaagagtagcatttttcatgaggaaaggtgctgattgtctaagtaaatgggtaggagaatctgaaagacagctacgattgctgtttgatcaggcctatcagatgcgcccatcaattattttttttgacgaaattgatggtctggctccagtacggtcaagcaggcaagatcagattcacagttctattgtttccaccctgctagctcttatggatggattggacagcagaggggaaattgtggtcattggtgctacgaacaggctagattctatagatcctgctttacgaaggcctggtcgctttgatagagaattcctctttagcctgcctgataaagaggctcgaaaagagattctaaagattcacaccagggattggaatcccaaaccactggacacatttttagaagagctagcagaaaactgtgttggatactgtggagcagatattaaatcaatatgtgctgaagctgctttatgtgctttacgacgacgctacccacagatctataccactagtgagaaactgcagttggatctctcttcaattaatatctcagctaaggatttcgaggtagctatgcaaaagatgataccagcctcccaaagagctgtgacatcacctgggcaggcactgtccaccgttgtgaaaccactcctgcaaaacactgttgacaagattttagaagccctgcagagagtatttccacatgcagaattcagaacaaataaaacattagactcagatatttcttgtcctctgctagaaagtgacttggcttacagtgatgatgatgttccatcagtttatgaaaatggactttctcagaaatcttctcataaggcaaaagacaattttaattttcttcatttgaatagaaatgcttgttaccaacctatgtcttttcgaccaagaatattgatagtaggagaaccaggatttgggcaaggttctcacttggcaccagctgtcattcatgctttggaaaagtttactgtatatacattagacattcctgttctttttggagttagtactacatcccctgaagaaacatgtgcccaggtgattcgtgaagctaagagaacagcaccaagtatagtgtatgttcctcatatccacgtgtggtgggaaatagttggaccgacacttaaagccacatttaccacattattacagaatattccttcatttgctccagttttactacttgcaacttctgacaaaccccattccgctttgccagaagaggtgcaagaattgtttatccgtgattatggagagatttttaatgtccagttaccggataaagaagaacggacaaaattttttgaagatttaattctaaaacaagctgctaagcctcctatatcaaaaaagaaagcagttttgcaggctttggaggtactcccagtagcaccaccacctgagccaagatcactgacagcagaagaagtgaaacgactagaagaacaagaagaagatacatttagagaactgaggattttcttaagaaatgttacacataggcttgctattgacaagcgattccgagtgtttactaagcctgttgaccctgatgaggttcctgattatgtcactgtaataaagcaaccaatggacctttcatctgtaatcagtaaaattgatctacacaagtatctgactgtgaaagactatttgagagatattgatctaatctgtagtaatgccttagaatacaatccagatagagatcctggagatcgtcttattaggcatagagcctgtgctttaagagatactgcctatgccataattaaagaagaacttgatgaagactttgagcagctctgtgaagaaattcaggaatctagaaagaaaagaggttgtagctcctccaaatatgccccgtcttactaccatgtgatgccaaagcaaaattccactcttgttggtgataaaagatcagacccagagcagaatgaaaagctaaagacaccgagtactcctgtggcttgcagcactcctgctcagttgaagaggaaaattcgcaaaaagtcaaactggtacttaggcaccataaaaaagcgaaggaagatttcacaggcaaaggatgatagccagaatgccatagatcacaaaattgagagtgatacagaggaaactcaagacacaagtgtagatcataatgagaccggaaacacaggagagtcttcggtggaagaaaatgaaaaacagcaaaatgcctctgaaagcaaactggaattgagaaataattcaaatacttgtaatatagagaatgagcttgaagactctaggaagactacagcatgtacagaattgagagacaagattgcttgtaatggagatgcttctagctctcagataatacatatttctgatgaaaatgaaggaaaagaaatgtgtgttctgcgaatgactcgagctagacgttcccaggtagaacagcagcagctcatcactgttgaaaaggctttggcaattctttctcagcctacaccctcacttgttgtggatcatgagcgattaaaaaatcttttgaagactgttgttaaaaaaagtcaaaactacaacatatttcagttggaaaatttgtatgcagtaatcagccaatgtatttatcggcatcgcaaggaccatgataaaacatcacttattcagaaaatggagcaagaggtagaaaacttcagttgttccagatgatgatgtcatggtatcgagtattctttatattcagttcctatttaagtcatttttgtcatgtccgcctaattgatgtagtatgaaaccctgcatctttaaggaaaagattaaaatagtaaaataaaagtatttaaactttcctgatatttatgtacatattaagataaatgtcatgtgtaagataactgataaatattggaactttgctagaacaagaccctgtagtaatagtaataatagttgaagtttggccaactcttaataaagttattttggtaactaatgttttatggcacttaagaataattagcagcgttaaattttgtttgtattaagcacttttaattttatccttcctaaaaatagtttattgtatctgacaagaaacttacttaaccattgtgtccttcccatcttttttgtcatctttgttttcttcaaatgccctcctcccatctgccttgagattcccttgtcttcacttaaaagccagagtgcaagtcatgatttgcgggagggctcttgaaccacttctggctgcaccacaattctgtacttgagtatcacagtcattgtttttgagacaaacatttttataattctaatttgggttaataaagattttaaatatttcttggtttacttttgtaattatatacacaacaaatgtattaataactaccttgttaaacaccttttaatagcacaaggtttttatatttgcaagctgttgatatctttctaaaactgtttaggttatagtctattgatacttttatatacaattttataatataaatattataatttcttttaggtaccaaaaatacatttcttaagggttaaaagcatgcacttcagtgatacggcttgggggagggggagacattctacaaaagggggagaagtcgtgggagacttggggagaggagggggtagaagaagggggtttggacgaaggttgtggggagtatgtttggaccaaaaattaaaatattgtgggagggaaaatttaagggatacaaggtagtaagaacgagaaacgn

SEQ ID NO: 20094 - DNA, 1996 bp, Homo sapiens
  misc_feature 1, 2, 3, 4, 1994, 1995, 1996: n = A,T,C or G
nnnnagcgtccgcccacgcgtccgatttcctgtagcaccaggagtggctatctttgcaacacaattcaacatggaagtagaaattataacctcagggatggtgataagcacatttgtgtctgctcccatcatgtacgtttctgcctggttactgacctttcccactatggaccctaagccattggcatatgccatccagaatgttagttttgatataagtattgtcagcctgatctccttgatctggtctctggctattcttcttttgagtaagaaatataaacagcttcctcatatgcttacaactaatttactcattgctcagtctattgtctgtgctggaatgatgatatggaattttgttaaagaaaaaaattttgttggacaaattttggtgtttgttctattgtacagctccctctatagcacctacctgtggacaggccttctagcaatttctttgtttcttttgaaaaagcgagagagggtacaaattcctgttggaataatcataatatctggctggggaattcctgctctccttgttggtgttcttttgataactggaaaacacaatggagatagcattgactcagccttcttttatggaaaagaacagatgatcaccacagcagtcaccctgttctgcagcatcctgatagctggcatatccctcatgtgcatgaaccagactgcccaagcaggaagctatgaaggtttcgatcagtctcagagccacaaagtggtggagcctggaaatactgcttttgaggagagtccagcaccagtaaatgaaccagaactttttacaagctctattccagaaacaagttgctgctcctgctccatgggaaatggtgaattacactgcccatcaatagagccaatagcaaacacaagcaccagtgagcctgtgattccttcgtttgagaaaaacaatcattgtgtgagtcgctgtaactcccagagctgcatattagcccaggaagaagaacagtatctacagagtggagaccagcaactgacccgacatgtgttgctgtgtttacttctcatcattggcctgttcgctaatctttccagttgtttatggtggctattcaaccaagagcctggaagactttatgttgagttacagtttttctgtgccgtgtttaactttggtcagggatttatttcctttggaatctttggattagataaacatttaatcatcctgcctttcaaaagaagacttgaattcctatggaacaataaagacacagcagaaaacagggattctcctgtttcagaggaaataaaaatgacctgtcaacaatttatccattatcaccgtgacctctgtatccgaaacattgtcaaagaaagaaggtgtggtgcaaagacttctgctggaactttctgtggctgtgacctggtgagctggctaattgaagtcggccttgcctccgaccgtggtgaagctgtgatatacggagacaggctggtacaagggggagtcatccaacatattaccaacgagtatgaattccgggatgagtacttgttttacagatttcttcaaaagagtcctgaacagagtcctcctgctattaatgcaaacactctccaacaggaaagatataaagaaattgagcattcatccccaccctcacattcccctaagacctaaattatgcaggggagaaccctacatggaatcatattctagccgcgtattcattagtttttagctgggtgaccttgggcaagttaacagaggcaacctctctgagcctcagttgtctcttctgtaaaatgtgaaaagatgtgctcccaccacatgcgcagggtctgtgattttacatgtatgtaaaacacataggaagctgacttaggaaaaagagaaaaccaaattaaagttccgataatgaatataatatagtcatcctttagtatccaaggggattggttccaggactcctgaagatcccaaaatctgaggatactcaagnnn

SEQ ID NO: 20095 - DNA, 3032 bp, Homo sapiens
  misc_feature 1, 2, 3, 4, 5, 6, 7, 8, 9, 10, 11, 12, 13, 14, 15, 16, 17,3005, 3006, 3007, 3008, 3009, 3010, 3011, 3012, 3013, 3014,3015, 3016, 3017, 3018, 3019, 3020, 3021, 3022, 3023, 3024,3025, 3026, 3027, 3028, 3029, 3030, 3031, 3032: n = A,T,C or G
nnnnnnnnnnnnnnnnnctcaaaaatgtaatgaatcacaacattttagaactggaaacgtgcttgctggtcacctcagccatctccctcattttatggtagaggaaactcaggtacagagtggtagagtgatttttacagggaagaaccagaccaggcctggagccactacaaagtccaggccaagaagcacaggaagcccctgtagcaagctccaatgggctttcactaataaagatggaagtgcgtgtccagaacgaccaacgtattacatctgagagcagaggctttatttacaatgacattcaaacaggatttagcaaaggatgcctcttcctgctcgcatcttagcagcatgggttgtacttcataaacagaaaagagaaatatcctgggagcaggaagtgaactcttttctcagataatgttctctaaatcccaacacgttccatgctcccggctcttagcaggtagttggtggacacttggttatagcagctgggtgccagatgcctgcatctcactgaggaatgtgttcagggaagatgtcaacactggccgggaaaaacatcaggctttcacctcactcatggcctccataaggcgagcgctgtttgtgactgctgtcgtcaggaaaatgaacctgtagcctttctctctgcccaggaaccggagggctgagatctcagagaatgtacaaccacccaagaacaccaccaagatgaggcgcagggactcactggaagccttgtcttccttagtcatatctgtgaatgcaaagtcactgcagttgagcagccgtaccacctcatcaaggccctgccagcttcgccgctctagcacctgctcaatgattcggcagctcaggggcacataagcaccaccgaagacgtaagccatgtctcggggcactttcagatcatactcgccgtccacacgtgggatcaaattcagctttttgctgatggcacgaaaattgctcctcttggccagagaactgaaggcatcagtaatctttcctgcagccttgtcggtcaccagcttgctcactttactctccacggctgtgagggtgtccccgggggcctgctccgttaggagcccagctcttcgcagattggagaaggttagcaggtgctcagggccatagctctgcagatactgtgttttcagagatcggtaatccttggggatcaaaccattctcagtgatggacaaaaggcacatgaggcgcaggctttctataggcgacacctgccggtctatgtgttcctcaatgtagctggtgctctcccggatgttgaacccctctagcagtgcatgctcagtcttgattagctcctggaaatcctgcttggttttcttcttcatgatggattcacaggccccaatatggagactcagcaggcggtgctcctgtttcaggcccttgagctcttgggacacgaaattcttcatctgcttaatgtccatgcctctccggcgatcatactgggcctgcaagttccgggccttctggctcaagaagccaaagacattggagaagtgctcgttccgaatctcattaaacaccttgtcctcggcattgagtagcaccttcaggctcttgtcagaggatgtgacttctgggccaaagtcgacactcccacacttgatgcggaaggtgtcatctactaggccctcataaaccacttgggagcaaagtgctgtcacaaagtccacatctctgtccaagagaaagatatgtccaatctctggccttcggccccttggtttcgccatcctcctcctcctccaggttcctccacaattcatatgccatcttggcgcacctgccaattccatagcagtttggaaagggtccatagagagtgctgagaaggtgtaaggcctgagctacagtgttgatccaacgctgatctccttccagaaagtaatccctgaaaaattctggtagttccatgctcagcagatccacatcaagaggcagcaaagagaaggcccattcatcacagctcacatctccatagattccctcttcctcaagcaccatctcacacgcatagaacttttgagggctgaagatcactttgtatttgcgagttcggccagccaatttgtcagcattgacaagactggcaatgtatcgcatattcttgatgcggggtctgaccaagaagcacaattgttcattggagctgagggctggcttgttctccaccttgtatagcttgtctacttcgtgttgcttcaggatggagacattggcaattcgatccaaagggctcatgagatctgcctcaatgaataaatccttttttccaggaagctgctccagcagatagatgagctggtctcgagccagcctcttcagcatggagaagtcaggcagctcaggggcgtccggccgatggggaaaagccatggcagcggtcacctgcgccgcggggtggaaggacgcccttcgttctgagaaggccggccgcagcccagggaagcgcaaggggggctatccttcaggcctgggcaccgacttccagagaccccagatgggccctcgctcctcagcagcactccaggaatgaatggccacctccaggcaagagagctactacctcggagcagccttgtctcagacctgcagccaccgtgtctcgaccctccctccctgatccactctgcccgtcagcaggattccggtctacaccccgcagagactccgcagcgtacgaggagaaccccgccttctaccagaaaaagaagcgacttcctagatctcccggaagtccctttcgctcccagcgcttcgcgtaccaggaaggggacggcgtcctgaaagggacatttgaaaaacggaggcaacgcgtctattaattaggtggcggcgcctggggtcgcagcactccagaggctgaggtgggagaatcgctcgagtcagggaggcggaggttgcagtgaactgcgatcgcgctactgcaccccagcctgggcaacaaagctagaccnnnnnnnnnnnnnnnnnnnnnnnnnnnn

SEQ ID NO: 20096 - DNA, 1272 bp, Homo sapiens
  misc_feature 1: n = A,T,C or G
nagtcacccagcgtccggtgcatcttaggactggtgtgaaggcaggcacaacgggattgacgggctggtgcctcaccagtatatagtggtgcaggatatggatgatacgttttcagacactctgagccaaaaagccgacagtgaggccagcagtgggccagtcacggaagacaagtcctcatccaaggacatgaactccccgacagaccgtcatcctgacggctatttagccaggcaacgaaaaagaggagagccaccccctccagtaaggcgtcctggcaggaccagtgatggccattgcccgctccaccctccacatgccctttctaactcctcagttgacctagggtccccaagccttgccagtcacccccggggcctgctgcagaaccgtggcctcaacaatgacagtcctgagcggaggcgcaggcctggccatggcagcctgaccaacatcagccggcacgactccctcaagaagatcgacagccctcccattagaaggtccacgtcatcagggcaatacacgggcttcaatgaccacaagccactggacccagagacaattgctcaggatattgaagaaacgatgaacacagctttgaatgaactccgagaactggagagacagagcacagcaaagcatgcccctgatgtggtgctggataccctggagcaagtgaaaaactctcccacccctgccacttccacggaatctctcagccctttgcacaacgttgccctcaggagctccgagcctcagattcgacgtagcacgagctcctccagtgacacaatgagtactttcaagcctatggtggcacccagaatgggcgtgcagctgaagcctccagcccttaggccaaaacctgctgttcttccaaaaacaaatcctaccataggacctgccccacctccccagggtccaacagacaagtcatgcacaatgtaaaaaccagccaagcaaggccataaagggaggtgacttaaaaaagaaaatggattagtgacaaaagtcactgatccataactttccttagttttgtgcttataactggagatcttttggcttttctatgttgtcgaatgtaatgtctgagactagctaaattaacacgggcatttgtattttgtaatttttttaaataactggacatatgtcattttaaggacaatagaaacacttagacttacttgaaaatccaatgctgcaccacttgtaatgaaggcaacaccgctctccacattgtactcggccgccaccgcggtgga

SEQ ID NO: 20097 - DNA, 989 bp, Homo sapiens
  misc_feature 989: n = A,T,C or G
tatagggagtcgacccacgcgtccggcccggcagcggcggcgggtgtgaaggccgatgctgtgggggtgggcgtggagagaattcttctgtgggtcctctggtgttgagtggtcggcttggtgtggtgtgcggaggagctccaggcccgtcggcgcggagtggtctcacgtgtgaaacatggctacagattggctgggaagtattgtgtccatcaattgtggagatagcttgggtgtctatcagggaagagtgtcagctgtggatcaggtcagccagaccatttctctcacccggcctttccataatggagtgaagtgtcttgttccagaagtcaccttcagggcaggtgacattacggagttaaaaattctggagataccaggacctggagacaaccaacattttggagaccttcatcaaacagaattaggcccctctggtgctggctgccaagtgggcatcaatcagaatggcacaggcaagtttgtcaagaagccagcctcttccagcagtgcccctcagaatatccctaagaggacagatgtgaagagccaggatgttgccgtttccccgcagcagcaacagtgctcaaagagctatgtcgacaggcacatggaatccttgagtcagtccaaaagtttccgtcgtcggcacaactcctgggtcatctagtagcaggcaacgcaaattcagggaaattcccaagaaaagggggtcaaagaaaagggccgactccggcattcacgcatgacgcagagctcctcggggatcaaaaactgcagcggaggaaatcccccaacaccacgaacatacggagcgaccgaacggggaaccccgcgggcccacactggaaccacaggcacgacagcgcttgacgcgaaacagggacaccccacttgaccgggcacaaagcatagcacgccgaccacagcaagcaccgaccccaaccaatacatggcaacaccacacagccgcgcacattgagaan

SEQ ID NO: 20098 - DNA, 1039 bp, Homo sapiens
  misc_feature 1, 1039: n = A,T,C or G
ncactatagtgagcctcatttgaagatgaggaaacaaaggtacaaagaggttctagctggacctctaaagtcacataataagtaagtggtagagctggagttcacatccaggcagtaggctccaaggtctgtgctcttaaccacattctgggctgcatcttttatagacaaactatgatccagagagattacgagacttggatcacataccaagagagtgttaaagccacattaggattcaattccagggccatcagattccaagtccactggagaaaagatgtatatctctaatctgttaacaaattgctcaactactcagactaatcccaggtgatggatgtctaatgctcaggaaaggcgagtcagtctctgaggcaacagatcccatgggcctgggtagaaaatgcccagtgcttcccagtcccaagtgctggctttccctgtatctgcctctgccaggcaacacttatcaggctcccaatcagcaggagcctccatgctccactttgaacagcctctatgctccagcaatggggcatttgtgaagagtgacttgattaacttttctgaccatgggtataatacagttgcttcagagggcagtggttctgggtgtgatttttacactgtaacattgtatacagtgtcatggataattactatttttttctggtcattaacactcacctactctagtactaggatttcagaccaaggtcctcatgacgcctggatattttagtatctatatccaataatcttttctctcctactgaatatccaggcaaagatgaaatcgttttctttaaaactgtcaaattctgtaaaactcaggagccagttcaagggaacaagcatcttcacaatagatggaatcaagagttaaatgttatagtggcaagcttgtctactgggcaacagacaaccagacctgcttgtggagatgggcagctcccccagccctgctctgtggacctcatttctgtcaaatgaaaggcagcagcttccagctgattgcagcatagtgttcatcaan

SEQ ID NO: 20099 - DNA, 5165 bp, Homo sapiens
tccgggggcccgcccgggagggctgtacttctaaaacctctgcgggctgcttagtcacagccccccttgcttgggtgtgtccttcgctcgctccctccctccgtcttaggtcactgttttcaacctcgaataaaaactgcagccaacttccgaggcagcctcattgcccagcggaccccagcctctgccaggttcggtccgccatcctcgtcccgtcctccgccggcccctgccccgcgcccagggatcctccagctcctttcgcccgcgccctccgttcgctccggacaccatggacaagttttggtggcacgcagcctggggactctgcctcgtgccgctgagcctggcgcagatcgatttgaatataacctgccgctttgcaggtgtattccacgtggagaaaaatggtcgctacagcatctctcggacggaggccgctgacctctgcaaggctttcaatagcaccttgcccacaatggcccagatggagaaagctctgagcatcggatttgagacctgcaggtatgggttcatagaagggcatgtggtgattccccggatccaccccaactccatctgtgcagcaaacaacacaggggtgtacatcctcacatccaacacctcccagtatgacacatattgcttcaatgcttcagctccacctgaagaagattgtacatcagtcacagacctgcccaatgcctttgatggaccaattaccataactattgttaaccgtgatggcacccgctatgtccagaaaggagaatacagaacgaatcctgaagacatctaccccagcaaccctactgatgatgacgtgagcagcggctcctccagtgaaaggagcagcacttcaggaggttacatcttttacaccttttctactgtacaccccatcccagacgaagacagtccctggatcaccgacagcacagacagaatccctgctaccagagaccaagacacattccaccccagtggggggtcccataccactcatggatctgaatcagatggacactcacatgggagtcaagaaggtggagcaaacacaacctctggtcctataaggacaccccaaattccagaatggctgatcatcttggcatccctcttggccttggctttgattcttgcagtttgcattgcagtcaacagtcgaagaaggtgtgggcagaagaaaaagctagtgatcaacagtggcaatggagctgtggaggacagaaagccaagtggactcaacggagaggccagcaagtctcaggaaatggtgcatttggtgaacaaggagtcgtcagaaactccagaccagtttatgacagctgatgagacaaggaacctgcagaatgtggacatgaagattggggtgtaacacctacaccattatcttggaaagaaacaaccgttggaaacataaccattacagggagctgggacacttaacagatgcaatgtgctactgattgtttcattgcgaatcttttttagcataaaattttctactctttttgttttttgtgttttgttctttaaagtcaggtccaatttgtaaaaacagcattgctttctgaaattagggcccaattaataatcagcaagaatttgatcgttccagttcccacttggaggcctttcatccctcgggtgtgctatggatggcttctaacaaaaactacacatatgtattcctgatcgccaacctttcccccaccagctaaggacatttcccagggttaatagggcctggtccctgggaggaaatttgaatgggtccattttgcccttccatagcctaatccctgggcattgctttccactgaggttgggggttggggtgtactagttacacatcttcaacagaccccctctagaaatttttcagatgcttctgggagacacccaaagggtgaagctatttatctgtagtaaactatttatctgtgtttttgaaatattaaaccctggatcagtcctttgatcagtataattttttaaagttactttgtcagaggcacaaaagggtttaaactgattcataataaatatctgtacttcttcgatcttcaccttttgtgctgtgattcttcagtttctaaaccagcactgtctgggtccctacaatgtatcaggaagagctgagaatggtaaggagactcttctaagtcttcatctcagagaccctgagttcccactcagacccactcagccaaatctcatggaagaccaaggagggcagcactgtttttgttttttgttttttgtttttttttttttgacactgtccaaaggttttccatcctgtcctggaatcagagttggaagctgaggagcttcagcctcttttatggtttaatggccacctgttctctcctgtgaaaggctttgcaaagtcacattaagtttgcatgacctgttatccctggggccctatttcatagaggctggccctattagtgatttccaaaaacaatatggaagtgccttttgatgtcttacaataagagaagaagccaatggaaatgaaagagattggcaaaggggaaggatgatgccatgtagatcctgtttgacatttttatggctgtatttgtaaacttaaacacaccagtgtctgttcttgatgcagttgctatttaggatgagttaagtgcctggggagtccctcaaaaggttaaagggattcccatcattggaatcttatcaccagataggcaagtttatgaccaaacaagagagtactggctttatcctctaacctcatattttctcccacttggcaagtcctttgtggcatttattcatcagtcagggtgtccgattggtcctagaacttccaaaggctgcttgtcatagaagccattgcatctataaagcaacggctcctgttaaatggtatctcctttctgaggctcctactaaaagtcatttgttacctaaacttatgtgcttaacaggcaatgcttctcagaccacaaagcagaaagaagaagaaaagctcctgactaaatcagggctgggcttagacagagttgatctgtagaatatctttaaaggagagatgtcaactttctgcactattcccagcctctgctcctccctgtctaccctctcccctccctctctccctccacttcaccccacaatcttgaaaaacttcctttctcttctgtgaacatcattggccagatccattttcagtggtctggatttctttttattttcttttcaacttgaaagaaactggacattaggccactatgtgttgttactgccactagtgttcaagtgcctcttgttttcccagagatttcctgggtctgccagaggcccagacaggctcactcaagctctttaactgaaaagcaacaagccactccaggacaaggttcaaaatggttacaacagcctctacctgtcgccccagggagaaaggggtagtgatacaagtctcatagccagagatggttttccactccttctagatattcccaaaaagaggctgagacaggaggttattttcaattttattttggaattaaatacttttttccctttattactgttgtagtccctcacttggatatacctctgttttcacgatagaaataagggaggtctagagcttctattccttggccattgtcaacggagagctggccaagtcttcacaaacccttgcaacattgcctgaagtttatggaataagatgtattctcactcccttgatctcaagggcgtaactctggaagcacagcttgactacatgtcatttttaccaatgattttcaggtgacctgggctaagtcatttaaactgggtctttataaaagtaaaaggccaacatttaattattttgcaaagcaacctaagagctaaagatgtaatttttcttgcaattgtaaatcttttgtgtctcctgaagacttcccttaaaattagctctgagtgaaaaatcaaaagagacaaaagacatcttcgaatccatatttcaagcctggtagaattggcttttctagcagaacctttccaaaagttttatattgagattcataacaacaccaagaattgattttgtagccaacattcattcaatactgttatatcagaggagtaggagagaggaaacatttgacttatctggaaaagcaaaatgtacttaagaataagaataacatggtccattcacctttatgttatagatatgtctttgtgtaaatcatttgttttgagttttcaaagaatagcccattgttcattcttgtgctgtacaatgaccactgttattgttactttgacttttcagagcacacccttcctctggtttttgtatatttattgatggatcaataataatgaggaaagcatgatatgtatattgctgagttgaaagcacttattggaaaatattaaaaggctaacattaaaagactaaaggaaacagaaaaaaaaaaaaaaaaaaaaaaaaaaaaaaaaaaaaaaaaaaaaaaaaaaaaaaaaaaaaaaaaaaaaaaaaaaaaaaaaaaaaaaaaaaaaaaaaaaaaaaaaaaaaaaaagaaaaaaagaacaaaaagagaacaacaaaaaagaaaaagaaaaagagcagaacaaaagaaaaagagaaacaagagcgaaaacagaaaaacaacagaagagaccgagaagcaaacaagcagacgcgagaaacaaaacgaagaaaagagcagcgacccacacgacaaaaagagcgaggactgcgcaacaagggacagacacaatagaaaaagaggaagcaagacaaacggagagagaaagaaagaagaagaaagatggagaaacacgaaacacagagagatcgaaggagcagagaacgaagaaagaaagaaagaaagaagacaaactagaggcacagcaaatgaggacagagaaagaaagagaaaagagcgcagagaccagacgaggcacggcgaacacggacaggacaacaagaccggaaggaagcagatgaggcgcggggggacgagggagcgaccggagagggaggagaacgcacgaagcgagacgaaaccagaggcgacggcggaagagggacacgagacacggcacggaagaggggacgagggaggagagaagaaggggatagcaaggacgacgcagaaaacaagaaagactaaccggacaac

SEQ ID NO: 20100 - DNA, 2697 bp, Homo sapiens
tatagggagtcgacccacgcgtccgccggtccacgtcgtcgctgccgcctcctcctcctcctcctcctccccgtctgtccgtccgtccgtccgtccgcccgcccgcccgcccgcccgcgcttccgtcctgtccagccgccagtcctccagcccgtgtccccgctccgcccgctttgtctctccccggctcgctgtctctttgtctctgccctcgcgctcctccgcagcccctccctcgctccccatctcgggtccccttctcagagcgctcttcagccctcagagccgccctttctgggcgaccccactcttcgggactccccctcagagcgcccccagatcttttggggttccccttgagaacaccttccactctccccaagggctccccgtgagtttcttgcacatcctttgggggttctgcaccccaagtcgctggggtctcgcctcctctgaacccccattgcccctgggctttccctcttctgggtgttccccatatccactgggagctcctaggtcccaagttggggtctttctccttgggaccccccaatatgtcctcagctccctgacttcaggagctcctctctgctttcccctggtttgtcccctgtcgctgtctctccttgttctctctcaggtctccgagcacccccacttctcgggatcggggtcccctgctttgctctccctgcccctctgtgcccccacatctgtctcggtggtctcgccactctgtgcctcttgcgctgaaggcccccctttgagcctgcttctttgcctggggcccttggcccccccttgctttttcagccctagccccctgtctccccttctctctgctccttgtctccctctccctttttctgtctttgccgggtctctgggtctctgacccccatccggccctcatggctttgtgtctggagctcttgaagcaatgttcatcatgcctagtggcgtataagaagaccccgccaccggtccctccacgcaccacttcaaagccgttcatctcagtcacagtccagagcagtactgagtctgcccaggacacctacctggacagccaggaccacaagagcgaggtgactagccagtcgggcctgagcaactcgtcggacagcctggacagcagtacccgaccgcccagcgtgacacggggtggagtcgccccagcccctgaggccccagagccacccccaaaacatgcagctctgaaaagtgaacaagggacgctgaccagctctgagtcccaccccgaggccgcccccaaaaggaaactgtcatcgataggaatacaagttgactgcattcagccagtgccaaaagaggagcccagtcccgctaccaaattccagtccatcggggttcaggtagaggacgactggcggtaagtcggacagaggtggcggctgcttctcccctctcctctccctccctccgctctcacctctcctgctctccctcacccacttctccttgctggatttctaataaccaagagtgggaacggaggcacgtacactgaaatttaagtcatccaagttgggacttaagatagcaggttaatattgtctcaggcgagacttagaacgtcttttctggtatcccagtctgcagtgggcaaatctattgtctttatttctcatttaagggcagaatggagggatgacatatttttacttttcaagaggcggttgccacttttaagtcactgttgtgtgtgtgtgtgtacatacacaaacatacgatagtgtgttttcagagcaagtatcaaaggctaaagacttggagtgatactagtgtttaaaagcctttttaaaaaaattaagatgtgatgagaaactggagaattgacttttaaaaatttcttttctgtagaagaggctatcttcaaaatggagtcctaaagtatatctgatggatagaatttaaattcttaacactgtatataccctgtggtcaaaagcatcaacgtaaaacttgatgtttatcagattacttatgtttcaattttcctgtggttagaaaaattaagacagaagtaagctattaacggtatttgcttgtaagagtaacgttaaaggtttaaggaaaggtttgttgaaatcgatatgcatcacacgaatcatttattttcaatgttgttttccagttgcagcaatcatttgtgtttacatgactttgaaaaagggtttagtttatgttgattttgaccctcttatttaatctctagtgcagaagtgcagctttctgcaggctgcgcctcaatcgctaagttccactctccatcctctgccgcgctactcctggcatgtggatcaccaagatacaatttctggtcctgtctgttcttattgatgtcctttacagttaataaatttgattgccactaatcagtctgtatctcttgcaaaaacaccacatttagcatccaagtagagtcagagtatgttttttatgagattgtactaaagtaaccttctattacatttcttattaccatattgcatttcctatagtgggcagcatagagcaggtggatcctgacaaagtaatgttagagatgttgctgacaggctttacaatagatattctccaactaatttgaccaagatataacataaaatgtagttcgtagttttcaagcattaatggaaagtgttcctattaaaaaattaccaataacag

SEQ ID NO: 20101 - DNA, 4658 bp, Homo sapiens
  misc_feature 4650, 4651, 4652, 4653, 4654, 4655, 4656, 4657, 4658: n = A,T,C or G
gcagagaggagggggaagaacccaaacccgcccagtctaacccagtccagacaaccggcttccagctggggctggggaaagggggttggaggggtgcgccccccccccacgccccttaggggtgggggacgcgggctcagagttccagggacccaggaatgcccccccgccagccccctcggcaggcggggggagggctcagccgggagtttgtgcaaactcctccccccgtggaggctttcgcctctgggaggtttaggaagcggctccgggtcggtggccccaggacagggaagagcgggcgctatggggagccggacgccagagtcccctctccacgccgtgcagctgcgctggggcccccggcgccgacccccgctgctgccgctgctgttgctgctgctgccgccgccacccagggtcgggggcttcaacttagacgcggaggccccagcagtactctcggggcccccgggctccttcttcggattctcagtggagttttaccggccgggaacagacggggtcagtgtgctggtgggagcacccaaggctaataccagccagccaggagtgctgcagggtggtgctgtctacctctgtccttggggtgccagccccacacagtgcacccccattgaatttgacagcaaaggctctcggctcctggagtcctcactgtccagctcagagggagaggagcctgtggagtacaagtccttgcagtggttcggggcaacagttcgagcccatggctcctccatcttggcatgcgctccactgtacagctggcgcacagagaaggagccactgagcgaccccgtgggcacctgctacctctccacagataacttcacccgaattctggagtatgcaccctgccgctcagatttcagctgggcagcaggacagggttactgccaaggaggcttcagtgccgagttcaccaagactggccgtgtggttttaggtggaccaggaagctatttctggcaaggccagatcctgtctgccactcaggagcagattgcagaatcttattaccccgagtacctgatcaacctggttcaggggcagctgcagactcgccaggccagttccatctatgatgacagctacctaggatactctgtggctgttggtgaattcagtggtgatgacacagaagactttgttgctggtgtgcccaaagggaacctcacttacggctatgtcaccatccttaatggctcagacattcgatccctctacaacttctcaggggaacagatggcctcctactttggctatgcagtggccgccacagacgtcaatggggacgggctggatgacttgctggtgggggcacccctgctcatggatcggacccctgacgggcggcctcaggaggtgggcagggtctacgtctacctgcagcacccagccggcatagagcccacgcccacccttaccctcactggccatgatgagtttggccgatttggcagctccttgacccccctgggggacctggaccaggatggctacaatgatgtggccatcggggctccctttggtggggagacccagcagggagtagtgtttgtatttcctgggggcccaggagggctgggctctaagccttcccaggttctgcagcccctgtgggcagccagccacaccccagacttctttggctctgcccttcgaggaggccgagacctggatggcaatggatatcctgatctgattgtggggtcctttggtgtggacaaggctgtggtatacaggggccgccccatcgtgtccgctagtgcctccctcaccatcttccccgccatgttcaacccagaggagcggagctgcagcttagaggggaaccctgtggcctgcatcaaccttagcttctgcctcaatgcttctggaaaacacgttgctgactccattggtttcacagtggaacttcagctggactggcagaagcagaagggaggggtacggcgggcactgttcctggcctccaggcaggcaaccctgacccagaccctgctcatccagaatggggctcgagaggattgcagagagatgaagatctacctcaggaacgagtcagaatttcgagacaaactctcgccgattcacatcgctctcaacttctccttggacccccaagccccagtggacagccacggcctcaggccagccctacattatcagagcaagagccggatagaggacaaggctcagatcttgctggactgtggagaagacaacatctgtgtgcctgacctgcagctggaagtgtttggggagcagaaccatgtgtacctgggtgacaagaatgccctgaacctcactttccatgcccagaatgtgggtgagggtggcgcctatgaggctgagcttcgggtcaccgcccctccagaggctgagtactcaggactcgtcagacacccagggaacttctccagcctgagctgtgactactttgccgtgaaccagagccgcctgctggtgtgtgacctgggcaaccccatgaaggcaggagccagtctgtggggtggccttcggtttacagtccctcatctccgggacactaagaaaaccatccagtttgacttccagatcctcagcaagaatctcaacaactcgcaaagcgacgtggtttcctttcggctctccgtggaggctcaggcccaggtcaccctgaacggtgtctccaagcctgaggcagtgctattcccagtaagcgactggcatccccgagaccagcctcagaaggaggaggacctgggacctgctgtccaccatgtctatgagctcatcaaccaaggccccagctccattagccagggtgtgctggaactcagctgtccccaggctctggaaggtcagcagctcctatatgtgaccagagttacgggactcaactgcaccaccaatcaccccattaacccaaagggcctggagttggatcccgagggttccctgcaccaccagcaaaaacgggaagctccaagccgcagctctgcttcctcgggacctcagatcctgaaatgcccggaggctgagtgtttcaggctgcgctgtgagctcgggcccctgcaccaacaagagagccaaagtctgcagttgcatttccgagtctgggccaagactttcttgcagcgggagcaccagccatttagcctgcagtgtgaggctgtgtacaaagccctgaagatgccctaccgaatcctgcctcggcagctgccccaaaaagagcgtcaggtggccacagctgtgcaatggaccaaggcagaaggcagctatggcgtcccactgtggatcatcatcctagccatcctgtttggcctcctgctcctaggtctactcatctacatcctctacaagcttggattcttcaaacgctccctcccatatggcaccgccatggaaaaagctcagctcaagcctccagccacctctgatgcctgagtcctcccaatttcagactcccattcctgaagaaccagtccccccaccctcattctactgaaaaggaggggtctgggtacttcttgaaggtgctgacggccagggagaagctcctctccccagcccagagacatacttgaagggccagagccaggggggtgaggagctggggatccctcccccccatgcactgtgaaggacccttgtttacacataccctcttcatggatgggggaactcagatccagggacagaggccccagcctccctgaagcctttgcattttggagagtttcctgaaacaacttggaaagataactaggaaatccattcacagttctttgggccagacatgccacaaggacttcctgtccagctccaacctgcaaagatctgtcctcagccttgccagagatccaaaagaagcccccagctaagaacctggaacttggggagttaagacctggcagctctggacagccccaccctggtgggccaacaaagaacactaactatgcatggtgccccaggaccagctcaggacagatgccacacaaggatagatgctggcccagggcccagagcccagctccaaggggaatcagaactcaaatggggccagatccagcctggggtctggagttgatctggaacccagactcagacattggcacctaatccaggcagatccaggactatatttgggcctgctccagacctgatcctggaggcccagttcaccctgatttaggagaagccaggaatttcccaggaccctgaaggggccatgatggcaacagatctggaacctcagcctggccagacacaggccctccctgttccccagagaaaggggagcccactgtcctgggcctgcagaatttgggttctgcctgccagctgcactgatgctgcccctcatctctctgcccaacccttccctcaccttggcaccagacacccaggacttatttaaactctgttgcaagtgcaataaatctgacccagtgcccccactgaccagaactaaaaaaaaaaaaagcaacactactaacaccaccaaaatctttgtgggacggcattgccctcgaaaaaggttttaaaaacccatgtttgggggcggggcccaatggggtaagtagacagggcatagggtgcccaagaacacggggccggaaaggtgtggttctccannnnnnnnn

SEQ ID NO: 20102 - DNA, 6135 bp, Homo sapiens
  misc_feature 1, 6115, 6116, 6117, 6118, 6119, 6120, 6121, 6122, 6123,6124, 6125, 6126, 6127, 6128, 6129, 6130, 6131, 6132, 6133,6134, 6135: n = A,T,C or G
nggttatgggtataagcagactttggcttatcgtggcgcgggcgaggtactttgaacgatagcaacccttctttgtgtaactctgaagctgaaaatattgagccttcagttatgaagatttcttcaaatagctttatgaatgtgcatttggaatcaaaaccagttatatgtgatagtagaaatttgacagatcactcaaaatttgcatgtgaagaatataagcagagcatcggtagcactagttcagcttctgttaatcattttgatgatttatatcaacctattgggagttcaggtattgcttcatctcttcagagtcttccaccaggaataaaggtggacagtctaactctcttgaaatgcggagagaacacatctccagttctggatgcagtgctaaagagtaaaaaaagttcagagtttttaaagcatgcagggaaagaaacaatagtagaagtaggtagtgaccttcctgattcaggaaagggatttgcttccagggagaacaggcgtaataatgggttatctgggaaatgtttgcaagaggctcaagaagaagggaattccatattgcctgaaagaagaggaagaccagaaatctctttagatgaaagaggagaaggaggacatgtgcatacttctgatgactcagaagttgtattttcttcttgtgattagaatttaaccatggaagacagtgatggtgtaacttatgcattaaagtgtgacagtagtggtcatgccccagaaattgtgtctacagttcatgaagattattctggctcttctgaaagttcaaatgatgaaagtgattcagaagatacagattcggatgatagcagtattccaagaaaccgtctccagtctgttgtggttgtgccaaagaattctactttgcccatggaagaaacaagtccttgttcttctcggagcagtcaaagttatagacactattctgaccattgggaagatgagagattggagtcaaggagacatttgtatgaggaaaaatttgaaagtatagcaagtaaagcctgtcctcaaactgataagtttttccttcataaaggaacagagaagaatccggaaatttcttttacacagtccagtagaaaacaaatagataaccgcctgcctgaactttctcatcctcagagtgatggggttgatagtacaagtcatacagatgtgaaatctgaccctctgggtcacccaaattcagaggaaaccgtgaaagccaaaataccttctaggcagcaagaagagctgccaatttattcttctgattttgaagatgtcccaaataagtcttggcaacagaccactttccaaaacaggccagatagtagactgggaaaaacagaattgagtttttcttcctcttgtgagataccacatgtggatggcttgcactcatcagaagagctcagaaacttaggttgggacttctctcaagaaaagccttctaccacgtatcagcaacctgacagtagctatggagcttgtggtggacacaagtatcagcaaaatgcagaacagtatggtgggacacgtgattactggcaaggcaatggttactgggatccaagatcaggtagacctcctggaactggggttgtgtatgatcgaactcaaggacaagtaccagattccctaacagatgatcgtgaagaagaggagaattgggatcaacaggatggatcccatttttcagaccagtccgataaatttcttctatcccttcagaaagacaaggggtcagtgcaagcacctgaaataagcagcaattccattaaggacactttagctgtgaatgaaaagaaagatttttcaaaaaacttagaaaaaaatgatatcaaagatagagggcctcttaaaaaaaggaggcaggaaatagagagtgattctgaaagtgatggtgagcttcaggacagaaagaaagttagagtggaggtagagcagggagagacatcagtgcccccaggttcagcactggttgggccctcctgtgtcatggatgacttcagggacccacagcgatggaaggaatgtgccaagcaagggaaaatgccatgttactttgatcttattgaagaaaatgtttatttaacagaaagaaagaagaataaatctcatcgagatattaagcgaatgcagtgtgagtgtacacctctttctaaagatgaaagagctcaaggtgaaatagcatgtggggaagattgtcttaatcgtcttctcatgattgaatgttcttctcggtgtccaaatggggattattgttccaatagacggtttcagagaaaacagcatgcagatgtggaagtcatactcacagaaaagaaaggctggggcttgagagctgccaaagaccttccttcgaacacctttgtcctagaatattgtggagaggtactcgtccgagagtttaaagctcgagtgaaggagtatgcacgaaacaaaaacatccattactatttcatggccctgaagaatgatgagataatagatgccactcaaaaaggaaattgctctcgtttcatgaatcacagctgtgaaccaaattgtgaaacccaaaaatggactgtgaacggacaactgagggttgggttttttaccaccaaactggttccttcaggctcagagttaacgtttgactatcagttccagagatatggaaaagaagcccagaaatgtttctgcggatcagccaattgccggggttacctgggaggagaaaacagagtcagcatcagagcagcaggagggaaaatgaagaaggaacgatctcgtaagaaggattcagtggatggagagctagaagctctgatggaaaatggtgagggtctctctgataaaaaccaggtgctcagcttatcccggctaatggttagaattgaaactttggagcagaaacttacctgtctggaactcatacagaacacacactcacagtcctgcctgaagtcctttctggaacgtcatgggctgtctttgttgtggatctggatggcagagctaggtgacggccgggaaagtaaccagaagcttcaggaagagattataaagactttggaacacttgcccattcctactaaaaatatgttggaggaaagcaaagtacttccaattattcaacgctggtctcagactaagactgctgtccctccgttgagtgaaggagatgggtattctagtgagaatacatcgcgtgctcatacaccactcaacacacctgatccttccaccaagctgagcacagaagctgacacagacactcccaagaaactaatgtttcgcagactgaaaattataagtgaaaatagcatggacagtgcaatctctgatgcaaccagtgagctagaaggcaaggatggcaaagaggatcttgatcaattagaaaatgtccctgtagaggaagaggaagaattgcagtcacaacagctactcccacaacagctgcctgaatgcaaagttgatagtgaaaccaacatagaagctagtaagctacctacatctgaaccagaagctgacgctgaaatagagcccaaagagagcaacggcacaaaactagaagaacctattaatgaagaaacaccatcccaagatgaagaggagggtgtgtctgatgtggagagtgaaaggagccaagaacagccagataaaacagtggatataagtgatttggccaccaaactcctggacagttggaaagacctaaaggaggtatatcgaattccaaagaaaagtcaaactgaaaaggaaaacacaagaaatcagcctgaataaatggaatgacttgtctgcctcacatattctaaggtgcagagtcagaatatgaactgttgcaactgaacgaggaagggatgctgttggcttcagagatcaaacacctgccccgaagactcctaataggtcaagagagagagacccagacaagcaaactcaaaataaagagaaaaggaaacgaagaagctccctctcaccaccctcttctgcctatgagcggggaacaaaaaggccagatgacagatatgatacaccaacttctaaaaagaaagtacgaattaaagaccgcaataaactttctacagaggaacgccggaagttgtttgagcaagaggtggctcaacgggaggctcagaaacaacagcaacagatgcagaacctgggaatgacatcaccactgccctatgactctcttggttataatgccccgcatcatccctttgctggttacccaccaggttatcccatgcaggcctatgtggatcccagcaaccctaatgctggaaaggtgctcctgcccacacccagcatggacccagtgtgttctcctgctccttatgatcatgctcagcccttggtgggacattctacagaacccctttctgcccctccaccagtaccagtggtgccacatgtggcagctcctgtggaagtttccagttcccagtatgtggcccagagtgatggtgtagtacaccaagactccagcgttgctgtcttgccagtgccggcccccggcccagttcagggacagaattatagtgtttgggattcaaaccaacagtctgtcagtgtacagcagcagtactctcctgcacagtctcaagcaaccatatattatcaaggacagacatgtccaacagtctatggtgtgacatcaccttattcacagacaactccaccaattgtacagagttatgcccagccaagtcttcagtatatccaggggcaacagattttcacagctcatccacaaggagtggtggtacagccagccgcagcagtgactacaatagttgcaccagggcagcctcagcccttgcagccatctgaaatggttgtgacaaataatctcttggatctgccgcccccctctcctcccaaaccaaaaaccattgtcttacctcccaactggaagacagctcgagatccagaagggaagatttattactaccatgtgatcacaaggcagactcagtgggatcctcctacttgggaaagcccaggagatgatgccagccttgagcatgaagctgagatggacctgggaactccaacatatgatgaaaaccccatgaaggcctcgaaaaagcccaagacagcagaagcagacacctccagtgaactagcaaagaaaagcaaagaagtattcagaaaagagatgtcccagttcatcgtccagtgcctgaacccttaccggaaacctgactgcaaagtgggaagaattaccacaactgaagactttaaacatctggctcgcaagctgactcacggtgttatgaataaggagctgaagtactgtaagaatcctgaggacctggagtgcaatgagaatgtgaaacacaaaaccaaggagtacattaagaagtacatgcagaagtttggggctgtttacaaacccaaagaggacactgaattagagtgactgttgggccagggtgggaggatgggtggtcaggtaagacagactctagggagaggaaatcctgtgggcctttctgtcccacccctgtcagcactgtgctactgatgatacatcaccctggggaattcaaccctgcagatgtcaactgaaggccacaaaaatgaactccatctacaagtgattacctagttgtgagctgttggcatgtggttagaagccatcagaggtgcaagggcttagaaaagaccctggccagacctgactccactcttaaacctgggtcttctccttggcggtgctgtcagcgcacagacccatgcgcatccccacccacaaccctttaccctgatgatctgtattatattttaatgtatatgtgaatatattgaaaataatttgttttttcctggtttttgtttggttttcgttttgcttttagcctctacatgctaggatcacaggaagactttgtaaggacagtttaagttctcctgcaaggtttaatttgttatcatgtaaatattccaaagcaggctgccttgtggttttggccagccttgtgctatgttgataagattgatttactgcttaaaatcactttactttatccaatttttactgaactttttatgtaaaaaaataaaatcaattaaagaacttggcatgtgtgttccctaaaaggannnnnnnnnnnnnnnnnnnnn

SEQ ID NO: 20103 - DNA, 1945 bp, Homo sapiens
  misc_feature 1, 2, 3, 4, 5, 1945: n = A,T,C or G
nnnnnatatgaatgatacttactagcatacgctcgtgtttaacaacgccatagggcggcgcaggctacgcgccgttttggttgttgtgtacgaatactggtgggcccgtgtacgtgctgtagacctatgcgctgagtctgcccagttgcccccgaatgaagagtgtgcgggagagatgaattataccttcccggtgaccaaacgtgtcatgtacccagggcgtgaaccttaacattaaaaacggtaattctgggatccaggagaaactttagtcctttattgaaatagccatgttttaagttatgtgaagtgaaatttctattaatcttctctcttactcttaatttatgccagattatttttctttaggctaaatccataatccacaacaaggttttagctgttcttttctaaaggacgggtaccatatccttttaatctgcttgataaggtacccatgcctatccaaataatgaaatggttcagttattattaaagcatgcccagtatttgggcaaaaccagaatctaataaattacactgtcacctaatacccatggcttgatgggaagccatgaggaacaagggtaaagtgataaaactggcaagtggatcaaggaataaaagccaagagaattctgagaccagagggcaagaaatatctagtcgggattcaaggacagaactgaagttcaaatagaaaaagaatgttgcctcaaggattaggagctgagctggctatcagagctcctagtacatggtgatcaaataaggggcagttagagataaagactggattaagcaagagaaatcaggaccaagaaagattctaggtattcacaataattaaatgaaaacaagacagaccatgcagctttaaatttcctagcatagtagttccaggattctcagtacagaaataatctctggaaattaaggcgagaagataatgccactcttaagctcctgtgctatgtagaatgtttcccagagaaataatatctgagaaatcaggcagttatctggccaggggctacatcaggttcttcagttccctcaaaacaacttaatcacatacagtttgtcttaaaaggaagcctccaagcagctaaaacaaactttcaacagacattcagtttaacagatcctatactgtggctttaggaactaggccactgactacctaaaaaccccagcttgcccacttgaagttaacctctagaaacattagtgatctgtgaagttttcaccattaaaacaatgctttatcatccaaatcatacttgttcttctctttgctttccagttatgaatttgttacctttttgcatttgattatttccagtggtttggttctttttttttttttttttttttacatactcttgagcaatgctaatctgcgccccttactcccttaagtccttcttggtaaataatgttaatcttccaataggaagaagtggagtacattaccatttaagcaccatttatccagcctacttacaaataaagctatggagccaccttatacatgtgaaattccttaaaaccctggctttctattaaaatgtacttttatatatactatctatgaagaattcactaaagcatgaatcaccttataatgagaagctaaaaatgtatcaaaacgaacataagtataggtaatccacatcaaacatactacatcttccaagtctagagcatacactggtataaactgtattacaacccagattagtttgaaatcttgtttcaaaacattgctcagtattaagtctcagtagacaaataataggaccacatgagaaactgttcggcaggtggctgaggaaaccttaacttccaaaggctcaaagtggtcctccagagactgttacacttccttaggtatttatttcagggaaggacactattaagggccacttttgagtataaagan

SEQ ID NO: 20104 - DNA, 3710 bp, Homo sapiens
  misc_feature 2919: n = A,T,C or G
tatagggagtcgacccacgcgtccgggcggaccgcgcggctggaggtgtgaggatccgaacccaggggtggggggtggaggcggctcctgcgatcgaaggggacttgagactcaccggccgcacgccatgagggccctgtgggtgctgggcctctgctgcgtcctgctgaccttcgggtcggtcagagctgacgatgaagttgatgtggatggtacagtagaagaggatctgggtaaaagtagagaaggatcaaggacggatgatgaagtagtacagagagaggaagaagctattcagttggatggattaaatgcatcacaaataagagaacttagagagaagtcggaaaagtttgccttccaagccgaagttaacagaatgatgaaacttatcatcaattcattgtataaaaataaagagattttcctgagagaactgatttcaaatgcttctgatgctttagataagataaggctaatatcactgactgatgaaaatgctctttctggaaatgaggaactaacagtcaaaattaagtgtgataaggagaagaacctgctgcatgtcacagacaccggtgtaggaatgaccagagaagagttggttaaaaaccttggtaccatagccaaatctgggacaagcgagtttttaaacaaaatgactgaagcacaggaagatggccagtcaacttctgaattgattggccagtttggtgtcggtttctattccgccttccttgtagcagataaggttattgtcacttcaaaacacaacaacgatacccagcacatctgggagtctgactccaatgaattttctgtaattgctgacccaagaggaaacactctaggacggggaacgacaattacccttgtcttaaaagaagaagcatctgattaccttgaattggatacaattaaaaatctcgtcaaaaaatattcacagttcataaactttcctatttatgtatggagcagcaagactgaaactgttgaggagcccatggaggaagaagaagcagccaaagaagagaaagaagaatctgatgatgaagctgcagtagaggaagaagaagaagaaaagaaaccaaagactaaaaaagttgaaaaaactgtctgggactgggaacttatgaatgatatcaaaccaatatggcagagaccatcaaaagaagtagaagaagatgaatacaaagctttctacaaatcattttcaaaggaaagtgatgaccccatggcttatattcactttactgctgaaggggaagttaccttcaaatcaattttatttgtacccacatctgctccacgtggtctgtttgacgaatatggatctaaaaagagcgattacattaagctctatgtgcgccgtgtattcatcacagacgacttccatgatatgatgcctaaatacctcaattttgtcaagggtgtggtggactcagatgatctccccttgaatgtttcccgcgagactcttcagcaacataaactgcttaaggtgattaggaagaagcttgttcgtaaaacgctggacatgatcaagaagattgctgatgataaatacaatgatactttttggaaagaatttggtaccaacatcaagcttggtgtgattgaagaccactcgaatcgaacacgtcttgctaaacttcttaggttccagtcttctcatcatccaactgacattactagcctagaccagtatgtggaaagaatgaaggaaaaacaagacaaaatctacttcatggctgggtccagcagaaaagaggctgaatcttctccatttgttgagcgacttctgaaaaagggctatgaagttatttacctcacagaacctgtggatgaatactgtattcaggcccttcccgaatttgatgggaagaggttccagaatgttgccaaggaaggagtgaagttcgatgaaagtgagaaaactaaggagagtcgtgaagcagttgagaaagaatttgagcctctgctgaattggatgaaagataaagcccttaaggacaagattgaaaaggctgtggtgtctcagcgcctgacagaatctccgtgtgctttggtggccagccagtacggatggtctggcaacatggagagaatcatgaaagcacaagcgtaccaaacgggcaaggacatctctacaaattactatgcgagtcagaagaaaacatttgaaattaatcccagacacccgctgatcagagacatgcttcgacgaattaaggaagatgaagatgataaaacagttttggatcttgctgtggttttgtttgaaacagcaacgcttcggtcagggtatcttttaccagacactaaagcatatggagatagaatagaaagaatgcttcgcctcagtttgaacattgaccctgatgcaaaggtggaagaagagcccgaagaagaacctgaagagacagcagaagacacaacagaagacacagagcaagacgaagatgaagaaatggatgtgggaacagatgaagaagaagaaacagcaaaggaatctacagctgaaaaagatgaattgtaaattatactctcaccatttggatcctgtgtggagagggaatgtgaaatttacatcatttctttttgggagagacttgttttggatgccccctaatccccttctcccctgcactgtaaaatgtgggattatgggtcacaggaaaaagtgggttttttagttgaattttttttaacattcctcatgaatgtaaatttgtactatttaactgactattcttgatgtaaaatcttgtcatgtgtataaaaataaaaaagatcccaaatactcagtgtcttgactgtcttgcagagaactacctaatacttggctgaattttttttttttaatcatgtgtcttgggttctttttcttagaaaagtgactcaggcttatgacctttnttttttttttttttttttgagaccaagtctcacttttgcccaggctggagtgtggtggcacaatctctgctcactgcaacctccgccttccgggttcaagcaattctctgcctcagcctcctgagtagctgggattacaggtgcccgccaccacacccggctaattttttgtatttttagtagagacagggtttcaccatcttggccaggctggtctttgaactcctgacctcaggtgatccacctgtctcggcctcccaaagtgcggggattacaagcatgagccaccgcgccggcctgccttcattcttttagtgttgaatatttaaatacgtgccaaggtaatacatataagtttttaatcaatatagatttaccttgctgctccatacataaataggaaagtttatgaactgtgaatattttttgacgagatttttaattgtatccaattcaaggtaatcagatgcttcttcttttaagacaagggtaattgtcgttccccgtcctagagtgtttcctcttgggtcagcaattacagaaaattcattggagtcagactcccagatgtgctgagtatcgttgttgtgttttgaagtgacaataaccttatctgctacaaggaaggcggaatagaaaccgacaccaaactggccaatcaattcagaagttgactggccatcttcctgtgcttcagtcattttgtttaaaaactcgcttgtcccagatttggctatggtaccaaggttttaaccaactcttctctggcggacgcgtgggtcgactcccta

SEQ ID NO: 20105 - DNA, 2430 bp, Homo sapiens
  misc_feature 1, 2, 3, 2429, 2430: n = A,T,C or G
nnngatcgctttctgcaaccattcagactgatctcgggctcctatttcatttacattgtgtgcacaccaagtaaccagtgggaaaactttagagggtacttaaaccccagaaaattctgaaaccgggctcttgagccgctatcctcgggcctgctcccaccctgtggagtgcactttcgttttcaataaatctctgcttttgttgcttcattctttccttgctttgtttgtgtgtttgtccagttctttgttcaacacgccaagaacctggacactcttcactggtaacatattttggcaagccaaccaggagaaaagaatttctgcttggacactgcatagctgctgggaaaatgaacatcagtgttgatttggaaacgaattatgccgagttggttctagatgtgggaagagtcactcttggagagaacagtaggaaaaaaatgaaggattgtaaactgagaaaaaagcagaatgaaagtgtctcacgagctatgtgtgctctgctcaattctggagggggagtgatcaaggctgaaattgagaatgaagactatagttatacaaaagatggaataggactagatttggaaaattcttttagtaacattctgttatttgttcctgagtacttagacttcatgcagaatggtaactactttctgatttttgtgaagtcatggagcttgaacacctctggtctgcggattaccaccttgagctccaatttgtacaaaagagatataacatctgcaaaagtcatgaatgccactgctgcactggagttcctcaaagacatgaaaaagactagagggagattgtatttaagaccagaattgctggcaaagaggccctgtgttgatatacaagaagaaaataacatgaaggccttggccggggttttttttgatagaacagaacttgatcggaaagaaaaattgacctttactgaatccacacatgttgaaattaaaaacttctcgacagaaaagttgttacaacgaattaaagagattctccctcaatatgtttctgcatttgcaaatactgatggaggatatttgttcattggtttaaatgaagataaagaaataattggctttaaagcagagatgagtgacctcgatgacttagaaagagaaatcgaaaagtccattaggaagatgcctgtgcatcacttctgtatggagaagaagaagataaattattcatgcaaattccttggagtatatgataaaggaagtctttgtggatatgtctgtgcactcagagtggagcgcttctgctgtgcagtgtttgctaaagagcctgattcctggcatgtgaaagataaccgtgtgatgcagttgaccaggaaggaatggatccagttcatggtggaggctgaaccaaaattttccagttcatatgaagaggtgatctctcaaataaatgcgtcattacctgctccccacagttggcctcttttggaatggcaacggcagagacatcactgtccagggctatcaggaaggataacgtatactccagaaaacctttgcagaaaactgttcttacaacatgaaggacttaagcaattaatatgtgaagaaatggactctgtcagaaagggctcactgatcttctctaggagctggtctgtggatctgggcttgcaagagaaccacaaagtcctctgtgatgctcttctgatttcccaggacagtcctccagtcctatacaccttccacatggtacaggatgaggagtttaaaggctattctacacaaactgccctaaccttaaagcagaagctggcaaaaattggtggttacactaaaaaagtgtgtgtcatgacaaagatcttctacttgagccctgaaggcatgacaagctgccagtatgatttaaggtcgcaagtaatttaccctgaatcctactattttacaagaaggaaatacttgctgaaagccctttttaaagccttaaagagactcaagtctctgagagaccagttttcctttgcagaaaatctataccagataatcggtatagattgctttcagaagaatgataaaaagatgtttaaatcttgtcgaaggctcacctgatggaaaatggactgggctactgagatatttttcattatatatttgataacattctctaattctgtgaaaatatttctttgaaaactttgcaagttaagcaacttaatgtgatgttggataattgggttttgtctattttcacttctccctaaataatcttcacagatattgtttgagggatattaggaaaattaatttgttaactcgtctgtgcacagtattatttactctgtctgtagttcctgaataaattttcttccatgcttgaactgggaaaattgcaacacttttattcttaatgacaacagtgaaaatctcccagcatatacctagaaaacnn

SEQ ID NO: 20106 - DNA, 2235 bp, Homo sapiens
  misc_feature 2213, 2214, 2215, 2216, 2217, 2218, 2219, 2220, 2221, 2222,2223, 2224, 2225, 2226, 2227, 2228, 2229, 2230, 2231, 2232,2233, 2234, 2235: n = A,T,C or G
tcgacccacgcgtccggtccctattgtctacaccagtttacttgggccatagtcaatgctggtacccagactgtctgccctggctcctctagcggctgtctgcacggatacctgacactctgttgactcccttgagcacagtctacactgcccctaaactgcctacacccatttccccagaccccccagaggtatccatctctggctatgataacaactggtaccttggccagaatgaggccaccctgacctgcgatgctcgcagcaacccagagcccacaggctataattggagcacgaccatgggtcccctgccaccctttgctgtggcccagggcgcccagctcctgatccgtcctgtggacaaaccaatcaacacaactttaatctgcaacgtcaccaatgccctaggagctcgccaggcagaactgaccgtccaggtcaaagagggacctcccagtgagcactcaggcatgtcccgtaacgccatcatcttcctggttctgggaatcctggtttttctgatcctgctggggatcgggatttatttctattggtccaaatgttcccgtgaggtcctttggcactgtcatctgtgtccctcgagtgagcatcaccagagctgccgtgattgagcacctactacgggctctgtgctgagtccttccagtgtgcctctcactgaatcctcaccccactgccatgaggtttcccccatttgactgatgagggtgcagagccagggagccttgttcactggttcattgagtacatttacaaatattatttacagagtgggagaagagcgtatagggtcttaatgccatggtagggactttggaatttaattcaggtgatgtgggagtccctgccagatggatggagggtgaaataatgcttaagccctcagccttactccatctgccttgttcaggagtgactcctaggaggaggtggcaggaactggcacctctgatcctcagctctaaaagggtctgatgctttcacacctcaagagatttgcacaggccgttcccctgcctgggagcaccctcccatggctccttctggagaagtgtgccagctcattctgtaatcagaggaacgatgctttgctgagcactgtctacatgccactttgtatgtataaccccctcgattttaatttttaattttttttattatttatgtatttatttatttatttttgagacaggctctcactgtcgcccaggctggagtgcagtggtgcgatctcggctcactgtagccctcacctcccaggttcaagcgattctcatgcctcagcctcccaaggagcggggattacaggcacgcactactatgcccagcaatttttgtatttttaggagagacagcgtttcgccatgttagccaggctggtctcaaacccctggtctcctgtgatccacccgcctcagcctcccaaagtgctgggattacaggcatgagccaccacacctggcctgtacaatctccttgaatgcccacaaccacccagcaaagtggttctcccgtgagccccatgttacagaggaggaagtatttgctttgagagatgaagttacctgccaatggtcaaacagctggacatggttgttggggagaagaagccagatctttgactaccaagcttttccttcaaccactaaacaaagctgctcccttacaacccaggcggatactgcctcgtccaggaagccctccctgacccccaagcatgagccaagcatccactaggctctcccactccagccttgcccattctgggtcatcaccgtgggggacttgtttgtcatccccagtggactgtgagccccaagatagcagacctgaggctgtcactgtcatgactgtgtccccaggaccgcctaccactgggccgggcataaaagaggcactcgaggaagtgtttgctgagtgattcaatgtgtcagctccagagccagactgcctgtatctgggccctaaagctactgcttgattagtgatgtcaccataggcaaatagcttaagctgtatgactcagtttcctcatctgtaaaatggggtgatggtacctaataatacagtagagcacttaacacagtaggtggcacatggtaagccacatactgagtatgtatttgctatgattgttattgctattattactattattgttattattaacataaactgcacaagagcannnnnnnnnnnnnnnnnnnnnnn

SEQ ID NO: 20107 - DNA, 1009 bp, Homo sapiens
  misc_feature 1, 2, 3, 4, 1009: n = A,T,C or G
nnnnagtcacccacgcgtccgcggctctgttcgccgcctctcccaccggcccgatgagctgcagcggctccggcgcggaccccgaggcggcgccggcctccgccgcctcggccccgggccccgcgcccccggtctcggctcccgccgcgctgccctccagcaccgccgcggagaacaaggccagccccgcggggacagcggggggacctggggctggagcagctgctgggggcacgggacccttggcggcgcgggccggggagccagctgagcggcgtggggcggctccggtgtcggcgggtggcgcggcgcccccggagggggccatatctaacggggtttacgtactgccgagcgcggccaacggagacgtgaagcccgtggtgtccagcacgcctttggtggacttcttgatgcagctggaagattacacgcctacgatcccagatgcagtgactggttactacctgaaccgtgctggctttgaggcctcagacccacgcataattcggctcatctccttagctgcccagaaattcatctcagatattgccaatgatgccctacagcactgcaaaatgaagggcacggcctccggcagctcccggagcaagagcaaggaccgcaagtacactctaaccatggaggacttgacccctgccctcagcgagtatggcatcaatgtgaagaagccgcactcagttgacagaaaaaagagacagaaaaagaaaagaaagcggcaaacagaacgagcacacgcacaagaagaacagaacacgaggaggaagaagtgagcgacccagagaacgccaagccgcaacgaggccaaagaagagcgaggcggagcagacggagagaagcggagcaaagaagagcgaggggcaacgagaggcaggagagcggcggggcaaagaaggaaagaggagaggaagacgaagcggagacgggcgcaaggcgggagaaaacgaggggcagagaggggagcgagcgacggacaagaggagagcgn

SEQ ID NO: 20108 - DNA, 3121 bp, Homo sapiens
  misc_feature 909, 910, 911, 930, 931, 932, 3104, 3105, 3106, 3107, 3108,3109, 3110, 3111, 3112, 3113, 3114, 3115, 3116, 3117, 3118,3119, 3120, 3121: n = A,T,C or G
gcgtcccacggattgctcatccgatccgtgccgccgcagggagtgtgtcaagttacagaggcgccggaatcggcccctgcgctcctcgccagccgccacgacccacctctgcccatggggccctccatgtgcgccccttcgcccggggactgaaactgactggcccgggagacacgaggcgcccagaaggactgacagcgcggcaccaactgctctgcagacacttgaagggaaagactgggcggagagaaggagagccggtcagattcccctaactttcctggacttggaacgttcttcgaaataacttttttctcacctaggtgtaccccaattaccgctggttgtgctttttcggcacttcctctcctactgctaatttttccgtcctctttgccgggagcagcggaaagggacgttttccagcgatacaagccctttccccctgccccgcagtttggatagagccttttggcagcggctgtcgcctttatttattctatttatttatttattggttctcaagacgcgagaggatggtagcggagcgcacccacaaagcggcagccaccggtgcccgcggccctggggagttgggcgcgcccgggacggtggctctggtggcggcgcgggcggagcgcggcgcacggctgccgagtccagggtcgtgcgggctgctgacgctggccctctgctcgctggcactcagcctgctcgcccactttcggacggccgagctgcaggcccgggtgctgcgcctggaagcggagcgcggggagcagcaaatggagacagctattttgggacgagtcaatcaactgctggacgagaaatggaagctccactcaaggaggcgccgggaggccccaaagacatctccaggatgtaactgcccaccaggacctcctnnnggactcccaggggacaaannnggacgtgtggggtcccccggagacgctgggctgtccatcattggtccccgcggcccccctggtcaaccaggcactagaggtttccctggatttccgggtcccattgggctggacggcaaaccgggccacccaggaccaaagggcgacatgggtctgacgggtcccccaggacagccgggaccccagggacaaaaaggagaaaagggtcagtgtggagagtacccacaccgggagtgcctaagcagcatgccagcagctctgcgctccagccagataattgccctgaagctgctgcctctcctcaattcagtgcgactggctccacccccggtcataaaaaggcggacattccagggcgaacagagccaggccagcatccaaggtccaccagggcccccaggcccccctggaccaagtggacctctggggcacccaggactgccagggcctatggggccacctggcttacctgggcctcctggaccaaagggagacccagggatccagggctaccacggccggaagggagaacggggcatgccagggatgccaggcaagcatggagccaagggggcgcccggaattgccgtggctgggatgaagggtgagccagggatcccaggaaccaagggtgagaagggggctgaaggctcccctgggcttcctggcctcctggggcagaagggagagaaaggcgatgctggcaactccattggaggaggcagaggggaacctggccctccagggctccctgggcccccagggccaaagggagaagcaggtgtcgatggccaggttggccccccagggcagccaggagacaagggggagcgtggagcagctggagaacagggaccagatggccccaagggctccaagggagaaccagggaaaggagagatggtggattacaatggaaacatcaatgaggctctccaggagatccggacgctggccttgatggggcctcctggtcttcctgggcaaattggcccacctggagctccagggattccaggccagaagggggagattggactgccaggccctctaggacacgatggggaaaagggacctcgcggtaaaccaggagacatgggccctcctggtccccaaggcccccctggaaaggatggacctccaggagtgaagggagaaaacgggcagccagggagcccaggagagaagggggaaaaaggggagacaggacaagcaggctcaccgggagagaaaggagaagccggggagaagggcaatccaggagcagaggttcctgggctgctagggccagaggggcctcccggacctccggggctccaaggtgttcctggaccaaagggggaagcaggactagacggagcaaaaggagagaaaggcttccagggagaaaaaggagaccgtggtcccctgggactacccggagcttcaggtttggacggcaggcctgggcctccgggtactccaggaccaattggagttccaggcccagcgggaccaaagggcgagaggggcagcaaaggagaccctgggatgacaggaccaacgggagcagctgggcttcctggtttacatggaccacccggggacaagggaaaccggggggagagggggaagaaaggctctagagggcctaaaggggataagggagaccaaggagcgcctggattagatgccccctgcccattgggcgaagatggcttaccagtccaaggctgctggaacaagtgatgcctctaaccttggattggcctgtgtgtgtgtttgtacatagaatatttatttttatacagttttcactttttgaaaatgccagaagtatgatgcatcttacagattattaaaaaagaaagaaaaacctgcatattttgtacagaaaatatcaacctcttcccttttgtttacaagatgttttgtataagcctatgtctctaatacattttttgtttggtcgtaatgtctgcatgatatttgtgcacatttattaagtatcgaagcttaataaattattgtgtcctggtgccaaagggggccagccagaactgaggtgctggctagctcatgtgtgaattcacataaatgtagaggtccatgatatttgctaagctaggtgtgtctaagagtattttaaacccttatggattttcattattaaaggaaatgaaacatggcaannnnnnnnnnnnnnnnnn

SEQ ID NO: 20109 - DNA, 2929 bp, Homo sapiens
  misc_feature 1, 2, 3, 4, 2922, 2923, 2924, 2925, 2926, 2927, 2928, 2929: n = A,T,C or G
nnnngtaataccgactcactatagggcgaattgggccctctagatgcatgctcgagcggccgccagtgtgatggatatctgcagaatccggagggagtcgacccacgcgtccgcggggacatgaggtggatactgttcattggggcccttattgggtccagcatctgtggccaagaaaaattttttggggaccaagttttgaggattaatgtcagaaatggagacgagatcagcaaattgagtcaactagtgaattcaaacaacttgaagctcaatttctggaaatctccctcctccttcaatcggcctgtggatgtcctggtcccatctgtcagtctgcaggcatttaaatccttcctgagatcccagggcttagagtacgcagtgacaattgaggacctgcaggcccttttagacaatgaagatgatgaaatgcaacacaatgaagggcaagaacggagcagtaataacttcaactacggggcttaccattccctggaagctatttaccacgagatggacaacattgccgcagactttcctgacctggcgaggagggtgaagattggacattcgtttgaaaaccggccgatgtatgtactgaagttcagcactgggaaaggcgtgaggcggccggccgtttggctgaatgcaggcatccattcccgagagtggatctcccaggccactgcaatctggacggcaaggaagattgtatctgattaccagagggatccagctatcacctccatcttggagaaaatggatattttcttgttgcctgtggccaatcctgatggatatgtgtatactcaaactcaaaaccgattatggaggaagacgcggtcccgaaatcctggaagctcctgcattggtgctgacccaaatagaaactggaacgctagttttgcaggaaagggagccagcgacaacccttgctccgaagtgtaccatggaccccacgccaattcggaagtggaggtgaaatcagtggtagatttcatccaaaaacatgggaatttcaagggcttcatcgacctgcacagctactcgcagctgctgatgtatccatatgggtactcagtcaaaaaggccccagatgccgaggaactcgacaaggtggcgaggcttgcggccaaagctctggcttctgtgtcgggcactgagtaccaagtgggtcccacctgcaccactgtctatccagctagcgggagcagcatcgactgggcgtatgacaacggcatcaaatttgcattcacatttgagttgagagataccgggacctatggcttcctcctgccagctaaccagatcatccccactgcagaggagacgtggctggggctgaagaccatcatggagcatgtgcgggacaacctctactaggcgatggctctgctctgtctacatttatttgtacccacacgtgcacgcactgaggccattgttaaaggagctctttcctacctgtgtgagtcagagccctctgggtttgtggagcacacaggcctgcccctctccagccagctccctggagtcgtgtgtcctggcggtgtccctgcaagaactggttctgccagcctgctcaattttggtcctgctgtttttgatgagccttttgtctgtttctccttccaccctgctggctgggcggctgcactcagcatcaccccttcctgggtggcatgtctctctctacctcatttttagaaccaaagaacatctgagatgattctctaccctcatccacatctagccaagccagtgaccttgctctggtggcactgtgggagacaccacttgtctttaggtgggtctcaaagatgatgtagaatttcctttaatttctcgcagtcttcctggaaaatattttcctttgagcagcaaatcttgtagggatatcagtgaaggtctctccctccctcctctcctgtttttttttttttgagacagagttttgctcttgttgcccaggctggagtgtgatggctcgatcttggctcaccacaacctctgcctcctgggttcaagcaattctcctgcctcagcctcttgagtagcttggtttataggcgcatgccaccatgcctggctaattttgtgtttttagtagagacagggtttctccatgttggtcaggctggtctcaaactcccaacctcaggtgatctgccctccttggcctcccagagtgctgggattacaggtgtgagccactgtgccgggcccgtcccctccttttttaggcctgaatacaaagtagaagatcactttccttcactgtgctgagaatttctagatactacagttcttactcctctcttccctttgttattcagtgtgaccaggatggcgggaggggatctgtgtcactgtaggtactgtgcccaggaaggctgggtgaagtgaccatctaaattgcaggatggtgaaattatccccatctgtcctaatgggcttacctcctctttgccttttgaactcacttcaaagatctaggcctcatcttacaggtcctaaatcactcatctggcctggataatctcactgccctggcacattcccatttgtgctgtggtgtatcctgtgtttccttgtcctggttgtgtgtgtgtgtgtgtgtgtgtgtgtgtgtgtgtgtgtgtttgtgtgtgtgtgtctgtctattttgtatcctggaccacaagttcctaagtagagcaagaattcatcaaccagctgcctcttgtttcatttcacctcagcacgtaccatctgtccttttgttgttgttgttttgtttttgtttttttgcttttaccaaacatgtctgtaaatcttaacctcctgcctaggatttgtacagcatctggtgtgtgcttataagccaataaatattcaatgtgagttccaaaacccacaaaccaccaacaaaacccaaannnnnnnn

SEQ ID NO: 20110 - DNA, 2416 bp, Homo sapiens
  misc_feature 1, 2, 3, 24, 2413, 2414, 2415, 2416: n = A,T,C or G
nnnatcacccggtctcctgccttncggtcgctgaccgcctccccgcactggatcccgcagccgcggctcttcccgacgcgttccgccttccccagctgtgcactctccatccagctgtgcgctctcgtcgggagtcccagccatgtccgacgagagagaggtagccgaggcagcgaccggggaagacgcctcttcgccgcctccgaaaaccgaggcagcgagcgacccccagcatcccgcggcctccgaaggggccgccgccgccgccgcctcgccgccactgctgcgctgcctagtgctcaccggctttggaggctacgacaaggtgaagctgcagagccggccggcagcgcccccggcccctgggcccggccagctgacgctgcgtctgcgggcctgcgggctcaacttcgcagacctcatggctaggcaggggctgtacgaccgtctcccgcctctgcctgtcactccgggcatggagggcgcgggtgttgtgatcgcagtgggcgagggagtcagcgaccgcaaggcaggagaccgggtgatggtgttgaaccggtcagggatgtggcaggaagaggtgactgtgccctcggtccagaccttcctgattcctgaggccatgacctttgaggaagctgctgccttgctcgtcaattacattacagcctacatggtcctctttgacttcggcaacctacagcctggccacagcgtcttggtacacatggctgcagggggtgtgggtatggctgccgtgcagctgtgccgtacagtggagaatgtgacagtgttcggaacggcctcggccagcaagcacgaggcactgaaggagaatggggtcacacatcccatcgactatcacacgactgactacgtggatgagatcaagaagatttcccctaaaggagtggacattgtcatggaccctctgggtgggtcagatactgccaagggctacaacctcctgaaacccatgggcaaagtcgtcacctatggaatggccaacctgctgacgggccccaaacggaacctgatggccctggcccggacatggtggaatcagttcagcgtgacagctctgcagctgctgcaggccaaccgggctgtgtgtggcttccacctgggctacctggatggtgaggtggagcgctacaagagcgaagcgagcacacaggatcgagacgacgagatgataccgccaaacaacagtaccacaaccgaacgagccgtaccaaggcaacgcagacaagcgagaagaccacaacgagaacagacagggcaacgcaatgaaagtggcagcacgaagtagagcacgtacgctacactctcgacagctcgtttgacgagtaccgcagcgacagaaaggacaagaccagaagctacgttctgttggccaccagacttgcatttcagcctctgtcataatgctctgccctccctcccccgaaggggtctgtggtgatgaccgctctcccctgccccttcccgcttcctgacctctgaagaggttgggaagtgaccatttggatgtctgggccctgccaaggcgacagggagggtcagctgcagggggtgtgggtatggctgccgtgcagctgtgccgtacagtggagaatgtgacagtgttcggaacggcctcggccagcaagcacgaggcactgaaggagaatggggtcacacatcccatcgactatcacacgactgactacgtggatgagatcaagaagatttcccctaaaggagtggacattgtcatggaccctctgggtgggtcagatactgccaagggctacaacctcctgaaacccatgggcaaagtcgtcacctatggaatggccaacctgctgacgggccccaaacggaacctgatggccctggcccggacatggtggaatcagttcagcgtgacagctctgcagctgctgcaggccaaccgggctgtgtgtggcttccacctgggctacctggatggtgaggtggagctggtcagtggtgtggtggcccgcctcctggctctgtacaaccagggccacatcaagccccacattgactcagtctggcccttcgagaaggtggctgatgccatgaaacagatgcaggagaagaagaatgtgggcaaggtcctcctggttccagggccagagaaggagaactagggcagtggctgtgagaaccctagagacagcgaaggggcgaagttgggaagctacgttctgtttggcaccaagattgatttcaagctctgtcatatgggtctggcctcctcccccgaaggttttgggcgctgacggtaccctgccctcccggtgcatgcctctgagaggtggaggggacttggacgttgcccgacagagaaggggcagggcgggtgtttggccatccggagatgaggaggccggcacccgagtannnn

SEQ ID NO: 20111 - DNA, 2211 bp, Homo sapiens
  misc_feature 1, 2123, 2124, 2125, 2126, 2127, 2128, 2129, 2130, 2131,2132, 2133, 2134, 2135, 2136, 2137, 2138, 2139, 2140, 2141,2142, 2143, 2144, 2145, 2146, 2203, 2204, 2205, 2206, 2207,2208, 2209, 2210, 2211: n = A,T,C or G
nccggcccgcggtcggaagctggagcgaggctgaacgcctgacgtcaaggcgacatcgccaaacctcgcccagattcaggcgtgtaaaccagccggagcggcgcggcagcggcaggaccgccgtggcgcctagagtagcgacccggggggagcgcggggcgacgctggctgcagggacccggtgacagcgtgagaggtactaggttttgacaagcttgcatcatgcgtgagtataagctagtcgttcttggctcaggaggcgttggaaagtctgctttgactgtacaatttgttcaaggaatttttgtagaaaaatacgatcctacgatagaagattcttatagaaagcaagttgaagtagatgcacaacagtgtatgcttgaaatcttggatactgcaggaacggagcaatttacagcaatgagggatttatacatgaaaaatggacaaggatttgcattagtttattccatcacagcacagtccacatttaacgatttacaagacctgagagaacagattcttcgagttaaagacactgatgatgttccaatgattcttgttggtaataagtgtgacttggaagatgaaagagttgtagggaaggaacaaggtcaaaatctagcaagacaatggaacaactgtgcattcttagaatcttctgcaaaatcaaaaataaatgttaatgagatcttttatgacctagtgcggcaaattaacagaaaaactccagtgcctgggaaggctcgcaaaaagtcatcatgtcagctgctttaatatactaaatgcattgtagctctgagccaggtctgaagaactgttgcccaattcaacagtgccagcattccaactttgttaaacctaccaacatcttaaatggactttcctgtggtggtaccctttaagaggcggatgaaagctactatatcagtttgcacattctaatcactttccagtatcacaagagagatttttacttatataatagtcctagagtttgcagctggtaaaaccagaggctacatccagtattactgctaagagacattcttcatccaccaatgttgtacatgtatgaaaatggtgtactgtatactttaacatgccccatactttgtattggagagtacaataatgtaaatcctaaaagcaccactattttagcataataaaagaaagtccaaagagctcctatatagactactccagataacttcgcttctttgatacttgtagcttattgtaattttttttaagaaattcaaggtcattattattgtacaaaataagcgctttgattaacacagctatatagtttttttaatttttaaaaaacctgtggagacggtgatcttgtctttaaaacatgatagtcctttcagtataatgtcttagattaaagacgttgcctttaatatctgttgggaaggaaatgtccagacttttcaaatctcttattatatgtttcctttttttgtttacatagggaacaatgtttatagtcgtgtgtacagtgggggtctacaacaagaagtgtatattttcaaacaattttttaatgatttaacaatttttgtaaatcattttcaggcttctgcagctgtagattctcactgtgaatcccttgcttgctcatgcataagtgtatttgcaataccaaatatacaggtttagtatttttgcctgttagtgattgtttcacatgtgtaacgttttggttgagatgttaaatggtggacgagtactgtggatgtgaatgtgggaagtaattttaatcatatgtaattggtcacaaggcctaatttgcagtaactattgctgttttatttaacaatgccttgttgctttgtatgcattaatgtttggatgtaaagattgtgtgtctatccaacagggagccacagtatttaaattgaccaacctaatgttacaactactttgaggtggccaaatgtaaactaaaagccttaattaaagtggtgcaattttgtataacttagcatcagtagttcaataaatttggattgccatgcaagggcttgcattataaaaacttgccaaaattttggagtggcgaaaaatttaaaacattttgtggggggccgagaagtaaaatgggaaannnnnnnnnnnnnnnnnnnnnnnngggggggccctttaatttttttaaaaaaaaaaaatttaaaaacttttccttgaaccnnnnnnnnn

SEQ ID NO: 20112 - DNA, 3794 bp, Homo sapiens
  misc_feature 1, 2, 3784, 3785, 3786, 3787, 3788, 3789, 3790, 3791, 3792,3793, 3794: n = A,T,C or G
nncacgagcttttttacaaagaagatcccatatttaattcaagtatttatagcatcagcaaaaatgggcagagggcgggaagttgagaacactaggttctgtgctatgttacctgtattcagtagaagtgtttctggagtcaggttttaagtcatgatcctgaagcttccttcccctcttccactaatgatgcaataatagctgttttcattttaacgagcagagaactaagaggaaaggtcctagctctgccttccacttgcagcttccctttacctcctcttattgctttcatctcaaatatccctgctactcaaccaatcctaaagctaaagtactgagatgcacacaaaggaaaggtgtgagagtgcttggaagcatccagctgagcccactggatgaaaatcagacgatagggcctcctgttgtaatatactagccagagaaaagcgccaagaacttcagggatattattcactgctttattgctccctaaccctagatcagattggattttactttgtagttcaggagttaagaagtcaaattgctgaccgaggtggggaaggatgatggaaattaaaggtttacatttgtttaatggcagaactgagatttgctcagcttatctctttcccatctgtctgtaatagcaatgactgaataatcagtagaccaatggaagaggagttgcaagtttaaatttgtaacctgactctgggttctgttctaggaatagtgcatgttttagaggctttgccagttgggatacattgttgacttgggggaggatgaaggagagaactgatgacctagacatagaaaagagtagttaactaactagatgttcttctgatctcttccatggtagacattctgagcacattggcccagttagttggtatggtgaaggggcaccgtactaacagatttggagactgaaacctaatcccatcaccaacacttagcaggtatatgatcatgggcaattcattcaattgcctgccaattatagactatatagggggaagagcactggatttggagtcaagaaacctggacacttggctccacacttccttagctgggtaactttgggcaaaccgcttggtctctcaagcctaaggttcttcagctataaaatgggaataatacttcactaactacctcacagagttgtggtaagaatataatcagataactggataaaaacactatataaactggaaagcgccgtacaaatgtgagagatcagttttattatcaaatcactgttttccactgcctcttgaatcggctttattctaaccaaccattacatctttctcatcttttggagtatgggtaattgaggcttgggtgtgtcatcagggactggagttatttcagctcccatgtagaggtgggagaggtggttgatggggcagtggaagttagataccagcgatgtatatggtaggacattttcctgggtcactttgacagtaccttgggaaattgtcagtccttgcagagggcctaggctgggcacaagggagaaagcgaacagttgactaagaattgaggggagggtctggagcgctactgccctcctgtcattgctgtgggtgggagaggctaagacttcaggtttgactggaggcctaggagagaagagtgtccttagggtttcaagaattttaatgcctagcagctgagtaacaggcattagttctgatagatagtgaaggggagaaagtgccacctgttgtgagatcacctctccagggcagcagctgccttgttatcaccagcaaccttagccctggtcagtaatatttctgctaagaaaggttttgaagcatggcctccaatgactttcataagcccttggaggcaggactgtgtctcatccatctttgtatcttcagtaccatcttgtaaggtgccttgtacatagtaggtgcttaatgaacaaatgttgcttgaatttagctgtcgtccagccccacagagttatgctccatttgccaccatgtgatatttttgagaaacaatagtgatttggatgccagctctatgtgactttgggcaagactctccatctatcttgtcttcatttcatctgtaaaatgaagtgagtagattcaatgctccctaaggtcccttccagctccaatacttgacaagcttgtgattctaaatcgtttccgttgcctctgaacatgggtgagtaatgcctccactgcagctgtttctctccaggaggctttgttcagaggaggtctgactattgcacagccagttttttcttcctcttcagcagttctttactgtcttcagaatagttctggataagcggccttttctgaaaggatatttaaaaatatatactatttaggctgggcccagtggctcatgcctgtaatcccagcactttgggaggtgaaggtgggtggatcacctgaggtcaggagttcaagaccagcctggccaacatggtgaaaccccgtctctactaaaaatacagaaattagctgggccctgtggcaagagcctgttatcccagctactggggaggctgaggcaggaaaatcgcttgaacccaggaggtggaggttgtagtgagccgagatcacaccactgcactccagcctgggtgacaagaacgaaactccatctcaaaaaataaaataaaatatatactatcttgctcctcagaaccagtggggaagaagagggaaggcaaagaaagaaactgagcatagtaaacacagcatttttttgtaggctcttatttaaaatgtgtgtgtgtgtgtgtatgtgtgtgtttctgagtaagtattgactgggaaaaagagagaagtcaatcaaaagtatactgtgcaattgagagaggctggcccaagatttaaaacttcctgtgggtaatctaactgtgagtagataggaatcggccatatgacgaaatgagatcaataggaaatgtgctttttgaggaaattttattttagtaccaaatgttgccagtgacaatcttcagttaagaagtaagttattctgacctaaaattcttatctctgccactttggtttaaaaacaaaaacccttatatacatggaatagttatattttaattaagcatttattttagttgttttcatccattcaagcaaaatgaataagcagcatttttcattgcacttaaaaatgtaaaatacctgcatgccactaatctgtaacattttaccagttcagatgcctgtaatgtgtgactttatgtgtgtctgtgttgttttgaagagaataaaggaaataatactttgcaaactgtttaaacaagtgtttaaacttctattggcaacatttattgggctaagcagttattgaaaactccgcatagttttattttccatttgaaacttcaatcaaatcaagactattatattcattagggaattaaagactaatttgctttttaaatgtgaagttgaacactgtgtggaaagtaaatgtgtgatgaagcaaaatgtataaagtatgaaatattatacttttaccctggataattattcaggaccccagttggcccaaataggtgcaatttttaatcctttgaaattagccagccagacctaatgctaaggtaaatgtaaactgttttaattaattaagatctttctgctttcgaaggtataatgtatctatttctgtcaggaatgatatttccaaatgaaaatgtaaagaacattgggaaataataaactttcctttcaaagtaaaaaaaaaaaaaaaaaaactcgannnnnnnnnnn

SEQ ID NO: 20113 - DNA, 3095 bp, Homo sapiens
  misc_feature 1, 2, 3, 3094, 3095: n = A,T,C or G
nnncgacccacgcgtccggggatggggacgagaaggctcctgggtggcttggcgctcctgctcctccaggcgctgcccagccccttgtcagccagggctgaacccccgcaggataaggaagcctgtgtgggtaccaacaatcaaagctacatctgtgacacaggacactgctgtggacagtctcagtgctgcaactactactatgaactctggtggttctggctggtgtggaccatcatcatcatcctgagctgctgctgtgtttgccaccaccgccgagccaagcaccgccttcaggcccagcagcggcaacatgaaatcaacctgatcgcttaccgagaagcccacaattactcagcgctgccattttatttcaggtttttgccaaactatttactacctccttatgaggaagtggtgaaccgacctccaactcctcccccaccatacagtgccttccagctacagcagcagcagctgctgcctccacagtgtggccctgcaggtggcagtcccccgggcatcgatcccaccaggggatcccagggggcacagagcagccccttgtctgagcccagcagaagcagcacaagacccccaagcatcgctgaccctgatccctctgacctaccagttgaccgagcagccaccaaagccccagggatggagcccagtggctctgtggctggcctgggggagctggacccgggggccttcctggacaaagatgcagaatgtagggaggagctgctgaaagatgacagctctgaacacggcgcacccgacagcaaagagaagacgcctgggagacatcgccgcttcacaggtgactcgggcattgaagtgtgtgtgtgcaaccggggccaccatgacgatgacctcaaagagttcaacacactcatcgatgatgctctggatgggcccctggacttctgcgacagctgccatgtgcggccccctggtgatgaggaggaaggcctctgtcagccctctgaggagcaggctcgagagcctgggcacccgcacctgccacggccgcccgcatgcctgctgctgaacaccatcaacgagcaggactctcccaactcccagagcagcagctcccccagctagagcaggtcctgccagcacccagcaacttggcaaagcaaccagggtaggggagaaccacgagagaagcattaagtgactttcaaagactttcagagtacagccacttggttcctttttgtttgttttccttctcctctcctgcattttcctccatctccaggtacagttcggggtgtggatgcctcttcctccacaagggcacagtgttgtggagggctaagttggttctgtgactcattcctcataccctaactccatctcctttctttaaagtcaaatctcacctacctgtttgggtcagagagatgtgttttaaaagcccccaaggaaggaggctgggactgtgccctgacatgattcttggtgatggaataggtttgtgctctgattctagtttaagagaacgttgctgtatctcagtccaggagaggcagcccatcttggccctggatgaagaaggaaacccacagaggcccagggcttgtcattgggctgccagtgtctgccaagccagcattgagctaatcctgtgggaggatgagagctactgggccgttgtatgataggttggtaggggcttgttgatctgtcaaattccaggtgacaagatctatgcaccccatgcgtccttgaggggcctcttccccgcaggctctggctggccgcaggctggttctggtgtgaaaggttatactgccttttctttgtttgtttgtttttttctctaaaaacaaacagcaaaagacagctgaaaacaagaacttcaccggtgggcaggcaagaattctcttctggaaaatgacgtttgtggctctttcccaagttggccttcaaagagcctgcctgctgttgagccagaagatgtctcgtgtgaaggctggggtggcggctgtcttggaacctctgtgagcaggaggccctaagccgcagcagtggatagaggtgcagctctctgcctctctgccctttggtctgtgttcacaggtgacccgtgtcagcctgcatcgcaagcacacaccctgcgggccttcaagtctcactgttccgtatgaggaaacagacagcggactgaggaagcgatggccccagagaaagggcccctgtagcctggctctcacacagtattttatctttgattctgaataaatattttttgtggggtttttttttttttttggtggcagttgtttgttttaaactgaccacttggaagaaacaccttggttatctgtggttttcttgccttgtccctgcctctacccccaccccttttgagtcgggtgactcatttttctgtgtagagactcggtggcccaggcaggaggtgaaagcagccatccggaaggccctggggacccttgtgcctgttgctcgccttcaggtcaccagctgagctgcgataggaaaatctgaatggaggcagcaaacagccaaaacaaacattccccacccggccctgtgcatatgaagtcgttcttcccccaactcttgaacgatgatgatattcagacgaagcattgatgttatggaagaaagaaagaaacaaacaaaaaatatatatatatgtccaaaaacagacaaatccaagggtgtgaggtaaacgagtgtgcatttagattccacaaaaccaaatccgttgacaaagttaagtccgaccaagtgactttggggagccgtgtgtgtcgcatgttgtgtgtgtcccaagccctgttcctgtgaagaatctgagtgcagccattcttcagtgaacacacgtctggagcaaggaggcctaaggaatggcttagcgttactgtacggagcaagttgcggtgccgggtttccgaatgtactgtgcctggttggaaacacggccagagaggtatcaacacggacgagtgcgggacacgggggtgccaagaggcgcgaggcccgtgggcctacggcgccagtgaggatacaggtagggtgaccgcgtgtgcgcgctacgggctcaatatcnn

SEQ ID NO: 20114 - DNA, 2356 bp, Homo sapiens
gtggttataaatttggtcagaaacattaaaacaatggaattttattttgatgaaaaactcaagtttacaatcatttagtaaatgaagagcaaacacttcattttcctatcccataactcttaagaaaaaaaagcattagtaaataaatatctgtgaacagattaagggtaaggcagactggataataaaccacctctgacattcacactccctgcatgtgactcactctaaagggtgaaatggctctggagataactgaactggtaagatatgggcattaaatctcatcctgatcattcagataagcccaagataaatactttttgctcatcaagggcagcaaactatacaaattgtactggaggaatactttgacagaagcacttaaattatattgtgcatcacaactataaaatggcttgaacatttccatttaaccaccatttataaagtgcaactatatattactctgcattttatctgaggtgtgatgaatatcagtccaaactgaaagtaccccagctgccaatttccaccacttctgaaaagacctagctgtgtgaaaaaggaccatcccccatacaaagaaccaatttcacaaacctactggtaaacaaatacatttacaactggaacttcaaaatgctagagttgtactcatttaaaaaaaaaccattcagctacctttggtctttaaaaaagcctacactgcaatatcctaaacattgttatgtgcatctcacaatgaagaagagtggccttgcagtgcagaatgaggagagtacaacgtcactgtgaagagtagcatgctatggtttcaaggaagatcagcatcacagcattggattctgtgcatcaggatcgaggtcactgttgccagaagggggatggatagggagaatatccagctcatccacttgtggagttggatgcatgactaccagctggtcctggggaatgtctgctgcagctgctgcaagattggtgatagatttactctttacacactgaaagtctacatgccgactctttccttcttccttctcccaggacattcgaataaagggtctttggacatagttgtagatcacttctggcgcggcctccaggccttttctttactttttctttgtaggtaggataaccttctattcccaatctaatcttcttaagacccctctccttcaaaactgacttggccacatctctgttttcaatatacttgaaaaatctatataattttgtgctataaataatttgtgaatattcttctcccatctgtggtggatattcttcatcccaatcaaccacatcatcatctgtaagcaccactatatgacattcccgttccccactctgggcactagctaccatgagagggaggatcatttcttccagataaaattcaaattgtctacgagcaccatcatttgataactcatgcattagggcactgagatctctacatttaatagtgctatattcaaaagagatacaaagatagtcacatgcttctctcagttcaggaatagatatgccatcaggacaacggattattcctgttttatagtaatccagaatcgctcgaaacacagtggaaccaattccctctgccacctcatactctcctttctcattgggtcgtgtaaagttatgttctcggccagatccaaacatcctgcccaacattgtatttggctgtgcagtaaaaatggatgggtctacaacaaatctagtgttatccactattagtgtcactcgttctgacgttcttatattccgagctccttcttttgcattttcatatacaaacaccatctccccagctgtcttacagctaccatctgaacttgactgactactgtttctgctgctgttcccagcactgctaatggaaccatttggggatgctttttgaggacgcggactgcttggacgagaggaactgtgatctttttctcgttcaacatggtgctgtcgtgttggagaagtcacatttctaatacaaggagtgagctgagactccgttctttcatgagatgaatctcgtgatctgtcacttgaccttcgtctatctcttgatctctcatgtcccccactagcaccatgtagactcattttggtgtggtcaactcctcctttagcaatacgcgaggaagtatctcgaacctgtagtcccccttcagtgcccacacaagattggggcaaaggccggggccagtgacacctccacttcctcctcagccagatccctccggaggtggctgtggaggaagccactgaggcggctgcgcgtagcggagccgccccggcaggttgcaggccggctcctcagcctcttaccgcgagcggacgc

SEQ ID NO: 20115 - DNA, 3303 bp, Homo sapiens
  misc_feature 1, 3297, 3298, 3299, 3300, 3301, 3302, 3303: n = A,T,C or G
ncgacccacgcgtccggggctcgagacgaagccgccgtcggccgagcgcccggctagaagcgacaccagacggagcctccggagttcctccgcccccacctcgccgggtcctggagccgcagtcctcccagctgccctcctcgtggccatggagtgtccacacctgagctccagcgtctgcattgctccggactcagccaagttccccaacggctccccgtcgtcctggtgctgcagcgtgtgccggtccaacaaaagcccttgggtctgtttgacttgttcaagtgtccactgtggaaggtatgtgaatggccatgcaaaaaaacattatgaagatgcacaagtacctttaaccaaccataagaaatcagaaaagcaagataaagttcagcacacagtatgtatggattgcagtagctacagtacatactgttatcgctgtgatgattttgtggttaatgacaccaagctgggactggtacagaaagtcagagaacacttacagaacttggaaaactcagctttcacagctgacaggcataagaaaagaaaacttttggaaaactcaacactaaacagcaagttattaaaagtaaatggaagcaccactgccatttgtgccacaggccttcggaatttggggaacacatgtttcatgaatgccatccttcagtcactcagtaacattgagcagttttgctgttatttcaaagaactgcccgccgtggagttaaggaatgggaaaacagcaggaaggcggacataccacaccaggagccaaggggataacaatgtgtctttggtagaagagtttagaaagacactctgtgctttatggcaaggcagccagactgcatttagcccagagtccttattttatgttgtttggaagattatgccaaactttaggggctatcaacagcaggacgcccatgaattcatgcgctaccttttggaccacctacacttggaacttcagggcggtttcaacggtgtttcccgctcagcaattctgcaggagaattctactctgtctgcaagtaacaagtgttgcataaatggagcatctactgttgtcacggctatattcggaggcattctccaaaatgaggttaactgcctcatatgtgggacagaatctagaaagtttgatccattcctagacctttcattagatattccaagtcagttcagaagtaagcgctctaagaatcaagaaaatggaccagtttgttcgttacgagattgtcttcgcagttttaccgacttagaagaacttgatgagacagagttatatatgtgccataaatgcaaaaagaaacaaaagtccacaaaaaagttttggattcaaaaactacccaaggtgctatgcttacatttgaaaagatttcattggacagcatatttaagaaataaagttgatacatacgtagaatttccactgagaggcctagacatgaaatgctacttactagagcctgagaacagtggcccggagagctgcctgtatgacctcgccgctgtggtggtgcaccatggttccggggttggttctggacattacacagcatacgcaactcacgaaggccgctggttccacttcaatgacagtactgtaacactgactgacgaggagactgtggtgaaggcgaaggcctacatccttttctacgtggaacaccaggccaaagctggatcggataaactttaatacctcctccaaatcatcattcaccaaccataccagagaaacatttccagttttccacaaatacttgatacaagatttaatttcattatgcacttttcaatttcctattttggatttagttttgtcaatggtagtgacttactgaacatgggcaccaactaattttgttgttgttctaccagaaaacctcagcagatgttttgatttgctgctttagttgtaataattcaatttttataggtagttgtaagaacttagtcttatttgacttttttattttatgttaatgttttcagttctcactttgaggcacatttacatcaatgcttttgttcctctcacatgctgaaagcaagatgtgttccttattgtgaagagcgacacaactgcctgctgcctttccacagctataatggacatcaggttgactctaaatcaaggatcatgtgtgcacaatacttgtggcccacaaaatttcacaatgactgctgaggaatcattctttttgcctgtaaaatataacaaagggcatcattaagtagaccaggtaattactgcttgtctctcaaggctgctgtctttatcagcactaactaaataaatttgttggttcagttgtacttgtcctgcaaatacaagaattactctctttgttggttttttggttttggggcatacttgtttgcggggaggtaagatgggagtaaagaccaaatacatgtaatgtttaaaaaaaatgctgtgactcactgacatggtataggtgttaccagtgaggtaaagccatggcgtctgcctccttttgaatcagtatctcattcccccttagttgtaccactggaagtcacgacatgtccattatagacttacttactgcttgtgtttggcatctgagtctgaggtgtgaccctctgggatttacttggatcatcacccgcacttcagtttatcactggggggtgtgcttccacaggaggaaatttagaatcttcgctgctctgggttttaacacctctctctggcctatcctgattgataggacaagttgaaaatactgttggagtaagtaagtggagttttcgttttgttttttgggggtttttggagacaagagtctctctctgttgcccaggctggagtgcagtggcacgatctcagctcattgcaacctcggcctcccgagtagcaattctcctgcctcaacctcctgagtagctgggattacaggtgcccaccactacacctggccaattttttttttgtatttttagtaaagacgggggtttaccatgttggctagggtggtctcaacctccctcctgacctcaggtgatccgcctgcctcagcctcccaaagtgctgagattacagggcgtgagccatcacgccagacagtttggtttttaaaaaacagatttaactcaaagattcaaatctgggaaccagaatcccatttaaagacagcagttgtggttctacaagtgttctaagacacgctgtgggggctataaactataaggaagaggacgggggattgcaaactgcctaccatttcccagggacacaggttctggttcacccagaannnnnnn

SEQ ID NO: 20116 - DNA, 307 bp, Homo sapiens
  misc_feature 1, 2, 3: n = A,T,C or G
nnnccggcgcttgttgaggatttactgggcacccagctccatgtgcaagacttttcccaacacagccttggccaggcagatggtgtgtcagggccacaggtttccgtagcctcttgggtgatagaaaggggcccaggccctgggctggggctcagaagggactcaaaggaggcccttgcccttatgggactcagtctgattggagaacagacaaggagatttgggattacagcgcaggaggtggggtggtgaggaaagcacgctgctggccgggccccaatagtggcctaaccagcttggaggtggg

SEQ ID NO: 20117 - DNA, 211 bp, Homo sapiens
  misc_feature 1, 2, 3, 4, 5, 6, 7, 8, 9, 209, 210, 211: n = A,T,C or G
nnnnnnnnnatctttctgtttttccactaaaagctccgtttttccatcttcccattactctccctttcctgtgtacactcctgaagacaggcatcctcataaggtgttctgaattaactttagggtgttctccaggtactttgcatctttttatatttcttgtaaattgttaatttctaagctccatgattaaagagaattcaccactnnn

SEQ ID NO: 20118 - DNA, 1184 bp, Homo sapiens
  misc_feature 1, 2, 1184: n = A,T,C or G
nnctcattacctatatctcatcgtcatcattcctcgcatagactcatcaacacacgaccccactctccccgtttttgagagtactcaatcccgtgacaaatctgtctctccttctgacaactctttacgcaatgaaccagattcaagctgaggctgtgtggcatggcagaaggctgaactattcttgtgtagccctagggatagtccaagagccctctagtcttctctgaggcaatgagattcaagggcagctgtgatccttgcccttgaacggaaaccagccgtggccaaatctgtcctcacagatccatgtctccctggggcagtggcagagcagaggatagttccttattactctttgctcaaagggagatgtctcctgtccttgcctgcatttcgtcgcctctttcgactcaagaagttctccaatttcttgctgcgtttcagctccttgaacttctcagctagtgccaactggcgctgctcagattttttcaggaagtatggccgatggccctgctgggcctgagcccgacgttcttgcttcagggccaggtgcagctcctgctgttgctttcgttcctgctgtgccatttcttgctgctccattcgctgaagcagttgctgcagtttctcatgctcctctcctgaaaggtgcttcttcaactgttttttcacaagctctttctctttcgctcggatgtcattcaagaattggtatgttttgtcaaacacctcaggattatattcccctgacagatcatcaaagcgagggtcccgggctacctttttactaatgggaacaacctgacgtaaaaatggtactcggatcttggctgacatttccagaggcctgtgcttatctgcaacacatgcattttggataggtggtctagaagcttgtttcttaggactatttccagctaccaattgtttgtacgtcttagtccccacttggctctgcaattccaacagctcctcaaatgacatgttagatgtgcccctcaataggtcgcgggccacggccgcgggctccaggcccccgccgtcctcctcgcggtcccgggccccgcggggacgtcgggccccggccccggccccggccccggcgcggtagttagctcccggcatcagctggcagtagcgctcggaagacgaatggcgccggacgcgtgggtcgactn

SEQ ID NO: 20119 - DNA, 1608 bp, Homo sapiens
  misc_feature 1, 1604, 1605, 1606, 1607, 1608: n = A,T,C or G
ncacgcgtccgccacgcgtccgagcggcgctggcggcggcggcggcggtggtatcggcggcagctgtgagggggttccgggaagatggtgctgatcaaggaattccgtgtggttttgccatgttctgttcaggagtatcaggttgggcagctttactctgttgcagaagctagtaagaatgagactggtggtggagaaggaattgaagtcttaaagaatgaaccttatgagaaggatggagaaaagggacagtatacgcacaaaatttatcacctaaagagcaaagtgcctgcattcgtgaggatgattgctcccgagggctccttggtgtttcatgagaaagcctggaatgcgtacccctactgtagaacaattgtaacgaatgaatatatgaaagatgatttcttcattaaaatcgaaacatggcacaaaccagacttgggaacattagaaaatgtacatggtttagatccaaacacatggaaaactgttgaaattgtccatatagatattgcagatagaagtcaagttgaaccagcagactacaaagctgatgaagacccagcattattccagtcagtcaagaccaagagaggccctttgggacccaactggaagaaggagctggcaaacagccctgactgtccccagatgtgtgcctataagctggtgaccatcaaattcaagtggtggggactgcaaagcaaagtagaaaacttcattcaaaagcaagaaaaacggatatttacaaacttccatcgccagcttttttgttggattgacaagtggatcgatctcacgatggaagacattaggagaatggaagacgagactcagaaagaactagaaacaatgcgtaagaggggttccgttcgaggcacgtcggctgctgatgtctagatgagtcccctgtagggtcagagacaatgtcaaactgtttacgtaatcaaggtcaagtgaggggaacaagcgcagccagtgatgagtgaagaagaatctgaccagtatcttgcagtgttgacgtttcccagatgtgtgcttgtgatgatacacacacatgcacaggttctcaaccacgtgtgtatatatgtatgtgtgcatatgtctgtagctgtatataaagcgcatgtagagctacagatccagatacacacacttgtgtatatatgtacatacagacatactgaagggattagtacaatttctccaaagtactgtacctgtccatcgcgatgcacaagaaaatattttcaatatatatacctggaacagattttaataattatcagagtaataccattaatggacaaattgactgcaatgtaatactagctggtatgtttcataaatgtcaagctgtggaccaacatatatagccttttattatttttctcttcttttaagtcagtctgttataaatttttttttagtcccataagcagtagactcccacagaaaatttcttcaaaattttttggtgttccaatgaatctgggatgtaaactctgaatgtatttataactatttatcggaaggacaacttgggcccacattgacattaaggcagggcaaggaaaggccacttaacgtcgcgctgccctgannnnn

SEQ ID NO: 20120 - DNA, 1812 bp, Homo sapiens
  misc_feature 1, 1811, 1812: n = A,T,C or G
naaccctgccaggctctccaatagcatgtggaattatcgctctacccaggcggtggtgtcgatctacgttccaattggggccgtaccatggcggagaagactcaaaagagtgtgaagattgctcctggagcagttgtatgtgtagaaagtgaaatcagaggagatgtaactatcggacctcggacagtgatccaccctaaagcaagaattattgcggaagccgggccaatagtgattggcgaagggaacctaatagaagaacaggcccttatcataaatgcttacccagataatatcactcctgacactgaagatccagaaccaaaacctatgatcattggcaccaataatgtgtttgaagttggctgttattcccaagccatgaagatgggagataataatgtcattgaatcaaaagcatatgtaggcagaaatgtaatattgacaagtggctgcatcattggggcttgttgcaacctaaatacatttgaagtcatccctgagaatacggtgatctatggtgcagactgccttcgtcgggtgcagactgagcgaccgcagccccagacactacagctggatttcttgatgaaaatcttgccaaattaccaccacctaaagaagactatgaaaggaagctcaactccagtaaagaactaagaacagtgtataacatgaagataacattttgtctttgaccactgtcttttgaatgggcccacagtgtttatgtactcttaacaactcacagaataatacatgttcactttattttgtaaaattgggttgagaggaaactaatggagtttcattgtaactgtcctttgtaatttatataaatgtattattttcctatatccttggttcttttctgataatttacagatttagcttttcttttgttatataaactgctagccacaaattttagttatgtaaaaggctacccttgacaagaaaagacatactgtcatgtatttatattctagcatagactaaactgaataaaaatgctgataacaggaccttgtaagcatactttaatcagtttttctccttgaattaatcttttctcttaatttttattatgtactagttgtattaaagctaatgtgtttactttttcctctgtggatttgtagctgtttaaaatttcaggtgaatttcagtagctattgaattaatttagacttcacttgtttttaagaaaagtacaattttttcttttggtaaaacaaaagtaatcagggaaagatgttttcagtagaatacaaattagtggcattcttgggtttctgaggacaatgaaactaaaagaaattttgaaattatacaaatttatgaaattattaatattttagcatagtgctaatcactaatcattgagctttattattctgtgtctatgtagtgagcaaaatgttgagaattttataattccaaatttttaaaataattcaagtgcataaatttactggaacatacttctcaacttttggatagtagataattgacttagtactaagaatactaacactactaagaatattctctcaaaaatttactttttatttcattctattttagacacccggtctcacttctattacctagctggagtgagggacaagctggtcccatggtgcactttggcctcccaaatcagggatcccccggctcaacctcttgagaaatggtggataatagggaagcccacggcaagctttcatatttaacacttgggaacagtcacggttgccccggtctgcacatccccacaaaatttctgcaaacaaactcttctgtagacnn

SEQ ID NO: 20121 - DNA, 920 bp, Homo sapiens
cgacccacgcgtccgggggatctgtgcctggcatgggggcgagttctggcctccttagggtacggggagagcttggactttggtcctgacgtggtggacgacacaccttcgaagagtggacgttacctcagttgtctgttgttagagtttaatcgatcactcgtctgttttgttgtgttctttcccagaaataactttaccaaaggaaagctattttgcgaactatcttctccagcggagatggccaatgtgctttgtaacagagccagactggtttcctatctcccaggattttgctctttagttaaaagggttgtcaatcccaaagccttttcgactgcaggatcatcaggttcggatgagtctcatgtggctgctgcacctccagatatatgctctcgaacagtgtggcctgatgaaactatgggaccctttggacctcaagatcagaggttccagcttcctgggaacataggttttgattgtcacctcaatgggactgcttcacagaagaaaagcctggttcataaaactttgcctgatgttctagcagaacctttatcaagtgaaagacatgagtttgtgatggcacaattatgtgaatgaatttcagggtaatgatgcacctgtgtgaacaagaaattaacagtgcagaaactttacttgtgacatgtgccagagtagagtgtgcatacaaacatgtccagaaattggtgcgaaacagattcggattcactgttccagaagtagctaatggaaactaatgattctgactgtaacccaaaaactagaatgtatgctggtgggtgcacgacgtcgaaattggagagaatgtctaaaagtctcaaggggccgaatgggaggcgctcgacgagggatggggggtttggcccccccgtggggtttggcgcacaaccccc

SEQ ID NO: 20122 - DNA, 339 bp, Homo sapiens
  misc_feature 334, 335, 336, 337, 338, 339: n = A,T,C or G
tgggacagagcccccgatccgccagcaccacctgaggatttagaaaccgccccagcgatggaagagggtcaggagctggagaggaaagcaatagaagaactgcttaaggaggcaaaacgtgggaaaactagagctgaaacaatgggacccatgggttgcttattacagggacaagatacaaactaaaatcagccaaaataagacacaaagattaaagccactgttatcctctgctccgtgaagaggacatgctaccctcccagcatcagtgtgtgataataagcatggaatattgccaagcaaggaagctcatctgcggctcagcattcaaagnnnnnn

SEQ ID NO: 20123 - DNA, 3725 bp, Homo sapiens
  misc_feature 1, 2, 3, 4, 5, 6, 7, 8, 9, 10, 11, 12, 13, 14, 15, 16, 17,18, 19, 20, 21, 22, 23, 24, 25, 26, 27, 28, 29, 30, 3724,3725: n = A,T,C or G
nnnnnnnnnnnnnnnnnnnnnnnnnnnnnncggctcagccccgcgcccgtgcgcgcgctcgcggccgggttgcagggctgggcgcgcgccccgcgtcccgggcaggaagatggtggcgagcgcgcgagtgcagaagctggtgcggcgctacaagctggcgattgccacggcgctggccatcctgctgctgcagggcctggtagtgtggagcttcagcggcctggaggaggacgaggcgggcgagaaaggaaggcagaggaagccacggccactggaccctggcgagggttccaaggacacagacagttcagcagggcgacggggcagcacaggcagaaggcatgggcgctggcggggccgtgctgagagcccaggagtgcccgtggccaaggtggtacgggcagtaaccagccggcagagagccagccggcgggtcccacctgccccacccccggaagccccaggccgccagaacctgagtggggcagcagctggggaggcgctggtaggggcagctggcttcccaccacacggagatacagggagcgtggagggcgccccccagcccacggacaatggcttcacccccaagtgcgagatcgtgggcaaggacgcactgtctgcactggcccgggccagcaccaagcagtgccagcaggagatcgccaatgtggtgtgcctgcaccaggctgggagcctcatgcccaaggctgtgccccggcactgtcagctgactgggaagatgagccccggcatccagtgggatgagagccaagcccagcagcccatggatggccccccggtgcgaatcgcctacatgctggtggttcacggccgcgccatccgccagctgaagcgtctcctcaaggccgtttatcacgagcagcacttcttttacatccatgtggacaagcgttccgactacctgcaccgggaggtggtggagctggcccagggctatgataacgtgcgggtgacgccctggcgcatggttaccatctggggcggggccagcctcctgacgatgtacctgcggagcatgcgggacctgctagaggtgcctggctgggcctgggacttcttcatcaacctcagtgccactgactatccaaccaggaccaatgaggagctggtggcattcctatccaagaaccgggacaagaatttcctcaagtcacatggccgggacaactccaggttcatcaagaaacagggcctggaccggctcttccatgagtgcgactcacacatgtggcgcctgggcgagcggcagatcccagcaggcattgtggtggatggcggttctgactggttcgtgctgacacgcagctttgtggagtatgtggtgtacacagatgacccgcttgtggcccagctgcgccagttctacacatacacactgctcccagccgagtccttcttccacacggtgctggagaacagcctggcctgtgagaccctcgtggacaacaacctgcgggtcaccaactggaaccgcaagctgggctgcaagtgccagtacaagcacattgtggactggtgtggctgctcccccaacgacttcaagccacaggacttcctccggctgcagcaagtctccagacccaccttcttcgcccggaagttcgagtcgactgtgaaccaggaggtgctggaaatcctggacttccacctgtacggcagctacccccccggcacgccagccctcaaggcctactgggagaacacctacgacgcggctgatggccccagtgggctcagtgatgtcatgctcactgcttacacagccttcgcccgcctcagcctgcaccatgccgccactgctgcacccccaatgggcaccccactctgcaggtttgagcccaggggcttgccgtccagcgtgcacctgtatttctatgacgaccatttccagggctacctggtgacgcaggcggtgcagccctcagcccaggggccggcagagacgcttgagatgtggctgatgccccaagggtcgctgaagctgttggggcgcagtgaccaggccagccggctccagagtctggaggttggcactgattgggaccccaaagagcgtcttttccggaactttggggggttactggggccgctggacgagcctgtggccgtgcagcgctgggcccggggccccaacctcacagccacagtggtctggatcgacccaacctatgtggtggccacatcttatgacatcacagtagatacggagactgaggtcacgcaatacaagcccccactgagccggcccctgcggccagggccctggactgttcgactccttcagttctgggaaccgctgggtgagacccgcttccttgtgctgcccttgaccttcaaccgcaaactacctctcaggaaagatgatgccagctggctgcacgcagggccaccccacaacgagtacatggagcagagtttccagggcctgagtagcatcctgaacctgcctcagccggagctcgcggaggaggctgcccagcggcacacacagctcacaggccctgcgctcgaggcctggacagacagggaactgagcagcttctggtccgtggctggactgtgtgccataggcccctctccctgcccctccctggagccctgcagactgaccagctggagctctctgtcccccgaccccaaatcagagctggggcctgtcaaagcagacgggcgactcaggtagcagggccccagccagtacccgtggaggacccgggaaattgcaccttacagacagtggaggggtgtcccctcccacaggcaagaaccagaggcccaggctgcacacccatttcagccatcaagaacccacacagacggcagggaaggtggacacagtatgaactactgctgatgtctctgttggggatcagagggctggcgggaacgcgagaagggcaccagcagcattccacacccagctcttcctcaccttcctgtctagtttgaatttcttttttttcttttttttttttttttttttttaatttaaaaaggaaaatgggtggttgggagagaaactagaacagaagatgtgcaatagggctcagagcagccccaggaagtgggccatgtctgtggggagcagtggcttgctgagcccacctgctattgttctgcacgaggctgggcctgcctcactctccagggcctcatgccccattctgggcctgtggtgctcgtggctgaggctccacagggctgcaagtgccctgccaggctctaaggcccgaagaacaggtgatatcgggggcgctgcagagctgggctctagcaggacagttcttttgtagccaggggaccctagaagtggggtggggcggctccagggctttccagcataccctgcccctggatgggaaaggcagggtcagggcccactgagacccatgcagagtttccaggtgtgcactggaagtgaggtcacatgagcagcgtgggaagaagactctgtcaagactctcagaagaacctggagtaattgtgcctgaagctcagcgtgaagtctgaaatatgcaacagaagaaatatatctctatctctctactctgggctctgtgtttttcctcctgggtgtcaggaagccatcaccattcattgggccttctccagaagtcttagctctcctttggtagccttgagaaggtaaagatctcattcctccagattaagaagtttagaatccccacagagagagcgnn

SEQ ID NO: 20124 - DNA, 1453 bp, Homo sapiens
  misc_feature 1453: n = A,T,C or G
ctggcggcgctcgggaggaagtgccgatcggctgctggggcgaaaagggggcgccgggccgctctagccggtgaggccggcgggctctctgtggctgcggctgggaaaccgcgcggaggaggtgcccggccggggaccagccctggtccagcgcctccctctctcagcatggacgaggagagcctggagtcggccttgcagacctaccgtgcgcagctgcagcaggtggagctggccttgggcgccggcctggattcgtctgagcaggctgacctgcgccagctgcagggggacctgaaggagctcatcgagctcaccgaggccagcctggtgtctgtcaggaagagcaggttgttggccgcgctggacgaagagcgcccgggccgccaggaagatgctgagtaccaggctttccgggaggccatcactgaggcggtggaggcaccagcagcggcccgtgggtccggatcagagaccgttcctaaagcagaggcggggccagaatctgcggcaggtgggcaggaggaggaagagggagaggacgaggaagagctgagtgggacaaaggtgagcgcgccctactacagctcctggggcactctggagtatcacaacgccatggtggtgggaacggaagaggcggaggatggctcggcgggtgtccgtgtgctttacctgtaccccactcacaagtctctgaagccgtgcccgttcttcctggagggaaagtgccgctttaaggagaactgcaggttctcccatgggcaggtggtctctctggatgagctgcgccccttccaggacccagacctgagctccctgcaggccggctctgcgtgtctggccaagcaccaggatggcctctggcacgcagcacgcatcaccgatgtggacaacggctactacacagtcaagtttgactcgctgctgctgagggaggccgtggtggagggggacggcatcctgccccccactgcgcacagaggccacagagtccgactcagacagcgacggtacgggtgactccagctatgccagagtggtggggtcagatgctgtggactctgggacctgcagctctgacttggctggctgggaggtgcacacgcgaggtatagggctccagaatcctcaaaaagatgcggctatgacttggcaagggtttgggacgacacgcggaaagccgggtgttgaaccccaataccatgactgaggagggtgtgcgacatcgaagggcagcgcggcgtggacacgacgtggttgggggaaacccggtggaaacacaaccacgggcatggcaagggatgtggacaccaaagacccccaggcgtgcgagtgcaacagggggcgcaccatgtagaggaccaggaagcatcgaaagagaaatatagagaccacaacgaagcaaggagagagaaacagagtacgaggcaataaaaacggggcgactgan

SEQ ID NO: 20125 - DNA, 2167 bp, Homo sapiens
  misc_feature 1, 2, 3, 4, 2156, 2157, 2158, 2159, 2160, 2161, 2162, 2163,2164, 2165, 2166, 2167: n = A,T,C or G
nnnnacgcgtcccgacgcgtgcagacgtccttctaatcctagtcttcgtttggtccggttgcactcttcctatagcccagagggcgagagggcctgtggcctgggggaaggaggacgaggttctgcctggatcccagcagtaggacgctgtgccatttgggaacaaaggaatagtctgcctggaatccctgcagatcttggggccggaggccagtccaacccttggagcaggaagaaacgcaaagttgtcaagaaccaagtcgagctgcctcagagccggcccgcagtagctgcagactccgcccgcgacgtgtgcgcgcttctctgggccagagcgagcctgttttgtgctcgggttaagagatttgtcccagctataccatgggccgcactcgggaagctggctgcgtggccgctggtgtggttatcggggctggtgcctgctactgtgtatacagactggcttggggaagagacgagaacgagaaaatctgggacgaagacgaggagtctacggacacctcagagattggggttgagactgtgaaaggagctaaaactaacgctggggcagggtctggggccaaacttcagggtgattcagaggtcaagcctgaggtgagtttgggactcgaggattgtccgggtgtaaaagagaaggcccattcaggatcccacagcggaggtggcctagaggccaaggccaaggcccttttcaacacgctgaaggaacaggcaagtgcaaaggcaggcaaaggggctagggtgggtaccatctctgggaacaggacccttgcaccgagtttaccctgcccaggaggcaggggtggaggctgccaccccaccaggagtggatctagggccgggggcagggcaagtggaaaatccaagggaaaggcccgaagtaagagcaccagggctccagctacaacatggcctgtccggagaggcaagttcaactttccttataaaattgatgatattctgagtgctcccgacctccaaaaggtcctcaacatcctggagcgaacaaatgatccttttattcaagaagtagccttggtcactctgggtaacaatgcagcatattcatttaaccagaatgccatacgtgaattgggtggtgtcccaattattgcaaaactgataaaaacaaaagaccccataattagggaaaagacttacaatgcccttaataacttgagtgtgaacgcagaaaatcagggcaagattaagacgtacatcagtcaagtgtgtgatgacaccatggtctgtcgcttggactcagctgtgcagatggctgggctaagactgttaaccaacatgactgtgactaatcattaccaacatttgctttcctattcttttccagacttttttgctttgttattcctgggaaatcacttcaccaagatacagattatgaaactaattataaactttactgaaaatccagccatgacaagagagctggtcagttgtaaagtaccatcagaattgatttccctctttaataaagaatgggatagagagattcttcttaatatccttaccctatttgagaatataaatgacaacataaaaaatgaagggctcgcatcatccaggaaagaattcagcagaagttcactttttttcttattcaaagagtctggagtttgtgttaagaaaatcaaagcactagcaaatcacaatgatctggtggtgaaagtaaaagtcctgaaagtattaaccaaactctaatttggagtctgtcccaaacaatattgagatatttgcagttggtacgatgtgatttgtaaattctttgtttttcattgtgcgtatatggtaaagagatcttttcagctgctattttggaataatgactatcatatatcataacagtgactgatgttggttgtaatggttgggtttaggatgaaccattttaaggatgccaaatgaaatattagtatttgtacacagaaagaatttattgatttgatcttattacctagattgagattttttaatctttcctctacctaaactgacaatgaattggttatacatcatgcataagctacacttttatattagtttatatttgttattctaagacttgtgtttcatcaataaagttgtgttttaagcagcagaaaaaaaaaaaaaannnnnnnnnnnn

SEQ ID NO: 20126 - DNA, 2156 bp, Homo sapiens
  misc_feature 1, 2149, 2150, 2151, 2152, 2153, 2154, 2155, 2156: n = A,T,C or G
nctgagattggtcccctgaagacctgggctacatgtacttttaccgcaggataccaagctagacctcaaatataaaaattggcgaaaagaagccatacgcctttttaatttgccaaaaagcataatgaagaagaagaagttgaaacaactagacatgaaggaatatatggggtatttatcgtttatttaaagagcacgatcagttgacaccttctgaaatagaactgagaagaaatttctattagtgatgatacactattatattgtagatagtttttataaatgttcaaaaagatgatgatatttaaaaacaaaaaaagtattcatattgctggtggaggatctgccatcagcacatcaaaaatggggatgtgcccccagccctctattttgctttgggggtcagtgatagtggcctctggagaaaccaaataatgtggccagtggtgtggccttacccacaacaaatgaaaagcccacttgtgtttcatatagaaaatcagcagttgggtggggctttatttgtgacataatttttttcatgacatacaataatttctgatgtatccatgtagatattatgctctgtccataatagagcctctgcaatgaaagatatttttaatttgtcacattaaaattcataatacgattgtgtgaatgtgtgtgagactgactgagagtgtgagacttttactagaaaagtgagtccactagaaaatctgtgacaagttggtttttaaagtctgaacagttgatattaagcatatctgaaaaaagcaagtaaatattttaacaaaactatgactcaggaaccttcgagaagattagttccccacttagatttttaaggagtaaaaagggctgagttatgcctttaagtgctgtcaagaattcacttgggtttgggacatttgctggtgtaatgctagatgcccacagcagcataatattgtactttgtcaaaggtaggtaaattctctgtttctcagcagccctttccccaaaaggtatggtgtttatttttagtaaaaatagctaatctctttttaccatctcacatgataactctttggagtcatgtcaagtgccccaaatttgtctgtgattttcccatctctgagctctttatctgcctccgtttccttgtttttctggggccagagtctcatctctgcctttttttggtgtatcaccttctgacttgccttcattgcttgtctgatgtgaccaacagtgtgatcttggacacactaaggattttagatgcaaagaaactttatacaacattatgaaagactatcctttccattttggttatttcagcattttagttgcaacctgggattagattagagtttccaacgtgatgaaaagtggaatgatagcattctataatttccataattttcctactggtccgtaccaaattctagagtctctggagttgctatttcagagtatttggtcaaacgaaaaagaatttattgctgtctgtttaacatgtatttgtttggttgaaaggatctttttagaaactgtaggaaaataaacagaaccaaccaggtgaaacaaagcacagacattgggttaggatgtagtgagttgtgaacaatcaggattctgggtgtgatgggggtccctgtctcataggtgatcctttggtgccatgtgaccgagagacatggtgtcttaaggcccatggcctggagacctgggtgctgctcctaagctgactgtggaccttgggccaagtccttcatccgtcctgtgtctcactgtcctcatctgaccatggtatgatgacgcctgcctctctttcatcatgctttgacggtcaggtgagaatccggtaccggtgaaccttccatcgagttgactcttggtcttgccctggtcggtttgtatacaccgtggccgggcttttcactcatgtttccccaattggggacactttgattcgcaaaggaggcatccggccgatctctcccagtgggccctgggtccctatatgttatggttttaaggcacttttagtatatcggaatcacagaaggtataaacactagggagatttttagatcacccatttttttatctcagctacgggggggagacattaatattttcacacttcttcttcttccgnnnnnnnn

SEQ ID NO: 20127 - DNA, 422 bp, Homo sapiens
  misc_feature 419, 420, 421, 422: n = A,T,C or G
gagtcgacccacgcgtccgcggctggtggtgggctcgggccgctcgccttgcccgtcttcgcttccggaggtcgctactgccgcctcagcggccccggagcgggggcgcccgggggtccttcgcccccggccacggtccccgcgccggggcttcgccgcccccagtgtccgagctggatcgtgcggacgcctggctcctccgaaaagcgcacgagacagccttcctctcctggttccgcaatggcctcctggcatcgggcatcggggtcatctccttcatgcagagtgacatgggtcgggaagcagcatatgaccatcccccgaccttggccctgttgctaccctgcctctcccgcaggcttcttcctgctgggcggcctgtgcgtggtgtggggcagcgccttgtacgccgtgggccnnnn

SEQ ID NO: 20128 - DNA, 755 bp, Homo sapiens
  misc_feature 745, 746, 747, 748, 749, 750, 751, 752, 753, 754, 755: n = A,T,C or G
gcgtccgctcgctgcagccccgcctgggccacggcaccctcgagcgccagccccgcgccccacccgggagcagcgagccaccggcgcgctccccaggagcccctgcaggcgccggccctggtccagcgcctccctctctcagcatggacgaggagagcctggagtcggccttgcagacctaccgtgcgcagctgcagcaggtggagctggccttgggcgccggcctggattcgtctgagcaggctgacctgcgccagctgcagggggacctgaaggagctcatcgagctcaccgaggccagcctggtgtctgtcaggaagagcaggttgttggccgcgctggacgaagagcgcccgggccgccaggaagatgctgagtaccaggctttccgggaggccatcactgaggcggtggaggcaccagcagcggcccgtgggtccggatcagagaccgttcctaaagcagaggcggggccagaatctgcggcaggtgggcaggaggaggaagagggagaggacgaggaagagctgagtgggacaaaggttctcccatgggcaggtggtctctctggatgagctgcgccccttccaggacccagacctgagctccctgcaggccggctctgcgtgtctggccaagcaccaggatggcctctggcacgcagcacgcatcaccgatgtggacaacggctacttacacagttcaaagtttcgacttcgcttgcttgcttgacggggaggcccgnnnnnnnnnnn

SEQ ID NO: 20129 - DNA, 5569 bp, Homo sapiens
  misc_feature 1, 2, 3, 4, 5, 6, 7, 5569: n = A,T,C or G
nnnnnnngactgcagaagcctacttcacaccgccttctcttattttgcggggcccccccccccccccaaaatttttttgggcaacattttaaaaacctctccccatattttgcaaagaggaaattcacagcaaaagtccacattatgtcagctttctcatattgagagctctgctatgccactgttgaatttttcccaagattcctgtccctagccctcacttcaaactctgcttccttggacagatttggcaatagcttttgtaagtgatgtggacataatttgcctacaataatgaaaacctacaggaatttttttatttttcattttccccttaggcatatttagtatttttcccccaggcagatcattctgagtgtgcgagtgtgtgtgcacatgttacaaaggcaactaccatgttaataaaatattcaatttgaaatccttttcggtatttgaattgcttttgaataatgttttttatctggatgtaacattgttgcattagctttttaactttcccaagtaattgaatacattttattacttggacttttataaactctttccctacccactataaatgagacattcacagcgttcaagtttgtattaaaggaaaggattagtttgaccccttcttttgatggttaatgcatacatgcagttaaatccctttatgcaaatgtgacactgctttactaggtcttttagttatttatttatttttttttttttttgccaatttatattgtaacatgatttcttgaacacagtaagttgttttaaaataaaagaacagcatactgtagtttttataagtaaagcgtaatgaaattgtacccctagagaaaattccattaacttgttaaattagtggaattaacaacaaataaagcatgtttgagacctggcaaaaattcctctggtagtatttataaatagagctgcatgcctctagtatgaaaaccgtatcagttgcaagtgccacttctacaagttactcagtttactctttgtatcagtaactttaaaggttggatgatccttgctggttaaagctaaatctcaacctagcaactaaatgaaaatatttagaatcatcagaatctgaacagactaaaattatcagcgataagcagaatcaagcagggtataagttttatctcaattatttgaaattgactgagttttcttaagtgtaaagctgaaatttgctaaccatgtttttgatgaaccacagtgcagcattgtgtgggttttagattgaatgactctctgctataattatcatgactttgaaatttttcatgagaataaatgaggaatggaggcaatttgtgggtttatccaaagcccccttgatgttgagtgttgccattgatcaaagatagcctcttttagattgtgatttctctctaaataagatactttgtatatttaatgacaagtctcttccctataattttgctcctcagaaaagaaaagcctagacagactgtatttccagtcacagaacataaaacttaatctaatgggtgttttgttttgttttgagacagaggctcactctgtcacctaggctggagtgcagtggctcgatctcagctcactgcagcctccacctcccggattcaagcaatttcctgcctcagcctcttgagtagctgggattacaggagccctccacgaggcccagttaatttttgtatctttagtggagacgaggtttccccctattggtcaggctggtctcaaacttctgacctcaagtgatccactcgcctcagcctctcaaaagtgctgggattacaggcatgaggcgccgcacttggcctagtgttttcttaactgtgaaattcccattcatttcttgaatgaggctacatcttatggacagagcaaagttattgtcctacagattcttaaaactataattatggctattgcatgaaatttaaatagattttattatgtctgcaaatctctgggcttttatttttctggaaaatataggagctttaatcaaaacataatagttctttttgtaattccatgttaataaaaacaaatactagcaattgcttgaattttaatgaatatttaaaagttcaagagccacggaaatcacttccagagataagagttccctttctaaatagaacacatttttaaaaaataagttatgtttgctactaaaacatttacactgttagactattatgtgcatgttgccaagactcttaagtaacttggatatcaactgtgaagggcctacctctaaaaagtaacaggtcatacaaatacaaatgtaactgtaaaaattccactggattcttgcatatttgcaagattagattattcaaaagaaatttcagtgctaaaattaaccagcaacataagttctatgggctttgaaaattgttctcatctttttaaagttgatgcattttcaatcctgcttacacaggctgttcatttggataagtaaataaaatgtctaaggtgaacttggcattatgtggagatgttggaccgttatagagcaatacaaattcctatgctgtcattctgttttctgcaaatgcaaacgtgcttatatggtcaacagtgcaaaaatagggtagttggctgcatatttagggtattacctaagcatttgttctctaacgttgctctactagaatgatttttttcttgcatcttttcacattaatgatgttctttatataactttcatgcgattatttagttttttaaattaataaagtgaatttaagaaatattgaaataaacatctaagtaattgccattttaaacccttgtttcttactgtgggagagggggaaatacagcactcatttcttgtttttaatttgcagaagtaagtgaaaatctatgtaaaatcaaaccaaaagagttggactgagtgtgtattgtcttgagattaagtgacaaatagtaaagtgttactgagtaattaagcccatgtattttttttttgtgagttgaaaatctttgaaatatgtgataaccgaatgtcaaaagttcctaaactctaacagtgcaggttgttcactgtaacgaggtaactcatatttgctggttacataaactacaagtactgctctcacaatatgggactttgaactgtgatgtagttcaacagttgccggcatcctctcagctgatacgctgcgaatattttgggttagacttgcagccagatgcagttttgcaacccaagaaaaaagttgaacctatgatcaaaaactgctcccaagatgaacctggaaaaaaatcagctaagctcccttggcgatctgcaggaacactagtaatgactggaattactccgtgatctttgatgactattacacataacagcactctagcaccttttcttactggcatggacttcctcatggactgctacttcatggatgatagcttcattgctttgggtagggatttaaggtagtcaaggggaaaatacgcagttttattacaggtcttaacatcaggcaactttcaactttaaaaccctttgtgaaaaatgtggttatagcactatagctctgattttaggatggttaaatgttatattcattgttggcttaccttatcaaactgtgccattaatcctttcacagacataggtaaggaagagaacaaccagtggattcaggggacaattatctatctccaaataataggcttttatttcttgcagctaactttttcagtgattctagcagatgccatctagtacatccttgatcttgtttctttcgtgagagatctcgccatggcagcatcttgttaagtaagtgtaattgcacatgcacaaaagacttaactagctttacatttagcagtcagttggttagattaggtttcatagtaaatgaataggaatagaaagaataggaagtgtttttattttccagtagtaattccgtggattccatttgacccagtttactatcagttcagttcaggtagatttggttcaacttttggtggtttttggctctaggatattcttgactttaatatcctagaacttactgagtcttcccttcaataaatacacttctcacatacctctaatcctatgcttccttgaaacaataatgctagctgagttgtttactaaggattattataagggcctgaaggtgtgggagtggagattaattaaaacctttatgttctccaatataagggaaaagcaggttggtactacttctgattaggcagaaaacaccaggattccttaagtgatccttgaaatggttattgttttctgccttgtcacatttgccactgtgccctttaaaacgatgtggaaacctcaggtttgtggacagcacaggtggaatgacatcttgtgcttcctgaggctcccctctaccaggcacattagcttagtgcttcagatgtcagcccaagtccttgttacctccttttcctgctgcccagggaagagtgtgtgtgctggagctggagcgcttgcactcttcaggtgactattctcacctccatttcctccacatgcattaggtgaaactgaggtctaagcctcctgcaaggtctacattttaaggactcacacatcaggctctcagaaatgtacacaggtattagttctgtttgttctaaaggaaatgtgggtatctctcaggccaggacttagtgactagttttcgctagacagcaggttaatacctagatctcatttaaaaaaaaaaaaaaaaaaacaggattaaagggaactgatcaggtttgttgagttttttagcctaattccaaagcatggaagagtgctctaggtaggaaagaaagctttttcttacgatttgtagctacctactgtgcctgacttggtgcctgtgtgaggattaagcccttagtctgctcttgcaattattcaaatgacaaattaaatttgcttttgtaataacaataaaagttgtcatcttcccgtcagtcgtctcccattatgtaacagaacacagacacaaacgagcagcaacagagcaacaacacacgagaacgacaaagacaacaaaacagcgggggacggcacacgaacgaagaagaaaacacacccccagagagggggcccaccaccacggccccggagcggcacgccaacccggacgagagcgacgtacagcaggagggggccaccccaagactgagggcgccacgcatcccatctaaagccacgccgcgagcgagcccggccacgaagtccaccacaaaaacaagcgcggaaaacgggcgagacaaacacgcgtcaccagcccggcggcatcacctctggtggcggcaagggagcacaacctcacacacccgcgagcggggcgacgcacaccaagcggacacaaccacacctcccaccgaagcgctcaacgcgccctccaccgggcgacccacacacacaaacctcactaggacggttacacagggcgacaacgacactcagcggtcaacatcccacgcgtcgagtcgacaggcgtacaggggcaataactcgtcgaccaactctcacccacagaan

SEQ ID NO: 20130 - DNA, 1171 bp, Homo sapiens
  misc_feature 1, 2, 3, 4, 5, 6, 1170, 1171: n = A,T,C or G
nnnnnnccgttgtcccttcgcgccccaaaccacatcctggagcgcactctccagcgtggctggcagcggggacggtgcgccggggcgcaggcccaagagtcgcgtgcgcggccccttgcaccatccccccgggcccacccccgggccgcgctgattgggcaggtagggactctgcccagcggaaagttttgggtgccgggaggaagtctaacctttgggagactccaagacagcagctccgaggtcggcgggggtctgggtggccatggaggagccccctgtgcgagaagaggaagaggaggagggagaggaggacgaggagagggacgaggttgggcccgagggggcgctgggcaagagccccttccagctgaccgccgaggacgtgtatgacatctcctacctgttgggccgcgagcttatggccctgggcagcgacccccgggtgacgcagctgcagttcaaagtcgtccgcgtcctggagatgctggaggcgctggtgaatgagggcagcctggcgctggaggagctgaagatggagagggaccacctcaggaaggaggtggaggggctgcggagacagagccctccggccagcggggaggtgaacctgggcccaaacaaaatggtggttgacctgacagatcccaaccgaccccgcttcactctgcaggagctaagggatgtgctgcaggaacgcaacaaactcaagtcgcagctcctggtggtgcaggaagagctgcagtgctacaagagtggcctgattccaccaagagaaggcccaggaggaagaagagaaaaagatgctgtggttactagtgccaaaaatgctggcaggaacaaggaggagaagacaatcataaaaaagctgttcttttttcgatcggggaaacagacctagatccaaggccacaagtaaggctatggctctgattctagaagacaaccttccaagatgcctggcaaaaccacctccctgtgccacacagacacactaggcctggtatttatttccccttcaacagatgaggagggggagacgaggtctcgggattacttccccggtgagaatagaacctgagattgctggccaggacgatccgaacaggttgggggggtcttctgccggaccggccgtgggcgttcttgccgacgttgtcgaacggttcnn

SEQ ID NO: 20131 - DNA, 431 bp, Homo sapiens
atttaaccatgtttttaaaagaaagtctacaaagttcctcagtcatatgtcttcctcgcacactcaaatcttgatgatattccaagaaacattgaaaatttaattctcttctcaaaataggatgtgctgccacacgacacatgaacacttcatgcatagcaactgtcttcttgaatattgccaaatattcagcttccagttcctgtttcatctttgtgaattcttccttagtcattgacccttctccttcaccaagcttctgtagtttttcccttgaagcatcaaaaatcaggtcttggtggtgctggtggaatgatataacctgcatagttttcagttgttcggcaacatgaggaatttatctggcttcatgattcgtttgttgaaaatgaagactatgctggtggaatgatataacctgccggacgcgt

SEQ ID NO: 20132 - DNA, 2987 bp, Homo sapiens
  misc_feature 1, 2, 3, 4, 5, 6, 7, 8, 9, 2972, 2973, 2974, 2975, 2976,2977, 2978, 2979, 2980, 2981, 2982, 2983, 2984, 2985, 2986,2987: n = A,T,C or G
nnnnnnnnnccccagctgacagagggcgtggggggttaaggcattaacccctcccagcctcttcctgaataaaccacccagccttggcgcggcgctgggtgacttcgcgtagcaggcagggaactggccgcggcgagcgggactggccattggagtgctccgctgcggagggaggggaccccgactcgagtaagtttgcgagagcactacgcagtcagtcgggggcagcagcaagatgcgaagcgagccgtacagatcccgggctctccgaacgcaacttcgccctgcttgagcgaggctgcggtttccgaggccctctccagccaaggaaaagctacacaaaaagcctggatcactcatcgaaccacccctgaagccagtgaaggctctctcgcctcgccctctagcgttcgtctggagtagcgccaccccggcttcctggggacacagggttggcaccatggggcccaccagcgtcccgctggtcaaggcccaccgcagctcggtctctgactacgtcaactatgatatcatcgtccggcattacaactacacgggaaagctgaatatcagcgcggacaaggagaacagcattaaactgacctcggtggtgttcattctcatctgctgctttatcatcctggagaacatctttgtcttgctgaccatttggaaaaccaagaaattccaccgacccatgtactattttattggcaatctggccctctcagacctgttggcaggagtagcctacacagctaacctgctcttgtctggggccaccacctacaagctcactcccgcccagtggtttctgcgggaagggagtatgtttgtggccctgtcagcctccgtgttcagtctcctcgccatcgccattgagcgctatatcacaatgctgaaaatgaaactccacaacgggagcaataacttccgcctcttcctgctaatcagcgcctgctgggtcatctccctcatcctgggtggcctgcctatcatgggctggaactgcatcagtgcgctgtccagctgctccaccgtgctgccgctctaccacaagcactatatcctcttctgcaccacggtcttcactctgcttctgctctccatcgtcattctgtactgcagaatctactccttggtcaggactcggagccgccgcctgacgttccgcaagaacatttccaaggccagccgcagctctgagaagtcgctggcgctgctcaagaccgtaattatcgtcctgagcgtcttcatcgcctgctgggcaccgctcttcatcctgctcctgctggatgtgggctgcaaggtgaagacctgtgacatcctcttcagagcggagtacttcctggtgttagctgtgctcaactccggcaccaaccccatcatttacactctgaccaacaaggagatgcgtcgggccttcatccggatcatgtcctgctgcaagtgcccgagcggagactctgctggcaaattcaagcgacccatcatcgccggcatggaattcagccgcagcaaatcggacaattcctcccacccccagaaagacgaaggggacaacccagagaccattatgtcttctggaaacgtcaactcttcttcctagaactggaagctgtccacccaccggaagcgctctttacttggtcgctggccaccccagtgtttggaaaaaaatctctgggcttcgactgctgccagggaggagctgctgcaagccagagggaggaagggggagaatacgaacagcctggtggtgtcgggtgttggtgggtagagttagttcctgtgaacaatgcactgggaagggtggagatcaggtcccggcctggaatatattttctacccccctggagctttgattttgcactgagccaaaggtctagcattgtcaagctcctaaagggttcatttggcccctcctcaaagactaatgtccccatgtgaaagcgtctctttgtctggagctttgaggagatgttttccttcactttagtttcaaacccaagtgagtgtgtgcacttctgcttctttagggatgccctgtacatcccacaccccaccctcccttcccttcatacccctcctcaacgttcttttactttatactttaactacctgagagttatcagagctggggttgtggaatgatcgatcatctatagcaaataggctatgttgagtacgtaggctgtgggaagatgaagatggtttggaggtgtaaaacaatgtccttcgctgaggccaaagtttccatgtaagcgggatccgttttttggaatttggttgaagtcactttgatttctttaaaaaacatcttttcaatgaaatgtgttaccatttcatatccattgaagccgaaatctgcataaggaagcccactttatctaaatgatattagccaggatccttggtgtcctaggagaaacagacaagcaaaacaaagtgaaaaccgaatggattaacttttgcaaaccaagggagatttcttagcaaatgagtctaacaaatatgacatctgtctttggcacttttgttgatgtttatttcagaatgttgtgtgattcatttcaagcaacaacatggttgtattttgttgtgttaaaagtacttttcttgatttttgaatgtatttgtttcagcagaagtcattttatggatttttctaacccgtgttaacttttctagaatccaccctcttgtgcccttaagcattactttaactggtagggaacgccagaacttttcagtccagctattcattagatagtaattgaagatatgtataaatattacaaagaataaaaatatattactgtctctttagtatggttttcagtgcaattaaaccgagagatgtcttgtttttttaaaaagaatagtatttaataggtttctgacttttgtggatcattttgcacatagctttatcaacttttaaacattaataaactgatttttttaaagannnnnnnnnnnnnnnn

SEQ ID NO: 20133 - DNA, 2786 bp, Homo sapiens
  misc_feature 1, 2, 3: n = A,T,C or G
nnngtctgggaattgcagccgcggggcgggcggcggcggcggcggcggcggccgggacccagcgggccaggtggggacggcgcggagcgggtgcgggagatgccgtgcgggactggggccacctgagccgcccgcctcgtccccgccttctgtgggaaggatgtgcgcgcggatggccggtcgcacaagagcggcccctcgggggccctacggcccctggctctgcctcctggtggccctcgccctggacgtcgtgagagtggactgtggccaggctcccctggaccctgtctacctgcatgtgacagccgcccgcccagcccagcccacactctggactgccaagctagaccgcttcaagggctccaggcaccacaccaccctcatcacctgccaccgtgctgggctcacagagccagattccagcagtccccttgaactgtctgagttcctatgggtggactttgtggtggagaatagcactggtgggggcgtagcggtcactcgccccgtcacgtggcagctggagtacccaggccaggcccctgaagcagagaaggacaaaatggtgtgggaaatcctggtgtctgagcgggacatcagagcccttatcccactggccaaggctgaggagctggtgaatacagcaccactgactggagtgccccagcatgtccccgtgcgccttgtcactgtggacggcgggggggccttggtggaggtgacagagcatgtcggctgcgagtctgccaacacacaggtcctgcaggtgtctgaggcctgtgatgccgtgttcgtggctggcaaggagagccggggcgcccggggggtgcgagtggacttctggtggcgccggctccgcgcctcgctgcggctgaccgtgtgggcccccctgctaccgctgcgtatcgagctcaccgacaccaccctcgagcaggtccgcggctggagggtacctggccctgctgaagggcctgcggaacccgctgcagaggcgtcggatgaggccgagcggcgcgcccgtggctgccacctgcagtaccagcgggccggtgtgcgcttcctcgcccccttcgcggcccacccgctggacggcggccgccgcctcacgcacctgcttggccccgactggctgctagacgtgtcccacctcgtggcgccacacgcccgcgtgctggactcgcgtgtagcctctctggagggtggccgtgtcgtggtgggccgggagcccggtgtcacctccattgaggtgcgttccccactgtctgactccatcctgggggagcaggcgctggctgtgacggacgacaaggtctcagtgctggagctgagggtgcagccagtgatgggcatctcgctgaccttgagccggggcactgcccaccccggggaggtcacagctacgtgctgggcacagtcagcccttcccgccccaaagcaggaggtggccctctccctatggctgtccttctctgatcacactgtggccccagctgagctctacgaccgccgtgacctgggactgtccgtctcagccgaggagcctggtgccatcctgccagctgaggagcagggtgcccagctcggggtggtggtgagtggggcaggcgccgaggggctgccgctgcatgtggctctgcacccgcccgagccctgccgccggggccgcaccgtgtgcctctggcctctggcaccgcctggctggggctgccccctgcctccactccagcccctgctctcccatccagccctgcttggagcccaccagccacagaagccaccatgggtggtaaacggcaggtggcaggcagtgtcgggggcaacacaggtgtgaggggcaagtttgagcgggcagaggaggaggccaggaaggaggagaccgaagccagggaggaggaggaggaagaggaggaggagatggtccctgcccctcagcatgtcactgagctagagctgggcatgtacgccctgctgggagtcttctgcgtggccatcttcatcttcttggtcaatggtgtggtcttcgtcctgcgctatcagcgcaaagaacctcccgacagtgccactgaccccacctccccccagccccacaactgggtctggctgggcactgaccaggaggaactgagccgccagctggaccggcagtcccctggcccgcccaagggggaggggagctgcccctgtgagagtgggggaggaggggaggcccctaccctggcccctggccctcctgggggcaccaccagctcctcaagcaccctggcccgaaaggaggctggggggcggcggaagcgagtagagtttgtgacatttgcgccagcccctccagcccagtcacctgaggagcctgtaggggcccctgctgtgcagtccatccttgtggcaggcgaggaggacatccgctgggtgtgtgaggacatggggctgaaggaccctgaggagcttcgcaactacatggagaggatccggggcagctcctgaccctccacagccacctggtcagccaccagctggggcaacgagggtggaggtcccactgagcctctcgcctgcccccgccactcgtctggtgcttgttgatccaagtcccctgcctggtcccccacaaggactcccatccaggccccctctgccctgccccttgtcatggaccatggtcgtgaggaagggctcatgccccttatttatgggaaccatttcattctaacagaataaaccgagaaggaaaccagaaaaaaaaaaaaaaaaaaaagagacgaaaaaaaaaaaaaaaaaacggacgc

SEQ ID NO: 20134 - DNA, 504 bp, Homo sapiens
  misc_feature 504: n = A,T,C or G
ttcccgtattgtttatgtcctcaatctgttcagccctttttgctaattcacgctgtattttcctcttttctaacatatcctgctcaattctgcgttttcgttcctcctccgttctcttcctttgttcctcttgtctttgtttctccatttcagcaaatctacccttcgcagttcctgttaattttggaacataagccttttctactttagaagatacatcttcctcatcatcagaagcaagcatttctttaatctcagccttttgggaaatatcattcatgtttgctctatgtggtcttgggctgattatgaagctctgtatatatttgcaccctgcaggagccggtgaccggcgaaggtacttctttccgcgtggagggactgtgcgcgtcccgcctggctgtgggtaggggtctgggagctctggccgctaacacttctgctccagccgctgggagtcctctggctgccgctgccgccgccgccgccgccgtcatcccggan

SEQ ID NO: 20135 - DNA, 1281 bp, Homo sapiens
cacgcgtccgataacccgccgctcgcagggctgctccacagccgcgcgacgccgccgccttagaacgcctttccagtactgctagcagcagcccgaccacgcgttaccgcacgctcgcgcctttcccttgacacggcggacgccggaggattggggcggcaatttgtcttttccttttttattaaaattatttttcctgcctgttgttggatttggggaaattttttgtttgttttttatgatttgtatttgactgagagaaacccactgaagacgtctgcgtgagaatagagaccaccgaggccgactcgcgggccgctgcacccaccgccaaggacaaaaggagcccagcgctactagctgcacccgattcctcccagtgcttagcatgaagaaggccgaaatgggacgattcagtatttccccggatgaagacagcagcagctacagttccaacagcgacttcaactactcctaccccaccaagcaagctgctctgaaaagccattatgcagatgtagatcctgaaaaccagaactttttacttgaatcgaatttggggaagaagaagtatgaaacagaatttcatccaggtactacttcctttggaatgtcagtatttaatctgagcaatgcgattgtgggcagtggaatccttgggctttcttatgccatggctaatactggaattgctctttttataattctcttgacatttgtgtcaatattttccctgtattctgttcatctccttttgaagactgccaatgaaggagggtctttattatatgaacaattgggatataaggcatttggattagttggaaagcttgcagcatctggatcaattacaatgcagaacattggagctatgtcaagctacctcttcatagtgaaatatgagttgcctttggtgatccaggcattaacgaacattgaagataaaactggattgtggtatctgaacgggaactatttggttctgttggtgtcattggtggtcattcttcctttgtcgctgtttagaaatttaggatatttgggatataccagtggcctttccttgttgtgtatggtgttctttctgattgtggtcatttgcaagaaatttcaggttccgtgtcctgtggaagctgctttgataattaacgaaacaataaacaccaccttaacacagccaacagctcttgtacctgctttgtcacataacgtgactgaaaatgactcttgcagacctcactattttattttcaactcacagactgtctatgctgtgccaat

SEQ ID NO: 20136 - DNA, 3070 bp, Homo sapiens
cgcgtccgctctatcgcgcaggcgcactgaacctcagccgcgccgggaggcgagcccgttggcgaggggcggggcagatggcgagggagcggggcgagctgctttttgaggctgcgcactcgcatggccccacctcgcaggtccacttccggcgccgcggctgttccggggcggagaccgcttgtgctggagtcggagttgtaacgctccactgactgatagagcgaccggccgaccatggcgcccggagtggcccgcgggccgacgccgtactggaggttgcgcctcggtggcgccgcgctgctcctgctgctcatcccggtggccgccgcgcaggagcctcccggagctgcttgttctcagaacacaaacaaaacctgtgaagagtgcctgaagaacgtctcctgtctttggtgcaacactaacaaggcttgtctggactacccagttacaagcgtcttgccaccggcttccctttgtaaattgagctctgcacgctggggagtttgttgggtgaactttgaggcgctgatcatcaccatgtcggtagtcgggggaaccctcctcctgggcattgccatctgctgctgctgctgctgctgctgcaggaggaagaggagccggaagccggacaggagtgaggagaaggccatgcgtgagcgggaggagaggcggatacggcaggaggaacggagagcagagatgaagacaagacatgatgaaatcagaaaaaaatatggcctgtttaaagaagaaaacccgtatgctagatttgaaaacaactaaagcgctccagcacatcagtcccgacgcttcctgtgaggtgcacactccgcagcccagcccagccgggagaccacgtggccattgcggtctcctgaccttggccagtgaacctgccagccttccaggacaggcggccggagagctgcccctgaaggacagtcctctcgtcttgcagactggtgaccttctattccctgttcatctctgtttctagatttagtcacttgaaataagaaatctttggggtttgggcttttttatactcttctcagtttgtgaaacgctaactgcacacgaagccgcctgacggcacccagcgctgtggctgtcattctcccagggcagaaccctgcgtttctctctgtccactaacaagcttcacacgcaacacagggaagtcggtttgacttttgtcatgaggagaactgaccagccctcatcattccccataaaaccacggacagcgtctgtgtgcgcatcttgagtcttcacacctgttgactcacacggcttttgctgatgacacggggctccagtacacagtctgataaggacttaacgtcctaacctcaattgtattaaatagcattggggaatagctaaacctttttaaaaaaatttattggattttcctccctgcttaaaagatttcaccagaaaaccttcatataaaaattcaggccctttttggacaatttttaaaatttgtatctttactagaacatgagaatctttttcccttggaagcttgaattataaatgtggtgtttggcctgcctcagcagcaccagttgactgctcgtgtgccagcggtgtggggaggacggggcaggacgctgcagctctctccagccctgttggcatcctcagtgcctgcaggcctctcgctgcctgttgggctgtctggggggtggccatttagggatcgtggggacggggtccaccccaagaagaaagaaaggcccgtccacaggcccggctctgggccacgtgccccggaagcaggtgtgtccagagtcagctgagggctctccccacaccacccagcaggcgctggtgctccttctgcctcatgggaccagtccagcttccagccgctctggctcgagggtggtctgaccacttccttctgagtgggcttctctgggagctctccagtggcactgctggacctgcccacgtttctgtaaaatcaggatacgtggctttagtaagcagaccaagcgcttcgtggcagggaaagcagcgtgcggggaagtcactgaaaagtgctgcctaaggaagtttggaaatagtccctgttccagattgccttgaattttaaaacattttgctttgggaaagtaggtcagcagcacctaagatcaaggatgcgttccattttcacacttcacagtcatgaaaactgagaagactgtcttcagcgtgaactaaagttcacaggcagatcactgatccagaacacttcaagaactcgtcaaacagctcgataagcctttttgactgtgtacatctgtaccgggaataacattcctaggctgaaatttccacaaagaatagaacctgtacccagttcttcaggctgatttccctgacctcttgggcatttgtatttgtagtaaagtattgcagagattcctaagtattttatagcagccatcaaaattggactttgtattgtttattcataaaagacacttggtaatagacttcagtgaactctgtatgaatgcagtagtgtgcgtgcaaaatccgcttcctgagcgtagggtgctgagctggcgctagggctcggttgtgaaatacagcgtagtcagcccttgcgctcagtgtagaaacccacgtctgtaaggtcggtcttcgtccatctgcttttttctgaaatacactaagagcagccacaaaactgtaacctcaaggaaaccataaagcttggagtgccttaatttttaaccagtttccaataaaacggtttactaaaaaaaaaaaaaaaaaaaaaaaaaaaaaaaaaaaaaaaagggggggggggcaaaaattttaccccgcggaggggcccaagataagcggcgtcacccgagtttttctgtgtacaaagggggcgccctatagggagagcaggaattaaaaagacaaagccagggggccgcggtaaaaccacgtgcgtggggggaacacggctacagtggggactctgggcaagagacctcaatgcgggcgcggcactcaagcgccacctactcacgagtgagatcaggaattcacttcaggttaggaacacggtagc

SEQ ID NO: 20137 - DNA, 4689 bp, Homo sapiens
  misc_feature 1, 4688, 4689: n = A,T,C or G
natagggagtcgacccacgcgtccggcgagatggcggccgagcagggccggtggcggcggcggctgcggctacggccggagacggcagtgttggcggtagtggtgggtggcaggggcctgtgaccgggagctgcccccggacccgggcaccatgagccaaggcccccccacaggggagagcagcgagcccgaagcaaaagtcctccacactaagcggctttaccgggctgtggtggaggctgtgcatcgacttgacctcatcctttgcaacaaaactgcttatcaagaagtattcaaaccagaaaacattagcctgaggaacaagctgcgtgagctctgcgtcaagcttatgttcctgcacccagtggactatgggagaaaggctgaggagctgctgtggagaaaggtatactatgaagttatccagcttatcaagactaacaaaaagcacatccacagccggagcactttggaatgtgcctacaggacgcacctggttgctggtattggcttctaccagcatctccttctctatatccagtcccactaccagctggaactgcagtgctgcatcgactggacccatgtcactgaccccctcataggatgcaagaagccagtgtctgcctcagggaaggagatggattgggcacagatggcatgtcaccgatgtctggtgtatctgggggatttgtcccgatatcagaatgaattagctggcgtagataccgagctgctagccgagagattttactaccaagccctgtcagtagctcctcagattggaatgcccttcaatcagctgggcaccctggcaggcagcaagtactataatgtggaagccatgtattgctacctgcgctgcatccagtcagaagtgtcctttgagggagcctatgggaacctcaagcggctgtatgacaaggcagccaaaatgtaccaccaactgaagaagtgtgagactcggaaactgtctcctggcaaaaagcgatgtaaagacattaaaaggttgctagtgaactttatgtatctgcaaagcctcctacagcccaaaagcagctccgtggactcagagctgacctcactttgccagtcagtcctggaggacttcaacctctgcctcttctacctgccctcctcacccaacctcagcctggccagtgaggatgaggaggagtatgagagtggatatgctttcctcccggaccttctcatctttcaaatggtcatcatctgccttatgtgtgtgcacagcttggagagagcaggatccaagcagtacagtgcagccattgccttcaccctggccctcttttcccacctcgtcaatcatgtcaacatacggctgcaggctgagctggaagagggcgagaatcccgtcccggcattccagagtgatggcacagatgaaccagagtccaaggaacctgtggagaaagaggaggagccagatcctgagcctcctcctgtaacaccccaagtgggtgagggcagaaagagccgtaagttctctcgcctctcctgtctccgccgtcgccgccacccacccaaagttggtgatgacagtgacctgagtgaaggctttgaatcggactcaagccatgactcagcccgggccagtgagggctcagacagtggctctgacaagagtcttgaaggtgggggaacggcctttgatgctgaaacagactcggaaatgaatagccaggagtcccgatcagacttggaagatatggaggaagaggaggggacacggtcaccaaccctggagccccctcggggcagatcagaggctcccgattccctcaatggcccactgggccccagtgaggctagcattgccagcaatctacaagccatgtccacccagatgttccagactaagcgctgcttccgactggcccccacctttagcaacctgctcctccagcccaccaccaaccctcatacctcggccagccacaggccttgcgtcaatggggatgtagacaagccttcagagccagcctctgaggagggctctgagtcggaggggagtgagtccagtggacgctcctgtcggaatgagcgcagcatccaggagaagcttcaggtcctgatggccgaaggtctgcttcctgctgtgaaagtcttcctggactggcttcggaccaaccccgacctcatcatcgtgtgtgcgcagagctctcaaagtctgtggaaccgcctgtctgtgttgctgaatctgttgcctgctgctggtgaactccaggagtctggcctggccttgtgtcctgaggtccaagatcttcttgaaggttgtgaactgcctgacctcccctctagccttctgctcccagaggacatggctcttcgtaacctgcccccgctccgagctgcccacagacgctttaactttgacacggatcggcccctgctcagcaccttagaggagtcagtggtgcgcatctgctgcatccgcagctttggtcatttcatcgcccgcctgcaaggcagcatcctgcagttcaacccagaggttggcatcttcgtcagcattgcccagtctgagcaggagagcctgctgcagcaggcccaggcacagttccgaatggcacaggaggaagctcgtcggaacaggctcatgagagacatggctcagctacgacttcagctcgaagtgtctcagctggagggcagcctgcagcagcccaaggcccagtcagccatgtctccctacctcgtccctgacacccaggccctctgccaccatctccctgtcatccgccaactggccaccagtggccgcttcattgtcatcatcccaaggacagtgatcgatggcctggatttgctgaagaaggaacacccaggggcccgggatgggattcggtacctggaggcagagtttaaaaaaggaaacaggtacattcgctgccagaaagaggtgggaaagagctttgagcggcataagctgaagaggcaggatgcagatgcctggactctctataagatcctagacagctgcaaacagctgactctggcccagggggcaggtgaggaggatccgagtggcatggtgaccatcatcacaggccttccactggacaaccccagcgtgctttcaggccccatgcaggcagccctgcaggccgctgcccacgccagtgtggacatcaagaatgttctggacttctacaagcagtggaaggaaattggttgatactgacccccaggccctgcagtggggctgactccagatctctcctgccctccctggcagccaggaccagcacctgtagtcaccccaccacacgcagactcatgcacgcacacaggagggaggcctagctgctcagaggctgcagggagggcccaggagccggctgggagggtggggtccctttgttgccaagacgttaggaaagcgaggaaagtgcttggattaggagagtcttgtgggcccctggccagccttcctgcctcagctcccctgctgtctccaggggcaggtggtaggcatgggtacctgcatttcactggagtgggttcttggatctctgaggggaaggaacagcaaaagaggcccttcttcctcacccaagatgcagggtggttggggccaggagtttggaccctctaggtcttgggggaagagctgggtaatacctggtgtctgagtgattctctgcagacccttcccctcctcaaggatcacccatcctcctttcagccccctttatggggaccaggcagctctggagccagccacaggggctgttagagaagcaaggcctggagtggcctgcaccgagtagcagggtcagggttcgtgtgctcctcctcctgctgcaggggctgcacatcccattgccccacttctgctttgtgtctccctctgtctagcttccagggcagggagcaggccccacctagggctgcaggcagtctggcctgtgccagcacggtctcctgtgcccaccagccccacaggtgctgtgctttgtgctcttggctgctgtgctgggacagaatgggatgccaggaagagaagaaagggggtgcagtctgaggccaccaccccccttcctatctaagggagggctgaagaccaggggccggcattcagtgggcagcagaaaggagaggcccttgaagctgctcagtcagaggcccccgtcacctgcccgtggccttccgcaggactgaagacctgaaggggctggcttttggagtgttgaggtgatatctgggagcacagatcatgaatagctcagggcagtgaatgaggcaccaagagcaggatgagtgtggaaggctggcaacaggaaggcctcaggtctccgccacaaggcgggacgatagccaggccaagggcccggaagagggcacgcacgagaccaaccaagaaacacaagtaccaaagggcgctagcgcgcactcgaaccgcgacacacctaaaatggaggcgggacaccctgggtcgaggaaggtgcccgaagcacgagagaggggagaacggaacaagagcggtaaggagccaagcgagaacaacaaaacaacagaagacagcgggcgaagagcgcacatgcgagcagcaggaggaggagagcggaacgagacagacggaagaagaggagcaggccgacgacagcagacgacgcaagcagcaagcaagcactacaacccagagcagcacgaggcagagnn

SEQ ID NO: 20138 - DNA, 3761 bp, Homo sapiens
  misc_feature 1, 2, 3761: n = A,T,C or G
nncatccggagcggagctgcagcagcgccgccttttgtgctgcggccgcggagcccccgagggcccagtgttcaccatcataccaggggccagaggcgatggcttgcctccatgagacccgaacaccctctccttcctttgggggctttgtgtctaccctaagtgaggcatccatgcgcaagctggacccagacacttctgactgcactcccgagaaggacctgacgcctacccatgtcctgcagctacatgagcaggatgcagggggcccagggggagcagctgggtcacctgagagtcgggcatccagagttcgagctgacgaggtgcgactgcagtgccagagtggcagtggcttccttgagggcctctttggctgcctgcgccctgtctggaccatgattggcaaagcctactccactgagcacaagcagcagcaggaagacctttgggaggtcccctttgaggaaatcctggacctgcagtgggtgggctcaggggcccagggtgctgtcttcctggggcgcttccacggggaggaggtggctgtgaagaaggtgcgagacctcaaagaaaccgacatcaagcacttgcgaaagctgaagcaccccaacatcatcactttcaagggtgtgtgcacccaggctccctgctactgcatcctcatggagttctgcgcccagggccagctgtatgaggtactgcgggctggccgccctgtcaccccctccttactggttgactggtccatgggcatcgctggtggcatgaactacctgcacctgcacaagattatccacagggatctcaagtcacccaacatgctaatcacctacgacgatgtggtgaagatctcagattttggcacttccaaggagctgagtgacaagagcaccaagatgtcctttgcagggacagtagcctggatggcccctgaggtgatccgcaatgaacctgtgtctgagaaggtcgacatctggtcctttggcgtggtgctatgggaactgctgactggtgagatcccctacaaagacgtagattcctcagccattatctggggtgtgggaagcaacagtctccatctgcccgtgccctccagttgcccagatggtttcaagatcctgcttcgccagtgctggaatagcaaaccacgaaatcgcccatcattccgacagatcctgctgcatctggacattgcctcagctgatgtactctccacaccccaggagacttactttaagtcccaggcagagtggcgggaagaagtaaaactgcactttgaaaagattaagtcagaagggacctgtctgcaccgcctagaagaggaactggtgatgaggaggagggaggagctcagacacgccctggacatcagggagcactatgaaaggaagctggagagagccaacaacctgtatatggaacttaatgccctcatgttgcagctggaactcaaggagagggagctgctcaggcgagagcaagctttagagcggaggtgcccaggcctgctgaagccacacccttcccggggcctcctgcatggaaacacaatggagaagcttatcaagaagaggaatgtgccacagaagctgtcaccccatagcaaaaggccagatatcctcaagacggagtctttgctccctaaactagatgcagccctgagtggggtggggcttcctgggtgtcctaagggccccccctcaccaggacggagtcgccgtggcaagacccgtcaccgcaaggccagcgccaaggggagctgtggggacctgcctgggcttcgtacagctgtgccaccccatgaacctggaggaccaggaagcccagggggcctaggagggggaccctcagcctgggaggcctgccctcccgccctccgtgggcttcatcatgacctcctgctccgcaaaatgtcttcatcgtccccagacctgctgtcagcagcactagggtcccggggccggggggccacaggcggagctggggatcctggctcaccacctccggcccggggtgacaccccaccaagtgagggctcagcccctggctccaccagcccagattcacctgggggagccaaaggggaaccacctcctccagtagggcctggtgaaggtgtggggcttctgggaactggaagggaagggacctcaggccggggaggaagccgggctgggtcccagcacttgaccccagctgcactgctgtacagggctgccgtcacccgaagtcagaaacgtggcatctcatcggaagaggaggaaggagaggtagacagtgaagtagagctgacatcaagccagaggtggcctcagagcctgaacatgcgccagtcactatctaccttcagctcagagaatccatcagatggggaggaaggcacagctagtgaaccttcccccagtggcacacctgaagttggcagcaccaacactgatgagcggccagatgagcggtctgatgacatgtgctcccagggctcagaaatcccactggacccacctccttcagaggtcatccctggccctgaacccagctccctgcccattccacaccaggaacttctcagagagcggggccctcccaattctgaggactcagactgtgacagcactgaattggacaactccaacagcgttgatgccttgcggcccccagcttccctccctccatgaaagccactcgtattccttgtacatagagaaatatttatataaattatatatatatacatatatatatatatatgcgccacataatcaacagaaagatggggctgtcccagccgtaagtcaggctcgagggagactgatcccctgaccaattcacctgataaactctagggacactggcagctgtggaaatgaatgaggcacagccgtagagctgtggctaagggcaagccccttcctgccccaccccattccttatattcagcaagcaacaaggcaatagaaaagccagggttgtctttatattctttatccccaaataatagggggtggggggaggggcggtgggaggggcaggagagaaaaccacttagactgcacttttctgttccgtttactctgtttacacattttgcacttgggaggagggaggctaaggctgggtcctcccctctgaggtttctcaggtggcaatgtaactcatttttttgtcccaccatttatcttctctgcccaagccctgtcttaaggcccagggggaggttaggagactgatagcatgtgatggctcaggctgaagaaccggggtgctgtttaagtccctgcttttatcctggtgcctgattggggtggggactgtcctactgtaacccctgtgaaaaaccttgaaatataacactccatgcaggcccagctgttgagggttttcttgatgaatgaatggggtaccatacatggttaagataaagccttgggctccggactttatctgaggtgtctggagaagttctcctgcccctccacttttttgcatctactctcactaaatgagtataatgtcaagccccaactttctaaaattataggaataaatggtagcagatacatccttctaacttgttatggaggactataaatgaagttactaaaaacaatagactgaaatttttagtttaaaatatgcaagcctgaacaaggggaccaacattcccaagaaactggaacccagtcagacatatgatcaactgcttaatgtgtatgccatgtatgtcatgtgtcattcctttcggacgcgtgggtcgactn

SEQ ID NO: 20139 - DNA, 2186 bp, Homo sapiens
  misc_feature 1, 2161, 2185, 2186: n = A,T,C or G
ncgtccgggccgtccgcgtccgtttaagagttgcatattttactttatttttattaaattaaaagctacagtctggcagcgattccagaacagggtaaggaggttcctcacaggggtcagagaagagcggagaaagacagactgacggagactgagacacaggagagaaaggacaaggttaagggagaactgtatctgatgaacacacacagccggctccatggcgggtgacggggagctcacatcagcccaatttctcctccccggcacccgaagttcagcggtggagcagtatgtgggggcggttaggaatcaagagaccctcccttccccaccctaggtcctttctcggcttggtcgtggagcacagcacataccagaaaaagccaagggcaatggaggggcagggaaaccgggagtatatgtacacggggaggggagaacagagccttggaggtcggcctctgccagaagggagtggctcacactgcattgaaacacttggccagtgggggatgggggaagggattgccccctccctctcggaactcccttcccagtcagacaggtcccctacaggtgtggtgtggggggcagggggcagagaggagaaagaggcttctgctgggtcctagtagaggcagacagcaggggccttggcaaaggcgatgtccttcagtcatctgtgatacccttcgctctcagctcctcttgcacccgggtcaggtaggtggggtctgggtacccaaacagctggggtccccctgtgcagctggtcttgtggtggatgtcgttccaggtgatgacattcggtctccctgtggtcatggacgtgccgatagtgaaggtgagacgctggtcaaacgccttgcggaacagggtcagcaccttgttgccctcagggcagtccgggaggtaggccacccgtgtggtgccaggataccgaactcctgggtttgggtgttcagccccctggacaccgggcgggaagacgtactggatgacaatggtgccgtacttctcatagctgggcagtaggagggtggcgtccttagagaccagcatccgcccattctggggctggttgcccaccagctgcccatagaagcggccgcacatggggcaggcctttttcacctgcagagcccgggtgatgcagccctcgcagaatgaatgccggcacttctccaatgtcttggcattctggatctcccccagacagatggggcaggtgctctcctgctcttctgcctcctcccgaaggcgaggaggaagaggtgggggcagggggggaggaggaggggggagcccccgagctcctgggggcagaagtggggctgctcggagagggggtgggcctgcgcggtgcatctcagggtgctcccctccaccccccagagccaggcagcccatcagctccccctgcctctgagctttcttcagctctttctctgcctcttttagcagccccttgagagccttccgggctaggtagagcccatttggaggggccgggggaggaccctgtggggaaagctggagaacatagatgtcagaagtctcgccatctatgaggatggacacacggtgctcctcccgaagccgggccagccgggctggggtctctttgctcaggaagtcccacacgggcttggacacagtcactttgttcttgcaggtgcctccacaggctgccattctggacaggacgaacgacatttgatcctgaagagcttagaattggcatgcaggctcactcttctttccctgctccctacttgtaggtcgtgtgacctggaaagcccatggaagatgatggcagcagaaatccttctatttccactcagctgaccaggacttttaaacccagcacaggcagtgctgtctgtcagctcccaagtctggcatttagggaggggcggggctcacacaagggctcagctggaggggcctgatgttttccctgagtctggtcgcattgggctacggggctgtctccacaacacttccaaatgcagctctcgtcagcgccgccattgccgcccacatgactgaggctgttgctgggatgacggtccgggccttagcaacaaggaccgggagaccccgaaaggtgggggattgcagtgggtgcaggctgagtaaaagggaaggaggaggnacagcaccccctttcccctcacann

SEQ ID NO: 20140 - DNA, 938 bp, Homo sapiens
  misc_feature 16, 922, 923, 924, 925, 926, 927, 928, 929, 930, 931, 932,933, 934, 935, 936, 937, 938: n = A,T,C or G
ggcgaatgtttgtganctttcactaccaccacctcccccgagcatggtccccccagttttcaatatgaaccatcctgtgggtaccctgtcacaggctggccctgaggtgagcaatatttggactgtgatgttggttgttctccactctttctacaggacagaacagggcctctagagtgggaaatggctttgggaaatatgccaagcagtagccttgttcttcaacttgcccaagaggataattctccacacccttcctgtactcagtcctcagtttgcctggtgagagagcagcctcctcccgtgtgctctgccagctggacccagactggccatattaccagtgagaccaaaaagatggaggtggggaggtagctctgaggtctgggaaaccattccagctcctgccagttttaacttgtgtttaattcctggcacagttgtcctggaaatgcctttttctcttgcctgggaaccactagaaggggatgttgtctgtgttggccagggccatgcaaattcaacatcttgtttctgcccttcccccgtgtagctgaggctaggtgttggcattacccagtgcttgttcttcagagagcaaaagcactgctcgtcatgtctgaaatttagtgagtgagctcacccactaggctggtgtttcctgcccgtggctgcacattggaagcaccggggcactttgagaactacagatgcctgggtcccagagcatctaaggtgctctagggtgtgtccaggacacagccctggttgaggaccactgctatattgtatggcctcttttaaaaaagttaattttacttggaaatgatttcaaagctacagaaaagttgcaagaataaaaactgtacaaatgaggctcaaatatcctttgcccagatacacctattaacatttcgtcccnnnnnnnnnnnnnnnnn

SEQ ID NO: 20141 - DNA, 3249 bp, Homo sapiens
cgtccgcagatgctcttctctgctcctcccctgtccccgcgcggcgaatggttcgcgccggcctatatttacccgagatcttcctcccggacggcaaggatgtgaggcaggcgagccggacgccgctcgcagcaccggagagggcgcactgcaaaggcgggcagcagaccgtggagagcccgggagcggagctggacaccgcctcggagggaagaaatgaggtagcggcggttcccggacccggccatgcccgtcccctgttctcggagcccagcgccgtctcggccaggccagcccggacactgagcgggccgagcgcgagtccccggcgtccggcggagcgaagatgcagtgagtccccgcgggactgctgcgcggggcccgccgcggccagccggacccagcatccgaccgcactttgggcgagctgctgacttgagaccagcccaaacggggggctttccatctccagcacccctcggaggtggggagcaccggcccctaggcacactcgctgtagagtttccgcgggttttggccccagtcctgagggttgtgtgtgttaggggacccacctcacgttcgccgaggagttcctgcatattcttgcaccatcccgggtgctgttgctggggctctctttatttgcacgcgcgcttctagcttttttcctgacattttccactctacgctcgttctttctcccttgcattttgttgcttgcctgagactctttgctctcgcccttgcccaggctggggtaattctgtgtgcgcgcgtgtctcccccgcaccaaccttttttgcacactcgaagctgaatattttcttttttagagaatttacccgcacctcctgcggggttcctaagcactctctctgctcccctccccccaactccctaccacagggccgctcccagtagttttattcttcgatcttgcccgggccgagcctggcaggggccggtggctcagcgggcctcgcacccggcgctccgccgccgccgccgcccagctgcgccggggcgccctccggagatgctgccgtggaagaagcacaagttcgagctgctggccgaggcgccgccgcggcaggcgtccaagcccaagggctacgctgtgagcctgcactactcggcgctcagctcgctggcgcgggcgtgccccgaaggcgcgcttagccgggtgggcagcatgttccgctccaagcgcaagaagctgcacatcactagcgaggacccaacttacaccgtgctctacctgggcaatgccaccaccatccaggcgcgcggcgacggctgcaccgaccttgctgtgggcaagatctggagcaagagcgaggcgggccgtcagggcaccaagatgaagctgacggtgagtgcgcagggtatccgcatggtgcacgccgaggagcgcgcgctgcgccgcccgggccacctctacctgctgcaccgcgtcacctactgcgtggccgacgcgcggctgcccaaggtcttcgcctgggtgtaccggcacgagctgaagcacaaggccgtgatgctgcgctgccacgccgtgctggtgtccaagcccgaaaaggcgcaggccatggccctgctgctctaccagacgtcggccaacgcgctggcggaatttaaacgcctcaagcggcgggacgacgcgcgtcaccagcagcaggagctggtgggcgcacacaccatcccgctagtgccgctgcgcaagctgctcctacacggaccctgctgctataaaccgccggtggagcgcagccgcagcgcgcccaagcttggctccatcaccgaggacctgctcggcgaacagctggagcaggagctgcaggaggaagaggaagaggagcaacccgagggctgcccggaggaggaggagaaccgtgcggcagagggagatccagcagaggaggaggccgaggcgcagcgtgcgctagtggtcgccatgcactttgagtgcggggacttgttggatactctggagaatggccgtggggaggcgctaggaggcggcgggggctccctgggcccgggggccgggccgccgcctctgctgctgggcagcgcctccgacatgaaggctgagctgtcgcaacttattagcgacctgggcgagctcagcttcggcaacgacgtgcgcaccctgcaggccgacttgcgggtgacgcgcctgctgtcaggcgacagcacgggcagcgagagctccatcgagggcgggggccctgacgccacctccgccaccgccggggactcgtcccgccaggccgacggcgccagtgcagacgagccccactcgggctgagctcctccgcgcgtcgccggcgctccaccgtggctacccatccgtggtcccgacaacctccctgtcccttgcccgcccccaggaagggggaaatggggcatttggggcccagacctacacttggagcccaggtccagcgttcccccgaccgctttcccctacctcccggcccccgctcccgccccagcacttttggctctgttgcgcgtggggatgcggggagatttgagaggggaaaaccccgccaggagggagagagaggcacccctctgggatgcgggtgagggaaggttggctgaagttcctagtctcaggccgtaggtgcctggccagtttcctgtttgtggggcagctggggcctgaggaggaggggttcacttcctcctcccaccccctgggagcggccctgcgctgtcactgacatctcattaaaaaaaaaaaaaaaaatttgctctcaaggtgtttgaggctttaatgcaaccctttagcccttggttctttttggtgcaagaattctggctgtttacctcagactcagacccctgaaatgttgccaaattcttcaaataactgtttggggggtggggggagatgaaagagagtcgcgttttgtttacagttaaagacatccaatatcttaaaaaggagttttcctttagaaacacacacacccttcctcttgctcaaaagatctcactccatgatactgtgtaaaatatttttgcactgttgtgaagtatttttgacttttttctgtacataactgtgttctcagagctgaatgtttatatcttttgctgtgcaaaagaaacatgtaaaatgttgttcagttgtatatacagaaatgtgtataaaacattttgttattttttaaaagtagcactgttctggttctgtttgcacgccagtggggagagaataaagaggaaaatttaaca

SEQ ID NO: 20142 - DNA, 2484 bp, Homo sapiens
  misc_feature 1, 2, 2484: n = A,T,C or G
nnctctcgccggcccgccccgaaccgccccgcgctgggaatttgcggcggcctccgccggggcagccgagctgaaccggtctcttcctcggaaaggcagggccgaggggcctgcggggcagccatggaggcgacgcggaggcggcagcacctgggagcgacgggcggcccaggcgcgcagctgggcgcctccttcctgcaggccaggcatggctctgtgagcgctgatgaggctgcccgcacggctcccttccacctcgacctctggttctacttcacactgcagaactgggttctggactttgggcgtcccattgccatgctggtattccctctcgagtggtttccactcaacaagcccagtgttggggactacttccacatggcctacaacgtcatcacgccctttctcttgctcaagctcatcgagcggtccccccgcaccctgccacgctccatcacgtacgtgagcatcatcatcttcatcatgggtgccagcatccacctggtgggtgactctgtcaaccaccgcctgctcttcagtggctaccagcaccacctgtctgtccgtgagaaccccatcatcaagaatctcaagccggagacgctgatcgactcctttgagctgctctactattatgatgagtacctgggtcactgcatgtggtacatccccttcttcctcatcctcttcatgtacttcagcggctgctttactgcctctaaagctgagagcttgattccagggcctgccctgctcctggtggcacccagtggcctgtactactggtacctggtcaccgagggccagatcttcatcctcttcatcttcaccttcttcgccatgctggccctcgtcctgcaccagaagcgcaagcgcctcttcctggacagcaacggcctcttcctcttctcctccttcgcactgaccctcttgcttgtggcgctctgggtcgcctggctgtggaatgaccctgttctcaggaagaagtacccgggtgtcatctacgtccctgagccctgggctttctacacccttcacgtcagcagtcggcactgagtccctggcaccaggctctggcgctctgctgggtgggagggtgggccatggagggcatctgaatacaggagtagggggggtgtgggtgtgtaaccagagaccgagagcatgagtggggtgtgcctcgtgtgcgtggattcgtgtgtgtgtgtgtgtcttgtatatgtgtgcgcagagtgcatcattttcagactctactatttccgtcaagtttctgtttgatttggatcatctcaggatcggattctgttttagagtgtttctgggccaggatccgggcccctgccctcctctgcacctgaccacactccctactcagggctagtctgttcttcccggacatcttctggtagccgtgcaggagagggctgggtggggcagaggccaggaggggacctggtgtgtcacctgcccaccacctggctcatccctcaggcccaccctgaccctacattacataggttacgtcagcctactgtggctgttgagcaaagcatttctcctttctgggcctcatttgcactagatgggcctgtggtcccaaagtaggtcagtaggttggggttgctgacaccccttgggtgcagctttgggacagatgagtggctctgtcctgtcactgccctctccctgcctgggggctatgtgcactccagacccctgcccaggctcaggcccatgaggtatggagacaccctggcccccaggagctggaggcaccgcccactcccctggcattccagctttgcaggtgaccctcctctacccaaagctctgtccccctgctcccactccagaagaactgcggcacgcgcttcgggcagcctagccacaggctttgagcgcctgcattcctgggggctggagggtggggtgccaaaggccctgagcaaaagccagagctcctctcatcaaagcctttacaaggtgctgggcccagaggctttgccttgacagagtggcccagggtttcaagggaggaggaacctccccctacctaggacccttcctgtggggggtctacagagtcagggacagaagggaagggacccacaggaagtcacagtggtgcccagggatgtgtcagcccccagccacggggacgcgggattcaagaatgaagtaaatacagtcacagccccaaaaaaaaaaaaaaaaaaagacaacacaatgagcctaaacaaacacaaggggggggggggcaaaaaaccccggggcgcagtcaggcgcccctttttgacaggggcccacagagggtctaaagagacgggcgggggcaaacggggaggacagcgctgcgactcgcggccctccgggggctacggacaccggaaagcccgataattgtgagccactcgcgggtagtcgtataatcgcggccgccgagcgcaggagcgtcatgagacccgccggcgagggccaccn

SEQ ID NO: 20143 - DNA, 2756 bp, Homo sapiens
  misc_feature 1, 2, 3, 2753, 2754, 2755, 2756: n = A,T,C or G
nnnggtccgactcggtccactagtaacggccgccgtgtgctggaatccgcgaccgcgccagccgcgaatcggatctctatggagatggcctaggcgatatccctgagctgagagcatcaccctgtccccgaatccttctttcctctctgttttgtttttcattcccctccctctctcccctccccctccagtccacgacgactggctgttgaccctgttcaggcctcggtgaaggcttttggttactccccttcccaccccatcccttaattttattcttttgaagagtgcatttcaagctgccaaggtggagagagggattacagaaaggagaacaccttatttcagcttttatttttatgtgataatctacctttaagaaaaggtgtaccatacctgagagcaccaggaagtcgcatgagagatcacctgatacatgaacgtatgatgttccatctgcgcattgatgaataggcagcatttacaaattaactgatgtgttgctgtatatcatctctttgatgattgctcctcttctttgtatcctgtcttataatttcaacacatttgcgatactcaatgtctattctaaattaaccatgttttgtaccacaaactcattgcccatggatctgttgctgaaacaaggaagtcttaaacaagaagtggaatctttctgttatcagattgtgtctgaatcaaatgatcagaaggttggaatattacaaagtgaagataagcagttgcaaccttcagtttctaaaaaatcagaaggtgagctttccagggtcaaatttatatccaattccaacaaaataacatttagtaaaaaaccaaaaagaagaaaatatgatgaaagttatttgtcttttggatttacttacttcggaaatagagatgcacctcatgctcagtgtgtattatgtaagaaaattttatcaaatagctctttagcccctagtaagcttcgaagacatttggaaactaaacatgctgcatataaagacaaagacataagctttttcaagcaacatctcgattcacctgaaaataataaacccccaacacctaaaattgtgaatacagataatgaaagtgctacagaagcatcatacaatgtaagttaccatatagcgctgagtggagaggctcatactattggagaattgcttatcaaaccttgtgcaaaagatgtagtgatgcggatgtttgatgaacaatatagtaaaaaaatagatgcagtacagctatcaaacagtactgttgcacgtcgaattaaggatctagctgctgacattgaagaagagcttgtttgtagactgaaaatttgcgatgggttttcactgcaactagatgaatcagctgatgtttcaggacttgctgtgctgcttgtgtttgttcgttataggtttaataagtctattgaggaagacctactcctgtgtgaatctttgcaaagtaatgctaccggtgaagaaatattcaactgtatcaacagttttatgcagaaacatgaaattgaatgggaaaaatgtgttgatgtttgtagtgatgcttctagggcagtggatgggaaaattgccgaagctgtcaccttaataaaatatgtggctcccgaaagcaccagtagtcactgcctattatacagacatgcactggcagttaaaataatgcctacatctctaaaaaatgtgctagaccaggcagtacaaatcatcaattatattaaagctcgaccacatcaatccagactattaaaaattttatgtgaggaaatgggtgctcagcacacagcacttcttctaaatacagaggtgaggtggctttctcgaggtaaagttcttgtaagactttttgaacttcgtcgtgaacttttggttttcatggattctgcttttcgactatctgattgtttaacaaattcatcttggctgctaagacttgcatatcttgcagatatttttactaaattaaatgaagttaatttgtcaatgcaaggaaaaaatgtgaccgtttttacagtatttgataaaatgtcgtcattgttaagaaaattggaattttgggcctcatctgtagaagaagaaaactttgattgttttcctacactcagtgattttttgactgaaattaattctacagttgataaagatatttgcagtgccattgtgcagcacctaaggggtttgcgcgctactctgttaaaatactttcctgtaacaaatgacaataatgcttgggttagaaatccatttacagttactgttaaaccagcttcattagtagcacgggactatgagagcctgattgatttaacatctgattctcaagtgaagcaaaattttagtgaactttcactaaatgatttttggagtagcctaattcaggaatacccaagcattgcaaggcgtgcagtgcgtgtacttcttccttttgctacaatgcacctgtgtgaaacggggttttcatattacgctgcaacaaaaacaaaatataggaaaagacttgatgctgcacctcatatgcgaatccgacttagcaatattacacctaatattaagcggatatgtgataaaaagacacaaaaacactgttctcattaaaattggaggagtttgcatgtctcatgataaccaaatgtaagatgaaaataaaagatgatttacttcatctctggtatttgggggatttaaataaaatgattccatttttttatactatttagattttaagaaggctaaagaatcaaacgnnnn

SEQ ID NO: 20144 - DNA, 4097 bp, Homo sapiens
cttgggtcatcgatgagcctcgccctgtgcctggtcccgcttgtgagggaaggacattagaaaatgaattgatgtgttccttaaaggatgggcaggaaaacagatcctgttgtggatatttatttgaacgggattacagatttgaaatgaagtcacaaagtgagcattaccaatgagaggaaaacagacgagaaaatcttgatggcttcacaagacatgcaacaaacaaaatggaatactgtgatgacatgaggcagccaagctggggaggagataaccacggggcaaagggtcaggattctggccctgctgcctaaactgtgcgttcatatcaagcggccgcccggctcttgggaaccaagaatgcatcttgtcttgttcttgcagcccggcatgccagtgcttcctccacgaatttgaaagacatattggctgacctgatacctaaggagcaggccagaattaagactttcaggcagcaacatggcaagacggtggtgggccaaatcactgtggacatgatgtatggtggcatgagaggcatgaagggattggtctatgaaacatcagttcttgatcctgatgagggcatccgtttccgaggctttagtatccctgaatgccagaaactgctacccaaggctaagggtggggaagaacccctgcctgagggcttattttggctgctggtaactggacatatcccaacagaggaacaggtatcttggctctcaaaagagtgggcaaagagggcagctctgccttcccatgtggtcaccatgctggacaactttcccaccaatctacaccccatgtctcagctcagtgcagctgttacagccctcaacagtgaaagtaactttgcccgagcatatgcacagggtatcagccgaaccaagtactgggagttgatttatgaagactctatggatctaatcgcaaagctaccttgtgttgcagcaaagatctaccgaaatctctacagagaaggcagcggtattggggccattgactctaacctggactggtctcacaatttcaccaacatgttaggctatactgatcatcagttcactgagctcacgcgcctgtacctcaccatccacagtgaccatgagggtggcaatgtaagtgcccataccagccatttggtgggcagtgccctttccgacccttacctgtcctttgcagcagccatgaacgggctggcagggcctctccatggactggcaaatcaggaagtgcttgtctggctaacacagctgcagaaggaagttggcaaagatgtgtcagatgagaagttacgagactacatctggaacacactcaactcaggacgggttgttccaggctatggccatgcagtactaaggaagactgatccgcgatatacctgtcagcgagagtttgctctgaaacacctgcctaatgaccccatgtttaagttggttgctcagctgtacaagattgtgcccaatgtcctcttagagcagggtaaagccaagaatccttggcccaatgtagatgctcacagtggggtgctgctccagtattatggcatgacggagatgaattactacacggtcctgtttggggtgtcacgagcattgggtgtactggcacagctcatctggagccgagccttaggcttccctctagaaaggcccaagtccatgagcacagagggtctgatgaagtttgtggactctaagtcagggtaaaactggagactgggtgaaagtgactaccagaaagtgaggaagcctaaataaaaagtatacttttgtttcagggggcctttaaagtcttaagattaaattatatctgaggcactgataatatgtttgaggttaaaatataatttaagtctttaaaagatgaccatcatacgcatggtcctggaggatgaccaggactaatgcatgtggtatgagtaggtttggccccctcactttctctagagtgagggggccaaatcagctcccttcccctgcctggtatgagttgcccatcatacgcatggtcctggaggatgaccaggactaatgcatgtggtatgagtaggtttggccccctcactatctctagagtgagaatctggctcctgtttccatgggtcaaagccggttgcagagaatctgtagtcactttggagctttagcttctctgccaagccctcaataagccagcaaaccaggactctgccccttctgtttccataggaatcatgttggatagtcagctgtaccaagccccttggccctctcccatgcacacaaacacctcctagcaagacctgttggttagctggacatgctttggcaattttttttatactaccaagtgaccataaaggcatggcatttgttgtgactggcacccaatgtttgattttttttttaaaactatccaattaaaattaaggtctgggagtgttctgtttcccattactttaatactcacctcctcccagactttctacacctgttgcacctcaggcagaggatgttctggacctccccctcttggtccctactagagacctctcaacagatctgtgggcccagtcattgggttttatcagtgcttaatgtgaactaagttttttacttccacagaatacaagccactaccttctgacctccccaccccccaccaacccccatcttttaatatgctgtggggcatagaactccggaatgaccagcatgatattttcagagtcttgtccccggggtattagcacctctttttgaacagggaattgattcaagattggacatggtctcctctgattatcaggtactggggctgagggcattaaaaatagtaagcctccctcctcgtcccctgcctcaagaaattgcctccttatttatcaacatctttttcctccctttccctgagagctcacagtacaatgtttcagaagccccatttgcacaggttttcagcaactcagaatgctctacttctttttctttgagaaaggattaagatacactcctgctgtgcccccatctttcctccaaactcctgcctgtgtttgtgtggatacccagtcccagaaccacactgttgagttggacacactgtaaacccctgggtaactgtcaagtcatgatggagacttcaggttgttctgtataaaatgcaaaataaatgtttttattaacaatgaaaaaaaaaaaaaaaaaaaaaaaaaaaaaaaaaaaaaaaaaaaaaaaaaaagggagggggcgcgccgcgcccacaagagatcccccccgagggggcgcccccacaccgcgcgcccccccgcacttgggagcccaagggggcgccccctaagggggcactccttatttatatcaccgccacgcggaccgcgcgcgcgagcgccgcgggtttaaaccaagcagctgaaagagggagagaacaaccgcggcaccccgctgagaggaacaacctctctggacaagaggagaccctatcactctcggaggggggggcacaacaaataggcgggacaaacccacacctaaaagaaatatatacaacaaccaccacaaaggggacaaatataacaacacttctccagcgggcagtcaaacgaggtgtgaatcaaaaccaaacccggcacaaactcccacgcacagctcaacaacaaacatctcagcgcacaaccacgagagcacacacagctcactcagcaaaccacatattatcaaccccggggggcgggcccagcaacgaacaaacaacgagccaagggcaacatacacacacggcacacacgccaaccccgcgacaccgccaccacaacaagccgccacccacccaccccagcgtctgagcgtggagcgtagggacggggcgggtgaaggagagagagacggcgacacgccggggggcgcccgcctagcataatacggccgccaccgaccaaaagcaaccagacagaacagggcaacgaacagacaaatgagaccgagacaagacacacaaagacacacagccagaagccagggagaagacgggcgtacggagcggaggagcgccaaggaacagcaggccagacacaaatgcggaagaacaacgggagcctgaaaacacac

SEQ ID NO: 20145 - DNA, 3005 bp, Homo sapiens
  misc_feature 1, 2, 3, 4, 3005: n = A,T,C or G
nnnnaagttttacaatactgtagatgacattctcctctgtgccccaactgaggaagtttcttgagacggcactgaggctctccttaatttcctagctggaaagggatataaggcttcaaaatctaaggctcagctctatcgtcttgtcagaagggaacaagagcactaggcgaggagaggattaatcccatttcctcccttcctctccccagaaccctcaagcagctgagggatgcttgggcattacaggtttttgtaggttatagatacccaggtatgataaaataggttgccctttatatcaccttataaaagaaattcaagtggctaaaactcacttcctgacctgggaacctgaaggtcaaaaggccattaatcagttaaaacaagccttgcttaaagcaccagcccccagtctttctgtagggaagtcctttaatctttatgtatcataaaggaaaggaatgaccctgggagttttaattcaagttcaaggcccagctcaacagccagtaggttacttaagtagagagcttgacttggaggctaaaggatggccagcttgcctctgagcagttacagtagtggccctgctagtcccagaggccaccaagttaaccctggggaataacctgtttatgcctcacataaataatgtggcaggcttgctgtcctctaaagcgagtctctggctaacagacagctgcctcctcaagtatcagactttgctgctagaggaatctgcagtccagttaaaaacctgaccttgcctgatcccagacactttcctcccagaggaaactggagaaactgaacataattgtgaacagactgtagtacaacctatgccgctagggaggatctcaaagaaattcccctagaaaatccagactggacccactttatggatgggagctcttttgtaggacagggagtctgaaaagtgggatatgcagtagtcaccctaaataacattgaaaatgtgcctctctcaccaggcacacacactcaatcagttgagctgatccctctcacaagagcacttgaactaagcaaaggaaagacagctaacatttatactgactccaagtgtacctttctagttctccttgcccatgctgccatctgaaaggaaaggcacttcctcaccgctaatgggtcttgcattaaataccatcaagacatcaacaggctattatcctcagtgttcctcccatgagaattagtggtcagacattgcagagggcatcagaagcgggtagatgaaatagcgaaaggaaacaggctagcagaccaaagagctaagtcagcagtaagaaggccccaaggtcccaaaacacttgaggcccctctgatttgggagggctacataagggaaataaagcctcagtattcccctacagagatagaatgggccacctctcgaggtatacttttcaaccctcaggatggttacaatcagaagattgcaaagtacgcttgccagcctccagccaatggaagattcttaaaatcctccactgagcctttcacttaggaaagcataagacatcagtgcatccaaagattgttctcaggagaaaatctactaaaaatggtcaaataggttgttaatactcgtgaaaccctcttaaaaataatccctttaacagatgacttcttccccaccacaatcaaaggatgggaagttactcaggggaggactggcagatagacttcacccatatgcccaaaataaatggcattcaatgtcttttggtgtgggtgcataccttcattaactgggtagaggcattcccatgcccaacagaaaaggcctctgaggtggtgagaatactaattagttaaataattcctcactttgggctccctaagtacttccaaaacaacaatggtccctcatttaaagaagcctctacccagtagggccgagtctgctaggactttttattgggtttggtaatacgtcacaccctttagcctctactgtgtcagccatgtcccatttatacaagacaaattgctgggtctgtcctgagcggtttgctcagttcagtaacactaaggaacctcttgatgacttggtatttactgtcttagcattccctttgttagctttacctttagccattaaagacttgtcaggcataaatggaacatggtatgggaacactttcaactgagtaactaactcctcccaggaaagcatttcctccctggtgccagaaaacactttccccaaagataagcctcacaccctcaggctaggaaaagttggccgggtaatagcaaatgcctcctcctgttttaaaagcagaggaaaaggaccatacctgggagatctcaaatattataacaccatacttgtaattgctgaaagctcggaagtttggagaaaaagacataagaaggatgatctaagaaaattggaagccatatggaggggaggctttcagaattcagcgtctcctcctggttgaaagtcctgctgggaatggcaggctctgggtaaccaccctgacacatggcactataatgtaaaaaacaacacataggccttcccagacatgcaccctcatgggattccagaccccctgtatgatgcttagtagtagtggcctacaaatctgtgggtgaacagaacaggagacttctggactgacagcccctgtcacaagggggcattatctgagatattggccagggcatatcgtgtccctggtcttttgaaactccatttgtcggccaggtgtggtggcttacgactgtaatcccagcactttgggaggctgaggcaggtagatgatgaggtcaggagttcaagactagcctggacaatatggtgaaaccccgtctgtactaatattttttgttgttgttgttgttgcgataaggtctcgctgtattgtccaggctggtctcaaactcctgagctcaagctatcctcctgccttgggctcccaaagtgctaggattacaggcatgagccactgtgcctggcctan

SEQ ID NO: 20146 - DNA, 2660 bp, Homo sapiens
gagtcgacccacgcgtccggcagggccaagagcgctgtcaagaagacccacacgcccccctccagcagctgaattcctgcagctcagcagccgccgccagagcaggacgaaccgccaatcgcaaggcacctctgagaacttcaggatgcagatgtctccagccctcacctgcctagtcctgggcctggcccttgtctttggtgaagggtctgctgtgcaccatcccccatcctacgtggcccacctggcctcagacttcggggtgagggtgtttcagcaggtggcgcaggcctccaaggaccgcaacgtggttttctcaccctatggggtggcctcggtgttggccatgctccagctgacaacaggaggagaaacccagcagcagattcaagcagctatgggattcaagattgatgacaagggcatggcccccgccctccggcatctgtacaaggagctcatggggccatggaacaaggatgagatcagcaccacagacgcgatcttcgtccagcgggatctgaagctggtccagggcttcatgccccacttcttcaggctgttccggagcacggtcaagcaagtggacttttcagaggtggagagagccagattcatcatcaatgactgggtgaagacacacacaaaaggtatgatcagcaacttgcttgggaaaggagccgtggaccagctgacacggctggtgctggtgaatgccctctacttcaacggccagtggaagactcccttccccgactccagcacccaccgccgcctcttccacaaatcagacggcagcactgtctctgtgcccatgatggctcagaccaacaagttcaactatactgagttcaccacgcccgatggccattactacgacatcctggaactgccctaccacggggacaccctcagcatgttcattgctgccccttatgaaaaagaggtgcctctctctgccctcaccaacattctgagtgcccagctcatcagccactggaaaggcaacatgaccaggctgccccgcctcctggttctgcccaagttctccctggagactgaagtcgacctcaggaagcccctagagaacctgggaatgaccgacatgttcagacagtttcaggctgacttcacgagtctttcagaccaagagcctctccacgtcgcgcaggcgctgcagaaagtgaagatcgaggtgaacgagagtggcacggtggcctcctcatccacagctgtcatagtctcagcccgcatggcccccgaggagatcatcatggacagacccttcctctttgtggtccggcacaaccccacaggtgagcctggaacccatcacgttccacatcctcccacccattctttctctcaggaactagtcccgacagatgcagacatccctctatccctgagagggctctgggcagggaacccataaccctaccctgcttcctgtcccaagaggaggctaccttctatcacccacagacagtgccgggtccccgctctgtgactcaggcagctgcgactccagacagctcactcatctgcctagatctcagtccttccacccacatccagcctgatgagctgtcccactccttctgcttctcaacccccatggttcttccaccctcaggaacagtccttttcatgggccaagtgatggaaccctgaccctggggaaagacgccttcatctgggacaaaactggagatgcatcgggaaagaagaaactccgaagaaaagaattttagtgttaatgactctttctgaaggaagagaagacatttgccttttgttaaaagatggtaaaccagatctgtctccaagaccttggcctctccttggaggacctttaggtcaaactccctagtctccacctgagaccctgggagagaagtttgaagcacaactcccttaaggtctccaaaccagacggtgacgcctgcgggaccatctggggcacctgcttccacccgtctctctgcccactcgggtctgcagacctggttcccactgaggccctttgcaggacggaactacggggcttacaggagcttttgtgtgcctggtagaaactatttctgttccagtcacattgccatcactcttgtactgcctgccaccgcggtggaggctggtgacaggccaaacgacggtggaagaaacaccctttcatctcagagtccactgtggcactggccaccccttcccagtacaggggtgctgcaggtggcagagtgaatgtcccccatcatgtggcccaactctcctggcctggccatctccttccccagaaacagtgtgcatgggttattttggagtgtaggtgacttgtttactcattgaagcagatttctgcttccttttatttttataggaatagaggaagaaatgtcagatgcgtgcccagctcttcaccccccaatctcttggtggggaggggtgtacgcgggaaactaaattaacttacaatttttctgggttttttttgtttgtttgttttttaaatacagataccgtttaactgaccttgggggattaccaatatcagccataccactaagaatgagataattgcaacgaactgctgggtgatgggaaacaaccaattgtccacaatgtcatgcagtctgcatattatgatgcagtacctgccc

SEQ ID NO: 20147 - DNA, 584 bp, Homo sapiens
  misc_feature 1, 584: n = A,T,C or G
nttcttctgggcactgactgcttgtctggtcgcttcagctgctgccccccagggtcttctgctgctgttgccgccacctccatctgtacccacaggggagttaggatcaggcctccaggtgggagccccaggagcagaggaagaggtggaagagtcctcacctctgcaagagcctccatgccaggcagcaggcaccacccctggtccagaccctaaggcctatcagcttctatcagcccgcagtgcctgcctgctgggcctgttggccgccaccaacgcgctgaccaatggcgtgctgcctgccgtgcagagcttttcctgcttaccctacgggcgtctggcctaccacctggctgtggtgctgggcagtgctgccaatcccctggcctgcttcctggccatgggtgtgctgtgcaggtacacaaggacccccagcccctgtgcgggtggaactcagggctgggagccaggtcctggcgcagtcagccctgacattctgctcgctcactgcaggtccttggcagggctgggcggcctctctctgctgggcgtgttctgtgggggctacctgatggcgctggcan

SEQ ID NO: 20148 - DNA, 1064 bp, Homo sapiens
  misc_feature 1, 1062, 1063, 1064: n = A,T,C or G
nactaggcatggccagagggtgtacttgaggaaattgaaaatgtagaagaccgaccgtttgcgcgtgttgggttgctagtccaggggcccagcagccccatggccagcacaaggcaggctatcttctggccattcccggtgcccgacgcaccgggcaagcagggagagtcaaggcaatcccaggcccgggcagcccctgagtcacggctcagggagcaagggccggctatccacgtgtatccactcaggccgctcacaccacttgaaggctaggctgatggaccaagaaagatccaggcccagtgtaaagagggtccaatagatgagctggtgcctagcatgagggccagtgcagtcaacccatagaagcttagctcccgctccataggcactcggggagtcatcagccagcccaggacagcgccagttattaggccagccagcacctggtgagggaaatgtgctaagatgaagattcgcgacaagccaaccgccaaaaggaaggtgcaataagccaggctaggcatcacccttacccagcggctgcgggcccgagtggccacctgcgaagacagggccgtcattatgggccagagggctgctcctgtgatcatgcagtgtccagaagggctgcctggaccagtctcacaagaagaggggaactggtgaacctgggctggagcctggctgtagtaaccagactcatggacccaccaaaagggcctgtctccaaaaagaaaccacttgaagatgaggttgagccactcggtgatgaggctgatccagagcaccgcgatgcccacacggcgggaggcgtagtaggccgcggggaagtagaacagaaagaggatcttgggatcgcccagaaaggtgatccagagccacacgttctccagccaggctagctggttctgtagcgcctcggctatcacgatgcccgcgcccagcgtggactccatggcggcccagctgccgaccaggccccggcttgctccagggcggaaaccagagtccaggcaacgaagcagctaaccaccccaggcctcgtacctagccttaagnnn

SEQ ID NO: 20149 - DNA, 1970 bp, Homo sapiens
  misc_feature 1, 1967, 1968, 1969, 1970: n = A,T,C or G
natggactatgaacaagtggtacaaaaagcaggctggtaccggtccggaatttcccgggatatcgctatgtttcaagtgcagtaatcgtacttgtctatccagtttctatgtatgatacgagttgcttacacgatgcatggctaacttgttaatttagttttctccttagagactttgagacccttaagagacaagattgagaaagagccatgtggcttggctctagaaacgtcattatcattaggaccatcagattttagattaagctgctattgaattaataaaatcccaatgaagcagagttatagggatagatttatagctggcagagtggtatcaaaggagaaaaacagtgaaaaagccaatttcactggttcgttcaatccagcttgttgctaatattagttacccttgttttaatgacagagagtggctggaatctgtagctaggggaggggcaacactgttagatgtgaggaaaggaagtgccaaaaatgcctggacagatggcttgtcccaaggccaggacacacactttaaaatccaacattcacctaagcaagtaattcttaaagatcttacagaaacgcagagtcaatcaggtttataaaggaaggctgaggggagagaggaggcctgggggcctggacgaagaggcctaggacctgaagagactccagcgagtctcgggaagcccaggggacctgtcaccatctgggcacttcccaggctcaatgctcagccagagtttgctggtggacctcaggattcgaagtgtgcaacagacggagtgcgcttgctgtccagggcccccatcccagccttgacggggcaaagggacacaaacgggcgcaagagcccccgtgacaacaagccacaatgagagtcaggacacacgtacgacggacctccctctggtcgaggaccatagatttttttccacctccagtcccagtcccgccccgcgtaccgctcagcacaagaaccgaacccagcatcacaccacaccctacacgcactgagcacgagcgatcgagacatcgagtactagcacgcgcactccatcagcagcagcaacaacccaactagtgtcgcgatgagcgccaaagcagggacgggcgcaggggtgggggagcaggggagaagggccgcagagccgcgtcgagccagacgccgcagggcaccgacgcgcctcgagaaggacagcggcacgagcggaggagagcagccagtgcgcgacggcggacccaggaggtacggagcaaggaaggcaggcagcgaggagcaagcgggagagagcaggggataagcgggcgcaggacaagtacgacgagagcgacacacagggggagagcagagccgcagcctgagagacgacaccacggcgaaccaggagcggacccggcagccagcagcgcgcagcgggagccaggtgcgaagcacatcagacagcgccagagcagtgcgccggcccgagtcggcatagcaagagtagcggaggacccgacgcatgacgcgccgacggaggagctcaccgcgaaggcagcacacgcgacgacggcgcgtcggcacacacgcacgccacgcacacacacggcaaccagcaaccacgcagccgacacgaacgcgcagcacgacccacaccgacggcagcgggagcgcagcgcggccgccggcacaacggcggcacgccggcaggcacgagaccgggcacgagggcaagacgaggcaacggagagaaaactggggaaagcgagtcgagacgacggagtacaggagctgcgcggagagagagtgaacgcgcacgcccggacgggtgcgcccggcccgcaccgagcggccgagcgcacggacccagcgaagcgggcgatgaacgcacctctgaaccgaatgcaggcctgaacgcagcgcggggcgcgcgcaccagcaacgcgagcacccgccgaagtccaaggctgacggcgannnn

SEQ ID NO: 20150 - DNA, 2721 bp, Homo sapiens
gtcgacccacgcgtccgcgccgcgcgccgcgcaaaaaccagccgaaactacggctagtacgaggctgggtgcagatggcggcggcagttgtggtggcggagggggacagcgactcccggcccggacaggagttgttagtggcctggaacaccgtgagcaccggcctggtgccgccggctgcgctggggctggtgtcttcccggaccagcggtgcagtcccgccaaaggaagaggagctccgggcggcggtggaggttctgaggggccacgggctacactcggtcctggaggagtggttcgtggaggtgctgcagaacgatctgcaggccaacatctcccctgagttctggaatgccatctcccaatgcgagaactctgcggatgagccccagtgccttttgctactccttgacgcttttggcctgctggagagccgcctggatccctacctgcgtagcctagagctgctggagaaatggactcgcctgggcttgctgatgggcactggtgctcaggggctgcgagaagaagtccacactatgttgcgcggagtcttgttctttagcacccccagaaccttccaagagatgatccagcgtctgtatgggtgcttcttgagagtctatatgcagagtaagaggaagggggaagggggcacagacccggaactggaaggggagctggacagccggtatgcccgtcgccggtactaccggctcctgcagagcccgctgtgtgcagggtgcagcagtgacaagcaacagtgctggtgtcgccaggctctggagcagttccatcagctcagccaggtcttacacaggctcagtctgctggagcgggtcagtgccgaggctgtgaccaccaccctgcaccaggtgacccgggagaggatggaggaccgttgccggggcgagtacgagcgctccttcctgcgtgagttccacaagtggatcgagcgggtggtcggctggctcggcaaggtgttcctgcaggacggccccgccaggcccgcatctcccgaggccggcaacaccctgcgccgctggcgctgccacgtgcaaaggttcttctaccgcatctacgccagcctgcgcatcgaggagctcttcagcatcgtccgagacttcccagactcccggccagccatcgaggacctcaagtactgcctggagaggacggaccagaggcagcagctgctcgtgtccctcaaggctgccctggagactcggctcctgcatccaggcgtcaacacgtgtgacatcatcaccctctatatctctgccatcaaggcgctgcgcgtgctggacccttccatggtcatcctggaggtggcctgtgagcctatccgccgctacctgaggacgcgggaggacacagtgcggcagattgtggctgggctgacgggggactcggacgggacaggggacctggctgttgagctgtccaagaccgacccggcgagcctggagacaggccaggacagtgaggatgactcaggcgagccagaggactgggtcccggaccctgtggatgccgatccagggaagtcgagctccaagcggcgttcatcggacatcatcagcctgctggtcagcatctacggcagcaaggacctcttcatcaatgagtaccgctcgctgctggccgaccgcctgctgcaccagttcagcttcagccccgagcgggagatccgcaacgtggagctgctgaagctgcgctttggcgaggccccaatgcacttctgtgaagtcatgctgaaggacatggcggactcccgccgcatcaatgccaacatccgggaggaggatgagaagcggccagcagaggagcagccaccgttcggggtctacgctgtcatcctgtccagtgagttctggccgcccttcaaggacgagaagctggaggtccccgaggatatcagggcagccctggaggcttactgcaagaagtatgagcagctcaaggccatgcggaccctcagttggaagcacaccctgggcctggtgaccatggacgtggagctggccgaccgcacgctgtctgtggcggtcaccccagtacaggcggtgatcttgctgtattttcaggaccaagccagctggaccctggaggaactgagcaaggcggtgaagatgcccgtggcgctgctgcggcggcggatgtccgtgtggctgcagcagggtgtgctgcgtgaggagccccccggcaccttctctgtcattgaggaggagcggcctcaggaccgggacaacatggtgctcattgacagtgacgacgagagcgactccggcatggcctcccaggccgaccagaaggaggaggagctgctgctcttctggacgtacatccaggccatgctgaccaacctggagagcctctcactggatcgtatctacaacatgctccgcatgtttgtggtgactgggcctgcactggccgagattgacctgcaggagctgcagggctacctgcagaagaaggtgcgggaccagcagctcgtctactcggccggcgtctaccgcctgcccaagaactgcagctgacacatcgcccgcccgcccgcccgcccgccaggcgctgccctgcaggtgctctcgtcctcccgtgccagcccccgcccgcccgtgtcccagaatgcactgctgaggagcatgcccacccccacccccgcagtgtgcagattaaagcaagtcagatcatcaaaaaaaaacggacgcgtgg

SEQ ID NO: 20151 - DNA, 1225 bp, Homo sapiens
  misc_feature 1221, 1222, 1223, 1224, 1225: n = A,T,C or G
ctatacaaatttaatttgtgtacatgagagatgaaggaagcaaattatattatagaatatcaattaaaatagaatcaattggaagtcacaagtgattaatacaattaattaacacatatagcactatgtgccaggcgcaatttgaagcactttacataattagctcatttaatattctcaacaaccattataatatgatgataccattttcattcccaatttgcagctgaggcaactaaggcccagatagattaagaaacgcgtccaagttcatacaggtaatgattctagtacatattaatccagatgaatctaattcacaaaatttcaacaatactaataaatattgagaatttagaagcataattccattaggatatgaaaaatcttaatagagaaatttcacttagtaaataatgctatttggactttttaccttgaggataccaaattacatgcataaatgtacaagtttccttagagataaagactagtgcaagtaaagtttaaattttgcccttgacagcaaaagtagatatacttgtgcattaatattgatcagtcattatcaattgaccaggcacaatttggtgaatatgttaatttttccccaacagccatgagcatgcaaatacaggctgagtgtctgaaatgcttgagaccagaactgttttgcatttctgattttcttcagattttggaatatttgtcttatacttacctcttcagcatctctaatctggaaatctgaaatccaaaatgttcttatgagcagttcattcaaatatcatgtaactgctcaaaaagttttggattttggaagatttcagatttcaggttttcaaattagggatattcaatctgtatataaaaaatatgagagccagatacggtggctcacacctgtaatcccagcactttgggaggccgaggtgggtggatcacttgaggtcaggagttcaagaccaacctggccaacatggcaaaatctcatctctactaaaaacacaaaaattagctgggcgtggtggtgcgcgcctgtaatcccagttacccgggaggctgaggcaagagaattgcttgaacctgggaggttggaggttgcagtgagctgagattgggccaccgtactctagcctgggcgacagagtgagactgcgtctcaaactaacaaaccgaaccacgagattattttcccagttttcaattgtgtcggacgcnnnnn

SEQ ID NO: 20152 - DNA, 2185 bp, Homo sapiens
  misc_feature 1, 2180, 2181, 2182, 2183, 2184, 2185: n = A,T,C or G
ncgtccgggatgggctctccagacagctgcgtgcctcagagaagccagcctcgctaacccctcaagcccaggggatgagaccctcctgcatcgcggcgctattttggctggagccacagctccctccaccgcggggcggcgctaaaatgtcctcccccttaagggagcaggcagctcctcccagccacccaccccaccaatgcccatcctcccgcccccctccaccaaccccttctgtccacactgccccctgagttcacggaattcccccagcatcccctagcttgcgtttcctgccagtcgggagggatgaatgcagataaagggagtgcagaaggcacgaggaaaccaaagtgctctgtatcctccagtctccgcgcctccacccagctcaggaacccgcgaaccctctcttgaccactatgagcctcccgtccagccgcgcggcccgtgtcccgggtccttcgggctccttgtgcgcgctgctcgcgctgctgctcctgctgacgccgccggggcccctcgccagcgctggtcctgtctctgctgtgctgacagagctgcgttgcacttgtttacgcgttacgctgagagtaaaccccaaaacgattggtaaactgcaggtgttccccgcaggcccgcagtgctccaaggtggaagtggtagcctccctgaagaacgggaagcaagtttgtctggacccggaagccccttttctaaagaaagtcatccagaaaattttggacagtggaaacaagaaaaactgagtaacaaaaaagaccatgcatcataaaattgcccagtcttcagcggagcagttttctggagatccctggacccagtaagaataagaaggaagggttggtttttttccattttctacatggattccctactttgaagagtgtgggggaaagcctacgcttctccctgaagtttacagctcagctaatgaagtactaatatagtatttccactatttactgttattttacctgataagttattgaaccctttggcaattgaccatattgtgagcaaagaatcactggttattagtctttcaatgaatattgaattgaagataactattgtatttctatcatacattccttaaagtcttaccgaaaaggctgtggatttcgtatggaaataatgttttattagtgtgctgttgagggaggtatcctgttgttcttactcactcttctcataaaataggaaatattttagttctgtttcttggggaatatgttactctttaccctaggatgctatttaagttgtactgtattagaacactgggtgtgtcataccgttatctgtgcagaatatatttccttattcagaatttctaaaaatttaagttctgtaagggctaatatattctcttcctatggttttagacgtttgatgtcttcttagtatggcataatgtcatgatttactcattaaactttgattttgtatgctattttttcactataggatgactataattctggtcactaaatatacactttagatagatgaagaagcccaaaaacagataaattcctgattgctaatttacatagaaatgtattctcttggttttttaaataaaagcaaaattaacaatgatctgtgctctgaaagttttgaaaatatatttgaacaatttgaatataaattcatcatttagtcctcaaaatatatacagcattgctaagattttcagatatctattgtggatcttttaaaggttttgaccattttgttatgaggaattatacatgtatcacattcactatattaaaattgcacttttattttttcctgtgtgtcatgttggtttttggtacttgtattgtcatttggagaaacaataaaagatttctaaaccactgaaaaaaaacaaacacccccccccaaccccacacccccaactcacacccgcacactaccccccaccccaccacagacacgcacgcacacgaaaccagccacgcacagccgcccctagccaatacccctctccagacacaccccgccccaccacacgcacacatacccgccccgaccccactagtacctcaccaccacccaccccccccacgaacacccaccacgcaacccctaccgcccccctcacgaacccgaccgcacccgacacacacccaccccacactcgccactannnnnn

SEQ ID NO: 20153 - DNA, 3342 bp, Homo sapiens
  misc_feature 3341, 3342: n = A,T,C or G
cgcgtccgcgtcagtggccatggcggatacagcgactacagcatcggcggcggcggctagtgccgctagcgcctcgagcgatgcacctcctttccaactgggcaaaccccgcttccagcagacgtccttctatggccgcttcaggcacttcttggatatcatcgaccctcgcacactctttgtcactgagagacgtctcagagaggctgtgcagctgctggaggactataagcatgggaccctgcgcccgggggtcaccaatgaacagctctggagtgcacagaaaatcaagcaggctattctacatccggacaccaatgagaagatcttcatgccatttagaatgtcaggttatattccttttgggacgccaattgtagtcggtcttctcttgcccaaccagacactggcatccactgtcttctggcagtggctgaaccagagccacaatgcctgtgtcaactatgcaaaccgcaatgcgaccaagccttcacctgcatccaagttcatccagggatacctgggagctgtcatcagcgccgtctccattgctgtgggccttaatgtcctggttcagaaagccaacaagttcaccccagccacccgccttctcatccgtagccagtgccaatatctgcaatgtggtcctgatgcggtacggggagctggaggaagggattgatgtcctggacagcgatggcaacctcgtgggctcctccaagatcgcagcccgacacgccctgctggagacggcgctgacgcgagtggtcctgcccatgcccatcctggtgctacccccgatcgtcatgtccatgctggagaagacggctctcctgcaggcacgcccccggctgctcctccctgtgcaaagcctcgtgtgcctggcagccttcggcctggccctgccgctggccatcagcctcttcccgcaaatgtcagagattgaaacatcccaattagagccggagatagcccaggccacgagcagccggacagtggtgtacaacaaggggttgtgagtgtggtcagcggcctggggacggagcactgtgcagccggggagctgaggggcagggccgtagactcacggctgcacctgcagggagcagcacgccaaccccagcagtcctgggccccctgggagagtgctcaacctacagtggagggagactgacccattcacattttaacataggcaagaggagttctaacacatttcgtacaaaaaaataatcaagtgcatttctgggccttatgtggggttgtcaaaactccactcagcacaattatgtgtgaagctgaaaaattgtagagtgcccatggggtagaagtagaatccttttatactttggttccttttttatttttattttttatcagaatcaaatctgagccttagtttcagctgaccagaagtggcaggaggacaggtggaggcgagccagattaggcctggagttgggctggtttggtggccaggctggtaaatttaggatattacaatggccagcccagatggctccctgggctggcatggggaggggagagaaggtggtctgcaccccacaggatgaactagccatgactagggtcctcaggcagtggcccagggaatcagggagcactggaggcctctgcaagattctgtgggcagctggctctgaatgtagccagcccacatccattccagagctgcagaaccagtccctctgagtgaagtccagtgaccctggagctagggtcccccttcgtggagctctaactgattcagggcccctgaagtgaccccagctccaggcaggaaaccccgagaaggaatggtgcttggcaggaaccatggacctgcacttggcctcttcgggaagatcctccttccaggccccaggctggatgctgggttctggggctgagagtggggctagactgggctggctgccttctgcggagcttctccagccaccaaggctgcctgccccatcccatccctttctaagcaggaaggtctcatgcctgagaatgcctaggccagctccttagacacctatcagagaagcagcatcaacctaggagcagtgggccctggctctgtcactaaatggcagtgagacgtcagacaaattcattcccttctctcagcctccactcccagtctgaaaccagaagactggatcaaggggttcccactggctcctccagcaagacctcgtctttgcttgtcctgctcagatgctggtcatcctgggcatgtccccagtgtggactctggactgggaagggggcaggcccctttggacctgcagttggcctcagcagaaggccttgccttgtgtatgtgactccatatcccgggagcagttgacctttgccaaacactttacagttctggaggaggaggtaacatagatgcctgggcctgatggtggggccatacccatgtgtcgcctctcactctggcagcctcagaggccccttgctgctggctcccatctccctcccatttgcagaccaggaaggaagagcaagctgtacaaagggaagcagagcctggggtgggtgtgagcagggtgacccctcatctgaaaggcccaaaccagggggaagcaccagcctcagtgcagccccctcctgaccccacctagaatggaagcctccacctgcagccccaggcctccctcccccggggtctccacctcaggggagacttaggccagaggtgaacattcatgtgtaggaagaggccgctgcagggtggcatcttagggtaggggaagtgtgctgaggtgggccttccatgggcatggccgttgcctctctgccagccgctggtgcccaccagctggctctgcagcacattgccctgaggggcctgccactctcctgaggagcagcccacctgctgcccgtgaggagggggagaagggttagacaagcctggaggacaaaacagcgggagtgtgggggtgccatggtgttggaggggcaggcctttttgagccaatcccaccataatgtgaaatatgccagtgactgctgcgctgtgctggtctctaggctgaactaggtgctggcatgtctggtccgcttgaaaagctcactcagcttacctggtctactatataggcttatctgtgccctttaatctggacaactgggttcacaacccctggtgccgctccaccggaacaccggtcccggccacgtgggccaccgctccacaagggccgcgacacgcgtgaccaacacgaagccacgggcacgacgccagacacgacacaccgggcagaagcccaacgagcggaagaaacacacccaccgcggcggggaataactgcggcgaacann

SEQ ID NO: 20154 - DNA, 1650 bp, Homo sapiens
  misc_feature 1, 2, 3, 4, 5, 6, 7, 8, 9, 10, 1639, 1640, 1641, 1642, 1643,1644, 1645, 1646, 1647, 1648, 1649, 1650: n = A,T,C or G
nnnnnnnnnncggaaaatccaccgtagaacacccccccttggcgcttttttttttttattgtttgttttgttttttctctctaaactaagtggcaccttgccagtagtccacttttaccaggatataggcgttctttatggcactggcaccacgactcttgcatgatacggaccgagatcgaaacccttacgctgacgccagttcggacaacaattctgtgtcccccatgataaactaggagccatttacacactgtaataaacaatgacattaatgtatatgtaaaactttacacctagttaactaagcagtaactggtcatctgatagcacctggatggggtttgctatatttagaactaaactaatactgaatgaaaacaaattggaattttaacagtttcaacactcacctgcatataataaaataaaaaatcaacctggctcacaacatagtctgatgtatgtgttttcaccagtcttctggctgaaacaggcaatttcttttacgcatccgaagaatccaataggggctttatatcagaccaaggacttcgtatttcaccttattttgttttaaagaaatagggataaagagtttgcaagtgcttgtgtacaataactacatcatttcccaccacactgatcattaatcatgtcagtctcaaaggactaacgttttatgtacattttgtattaactgaactcagctaaacagtaaaacctgttttacttaatctctgtcttgactaccagactatcatgatgtttgttggaactgtaattcctgctctccatttctctctgtcccccaagttgaaaatataacccaaatctttagaatttttgcctctcattccttgcaactccagtgggctagaatcttgatccagttttctccagactagatttcaagctactctgcatgatgtagaacatgtaaccatgtaacctcatcagctaccttttcccttttgacttttcctgttgcacacagttcagtctgactatccatgaatcttctttgggagaaagaaaaatggcccaatgtataatgtttctgaatggggaagggagaaaaaaaaaaaaatcactgttctttgtagctctaaccatgaaagtaaaagcaacaaaaatatcccccagtgaatccctagaatcatttaataatgtaaccggtatctctttatcctgcaggtgtacacttaaagcgttctgggaatatgaatcccttctgcaccctggaatcaccagtccagccatgcatggagctggggaaagcaggccctgaattgtctagagagacttggtggaggaggccacggcccgccttgtccctgccgggtcccggccaggtgtgtgtgtgccccagctcgactctcggtggtctccaggctgcagcagaaggaataccttggtatttgtttcattttagtgtccatccttaccctcctggtctggtagagcctatggttattcttggattccacatacatgaaaagcgaagatttttctttgtttttatgcttaagctaacttcagttctgctttcccacaaaactacccccaccctggctcctgtccctggctgtcaatgcctttccaataggaagtcacgagagtgagaaaaaaatttcannnnnnnnnnnn

SEQ ID NO: 20155 - DNA, 1425 bp, Homo sapiens
acccacgcgtccgcggacgcgtgggcggcagcgcggtctctgcggaggcggcgggggcgcggccagccggacctcttcctttccagagcggcccgcggcgcccgttccgcgggaggcgggcgggaggcggacgcggcctaacctcgacgtcgactaccgcgccgcccgcgatgggaagcgccttataaagccgcgcccggccggcccgagccactcgccgccgcgccgccccgctgccccgaacgcgggccatacgcagcctccttggagtgacgggccgaccccggacgaccccggccacggacagacccgggacgaccccggccggggcgcgcctcctgcgggcgggcgggcggcggggctggggagcccttggcgggggcatgcgtgcgacatggcctcggcggtgtttgagggcacgtcgctcgtgaacatgttcgtgcgcggctgctgggtgaacggcatccgcaggctcatcgtcagccggcgcggcgacgaagaggagttcttcgagatccgcacggagtggtcggaccgcagcgtgctctacctgcaccgcagcctggcggacctgggccgcctgtggcagcgcctgcgcgacgcctttcccgaggaccggtccgaactggcgcaggggccgctgcggcaaggactggttgccataaaggaagcccacgacatagagaccaggcttaatgaggtggagaagctgctgaagacgatcataagcatgccctgtaaatattctagatcggaagttgtgctcaccttcttcgaaagatctcctctggatcaggtgttaaaaaatgataatgtgcataaaattcaacccagctttcaaagtccagtcaaaatatcagaaatcatgaggtccaatggattttgtttagcaaataccgaaacaatagttattgaccacagtataccaaatggaagagaccagcacctgggcgtggacccaacagagcatttatttgagaatggcagtgagtttccctcagagctggaggacggggacgacccagcagcctacgtcaccaacctgtcatattaccacctggtccccttcgagacagacatttgggactgaacctctctatcaggcctcccccgcctcagctgttcactgccagctctgatgctgtccactgtgctggcccccatggtcacagctgctgacccagctctggaactcccagacgtcccaggccccactgacgccaggaggcctgggtgtcctgcaagtggagcagcaggggctcctagtgggccaggctgaccgcagagtctccagcaagctgaggtcacagccggaggccacagggcctgtgttctgagggtcttcactccctgcttggtgcccacagggctgcgcactgccagggcagggacagttcctgtggggctcgctctcactgctactgc

SEQ ID NO: 20156 - DNA, 988 bp, Homo sapiens
  misc_feature 1, 2, 988: n = A,T,C or G
nnatatcgcgcgtgttctcgcgtgcttctaaggcccctatcaccctcgggttttgttagcacacaccaggcgatttcacgacggaccgcttgtgtcccttcagggcccttggattcgtcctctgtggcaatataaggcttgtcaccattcgggaaagccatggagagccgcataaacgttgatttccttttcttcgaacagccacctcaaaataaggtccaaatattggttccttcaaatggtgtcaaaaagaatagtattatatgaggaggatagttatcacagaataagaactaaaatcccattttttttttttaggaaaaaaagaccttcgatgatgcaggtgtctgtgtataaggaactatgacctaccaaaaaaaccaccacataaggagaggccaatataatttgccagtctgacaagacagttggtattataagtggaagagacctcaaggatcacataattcagctctttgattttagagggaggaaagacgaggcccagagatgggaagtggcttgcctaagtacattagcaagttagcttcaatggttatttttatacacacacaggcacacatacatactgttgcattgacttctgttttgtacataaaatgctactggctcatacaatacatcaataagtatgcaacttttcatttgttatttcgttgctggaagtgggaaataccccatcttcccaggagtgaaatggttctactttctctccgtggtgccctgtatcattactcagctctgctgctgctctccgcagcccctaaaagtagcatggatcggggaagaaggaaggacggcaggaaggcaggcagagatcctcaactcaaatcacaattggagtgtcttgttgtgtcaaagatgttcccactggcagtgaagactttacatgaagttaagcttgggctgttgaaacttccagacctggctggaaggaggagatgggggatctaggccaacaccaggn

SEQ ID NO: 20157 - DNA, 563 bp, Homo sapiens
  misc_feature 1, 562, 563: n = A,T,C or G
nacgcgtccgctcctgagtagctgggatgacaggcgtgcacctggcagctttttcaaagtgttgatggtaatctgaggcaatctaagggagtcattttttaagtgactttatacagaaagattggtaagagccaaggggtagaagtggcataaatgtctaaagcagggaagtgacaggactttcattgttcttggctgaggagaagcgggagtggctgatggaagcacctaaatgatgcctttgtctgtgggaaggcaaatgatgccccagagctctaaccaaaggttttgcagccgccgaaaaacaggaaagttgggaagcgggggtaggactacactgaatcattaacagtgctgtaaactaccatgtggccattaacaatgacctttagggagttttcctaaacgatcactctggtgcgggtgtttggttttgttttaaaatagctttgcagtgaaagctttcatgaccatacaaattatcttttttcttcctatttccttgtagaggtttttttcctccttgtcttaaggtcataaaaatattgttatgtgggaccann

SEQ ID NO: 20158 - DNA, 1545 bp, Homo sapiens
  misc_feature 1, 2, 3, 4, 5, 6, 7, 8, 9, 10, 11, 12, 13, 14, 15, 16, 17,18, 19, 20, 21, 22, 23, 24, 25, 1544, 1545: n = A,T,C or G
nnnnnnnnnnnnnnnnnnnnnnnnncaaaccctttccacccgtttatccctctctcctatgtgaccccccatggcccccccgcataatttaaactccattctaccaaactaaagaaaataaaaccgaaagagtagtttcaatttcacaattcacagttgattggttttaatcccatgacacgtttgtcattctgcagccccagaacacagacttccaaagcagtgactggcactccgacccaacagcatacacagatcttaagcctctgtatgacatttagagaaaattttaataaacaaccctaattacacacagtttgggctgacattttttagctatatcctttatcaaagatagttctagtgaaatagcaaaagcagttttaaaagtttgccatgccattcaataaagggttctaaagcctcccttggttttacattttattctctaatttaaaacaataactgcattaaaatgcaaccttaatggtgaaagcaaaatcggttttgcttctgaatctagagcatatttccaaggagaagcaacttattgtcccagcagatatatggaatgctttaaagcaggatctgacatactccagtaaggcatttcaaagcagacacatcatacccaaactaaatcattatggtcagtcaaggataccacaggtgaacaccaagtaacgcagagttaacgtgaaattcttacaaatgacacacgatttacaaaaccccagaaaggtactcaggtaccaaaagagggcaaaacaatgaccagccactccaaaagagttttgttcctatacatgccatatttgcagagtagaaacaaactgccctatttgcgctttgccctaggataatatcactcattctgacatgtggagttactcttccttaaaaaaatatatcatgtagagaatacacaaataataataaatgatatagaacatttattattttcactagtgagggggtcacttaagcacttacaaagacttataaatgaatcatgaaggtcatcaaaatgcaaaaacatccaataaatgttgcattattagtattcaacagtgcagcaagatttttagcaactgcgtcgggcttaatttggaactatggccatgagaatatgtttaagttcaaagaactgccagatgtctaaaaaaaaaagtgtaattagtaaaaatatggattttccctccaagggcccaaaggaagtgttcagttactttggaagccatgaattttatcaaacacacacaagaatatgaatctggaacatttcaattctgattcaattctacccattgaatcttcatgacctggagaaagtcacttaaaattctttagattttatctaaagaatcttatccacaaaaagtgggcataaaaataaaggcatatgtaaaaataattttttctaaacatgactacaataaagctaaagatggttactaaggcttacaatttcaacaactcattgtacagtacaatcatttttaattctgctaattatagctggaggaagtgtggataattacaann

SEQ ID NO: 20159 - DNA, 2336 bp, Homo sapiens
  misc_feature 2334, 2335, 2336: n = A,T,C or G
gtcgacccacgcgtccggtttacggcttgcgtacgaggcttggcgagtgagacgctgatgggaggatggacatactggtgtctgagtgctccgcgcggctgctgcagcaggaagaagagattaaatctctgactgctgaaattgaccggttgaaaaactgtggctgtttaggagcttctccaaatttggagcagttacaagaagaaaatttaaaattaaagtatcgactgaatattcttcgaaagagtcttcaggcagaaaggaacaaaccaactaaaaatatgattaacattattagccgcctacaagaggtctttggtcatgcaattaaggctgcatatccagatttggaaaatcctcctctgctagtgacaccaagtcagcaggccaagtttggggactatcagtgtaatagtgctatgggtatttctcagatgctcaaaaccaaggaacagaaagttaatccaagagaaattgctgaaaacattaccaaacacctcccagacaatgaatgtattgaaaaagttgaaattgctggtcctggttttattaatgtccacttaagaaaggattttgtatcagaacaattgaccagtcttctagtgaatggagttcaactacctgctctgggagagaataaaaaggttatagttgacttttcctcccctaatatagctaaagagatgcatgtaggccacctgaggtcaactatcataggagagagtataagccgcctctttgaatttgcagggtatgacgtgctcaggttaaatcatgtaggagactgggggacccagtttggcatgctcatcgctcacctgcaagacaaatttccagattatctaacagtttcacctcctattggggatcttcaggtcttttataaggaatctaagaagaggtttgatactgaggaggaatttaagaagcgagcatatcagtgtgtagttctgctccagggtaaaaacccagatattacaaaagcttggaagcttatctgtgatgtctcccgccaagagttaaataaaatctatgatgcattggacgtctctttaatagagagaggggaatccttctatcaagataggatgaatgatattgtaaaggaatttgaagatagaggatttgtgcaggtggatgatggcagaaagattgtatttgtcccagggtgttccataccattaaccatagtaaaatcagatggaggttatacctatgatacatctgacctggctgctattaaacaaagactatttgaggaaaaagcagatatgattatctatgttgtggacaatggacaatctgtgcacttccagacaatatttgctgctgctcaaatgattggttggtatgaccctaaagtaactcgagtcttccatgctggatttggtgtggtgctaggggaagacaagaaaaagtttaaaacacgttcgggtgaaacagtgcgcctcatggatcttctgggagaaggactaaaacgatccatggacaagttgaaggaaaaagaaagagacaaggtcttaactgcagaggaattgaatgctgctcagacatccgttgcatatggctgcatcaaatatgctgacctttcccataaccggttgaatgactacatcttctcctttgacaaaatgctagatgacagaggaaatacagctgcttacttgttgtatgccttcactagaatcaggtctattgcacgtctggccaatattgatgaagaaatgctccaaaaagctgctcgagaaaccaagattcttttggatcatgagaaggaatggaaactaggccggtgcattttacggttccctgagattctgcaaaagattttagatgacttatttctccacactctctgtgattatatatatgagctggcaactgctttcacagagttctatgatagctgctactgtgtggagaaagatagacagactggaaaaatattgaaggtgaacatgtggcgtatgctgctatgtgaagcagtagctgctgtcatggccaaggggtttgatatcctgggaataaaacctgtccaaaggatgtaatccttcataggtttgaacactgtgtgtttttaccaaagtggccattggcactgtttgcttttttacaatcatgtggacacaagcataagtaaagaaaatttgtcaaccagaaaaaaaaaaaaaaaacacaaaaaaaaagtgcgtcgcctctctccccgaccggcccctgggcggttggcaagaaacaagggcccttagaagggcgcgcaaaggggcgccggagacaagggtggcccctttttctcaaagcgtggcttttttgaaacccggtttttccattagaacnnn

SEQ ID NO: 20160 - DNA, 5775 bp, Homo sapiens
agcttttcaaaagtttattttaagtttggagactaaacaaggtcatactggttttacatcctacgggatataagtatatataaaaaaaaaaaaacaccattggaatattacacagcttgaaggtttgcaaaggttatttgggtcttagttatttctgcacttaatgacacatcaaacgcattgagtatatttcataagttgttgactagcaaagatacaatcattagtaacccaagtcttcaaaattcacaccaaactttatgaagtcattcagaaagagaaagtcaatcctaaaattaaaattggcaactatgataaataccttcaaaaggatgtagatataatggagatgtttaaaagtttagtttcattaattgtaaaattagcatgttatatttactcaatatagtgaagactaggtgattcttacatgtattctacttatggtactgtactggttttagtgtgaatttacatagaataaatttacttcactttcatgtcatcgacatgaatgacacaaaagctacttcataatactactttacaatagttttcaacatttccatatggtgcgacccctttgctctcatcaattttgggtgtcatgagaacaataggtatcccgttggacatgatgtattgcgaagagcatataaagcagagggaaaatgaaaaagcaagagaaactcatttcaatgctttttctaaaaggtaacaaatataattttaatcaacttccttggaaaatatttttaaaacaggtatcaatagaaaaaattacaaaacatcatatgaagctataaataattttgaaaaactatatcatcataaagcgtaagtaataatcttaaaaatacactcttaagaaggtatgtaatttgcaaaggaaaatggctagatatctgatgggacagtaaaccttgaaagaaactggctaaagagtaagtgtgtgtatatttctgaacctaagtaattatttgtcacgactttaaaatttagccagttacaaatattttaaaatcctaactttaaagttatctaaaaaaggcaatatggaggaaatagtaattttgtttttgaaagatgttgaaaactgatcaccatttcagaggcttcaaattcataatttcataataagaacaagaagtagaaagcatatgggcaaggaacaaatatgtggccagccagtccccttagacgaactaattttgttcttattaaaaatgccaatacaattgactttctctttaaattcttcactatgattgaagaccactccatatatacatcattaagaaatgctgttaacacatggacagacaagacagtaacagtctagtggcttttgttatgcagcacaaatattaaaggaaaaaaatagcagtgttgcgtaggatcttaacatttcatacacataccatcctttcttttccaatacacttaatttaaaactccaataattctgtctaagccttataaaataaatacttgtaaagcttataaattagatgttgaagacttttatggaggcagtgtgagctttaatttgagagacatgtcaatgaaacctccagtatcaataacaaattgttatgataattgcttattttttcaggacctttgaagcaaaataaatagaaatcagttttcatcttgaaaatggtttactactttgtcattagtaaacactttgcttctcacaaataactccacctgtgccttcctgggaaactaccaccagtttcaaatctcaataagatgttagtttcacaggaaatgtggagctgaacaaagaaatgatgagtatgcttggccgaactatgcagcactatattaatatttctttgctaaatttttataaaataaacaaataagccgattttttaaagtaaatataaggatatgtaattaccatctaaatgaagatttaaatttaaagagacatatatattttttgttcttttgtgcaaactgagagtatgggattctttatgaagcaattatttggaaattaaatagttatggcttccttcaaaaataaaactgcagatttaattaacgaatattaaatacagatcaatctactgataggcagtcatgttctacatatatgagtaaacatgacacttcttttagtcaactaataggaaattcaattagaaaaaaattgaattattcaggtaatatacaatattaagaatgtagaatagaactaaaagaaaaagaagtcacataatctcttattagaaataatgaaagtaaaatgagaattataatatcagtactgcatgttacatattcttctttaaaattttgtaataaacattgacagtgtttggtgggcacagggaaacaggataacgtagagtcattacagaagaaaaaaacttattgctaacattgcagtattccttttatcagaattaggtgagtattgattgtaaaagctctatcaactcttgctcttatttgatgactttgagacttttttactcttgctataaaaagaaggctactttctttccctaatatatttctaccaatgcgaataattcaggaaacaatgagagaaaagtaattcacacttaatgtgttgttacttaagagatttgacggataaaataaaatcaaattaaatcattgaaaaggcaggcttagacccccttaaaaacaccgttagttgcctaccataatttgagcactttttcatgaaaaaaaaaaaaccattcagtttcctacagattttgcacagttcattccatggagatacttttagggaaatagggaagagggttgtgaaatgtagcctcccctcattcctcctctgtgcagcccagcagctctgaccgcaatgtgatcctcccgtaccaggaccaaggaaggattcttatgtgtcgtgcatagatgggagggtcgatgacattttttctgtgagtgtcattgtcaaaatttccctggaaaacctaataaagaagagcagaaaaatgtcagtcacctcgtgccgaattcggcacgagcggacgtgctagatcttcacgaggctgggggcgaagatttcgccatggatgaggatggggacgagagcattcacaaactgaaagaaaaagcgaagaaacggaagggtcgcggctttggctccgaagaggggtcccgagcgcggatgcgtgaggattatgacagcgtggagcaggatggcgatgaacccggaccacaacgctctgttgaaggctggattctctttgtaactggagtccatgaggaagccaccgaagaagacatacacgacaaattcgcagaatatggggaaattaaaaacattcatctcaacctcgacaggcgaacaggatatctgaaggggtatactctagttgaatatgaaacatacaaggaagcccaggctgctatggagggactcaatggccaggatttgatgggacagcccatcagcgttgactggtgttttgttcggggtccaccaaaaggcaagaggagaggtggccgaagacgcagcagaagtccagaccggagacgtcgctgacaggtcctctgttgtccaggtgttctcttcaagattccatttgaccatgcagccttggacaaataggactggggtggaacttgctgtgtttatatttaatctcttaccgtatatgcgtagtatttgagttgcgaataaatgttccatttttgttttctacatttaatgttactttcctgtcctaaaattgaaagttctaaagcatagcaaggctgtatggatcattgtgaagatacttctagggactgaactctatgtatttcttttttttcttttttttgagatagagtcttgctgtgttacccagggtggattgcagctgatcatagctcactgcagcttcaaactcttgggctcaagccatccttctgcctcactgtccctagtagttgggattacaggcacatgccaccatgcccagctaaatttttaatatttttgtagagatggggtcttgctgtgttacctgggctagttatgtgagtttctatattagacatagtctcaagtttcaagtaggggtttaaagtagagacactggtcagtatttcttttttggggggaactaggagagcaggagtagaagtgagatgttaagatcttatggcactaaagacttactattctgttcctacatactctgttaggatcagatagatgttatagaaatgccttttgtttctcctgcccttcttgatgtcacagttttttgtacttccagctgtctaaaggcatgaatctcctcttggagcattctcccagacccttctttagaagagtctatactaagttcttggtgccctcttcggcagccaagggtgaaggccccatagaggagaggatccaaaggagcattgaggaggcccaagaggaaaaggatgtggctcaggctgggagggacttcagttagcatggtgggggagaaccagtaccacatacccagtaggtaataaggtgtccagcagaggatgaaggtcagcaagataagcagggccagtctcagggcccggagacgaacacggggacaattgtcaaaggagcgggggagggcaaattcaccagcaggggctaggaatttagaaaatatactgtaattcagacactcagcttctgatctgagtatagggtgaattgatggaggggcatagctagtgagacagagctcgcctcctacaaggaggagaatgttgcaaaccgttttccccttcccaacctgggactatatgatttcttacccccagggattatgatagaaatatgaagccaccaagtctagacttgatggtgttcaagaataaataatactgattgcctccctagtccttgtccagctaactcagctgtttataattgaagggattcaacaaaattatctctagcatcaggtgctagacatggttagaatctcaccatggtttagtgactggtagatagctattaggtaggtagataaataaatgatgctagaggcaacaggtctagggttaaggattaaggcctgggaattggagtctcaccatggctccccttccttgtctggggcctggacacactgaggacaatgcggctatagcagatggccatggcagtcagtggcagcagaaagaggcagcagaaggtgaagaggttataggtggtctcttgccattgagccttgaagctgcctttggtgacacactgagtgaaagggactgggccagctcagtggaccgtgtggaacaggaacagctggagtggagttgaggactattagaactggttcccctcaccacccaacctacccacctatgtcatactgtctcctcccaattcatccttaattccaagtgaagcagcacagtgctgagaaacagtttcatccatggtgccatgttaaagaagttggaaatatatcttgaaaatcctatcttccttttaggcttgaatatgatgctgaacagtaagtttgttaaatcttggaacttaaaacaatcctgctttctcaagtactattctaacattgcgctttataagggatgatatttctaccacctcactcatatttttagctgaaatgattttcctggtatgtctgttattttgtggaaaaagaaatattgtgtaaaatgggtgctgccaaaattccaggccattttgcagggactctgaagtgacctttagtagtaatagtcttatgtgcagtaactataatggtaaagaatgttaaataataaaatttaacattttccaaatgc

SEQ ID NO: 20161 - DNA, 1684 bp, Homo sapiens
ataagcgacagatggactcacttaatataaataagtagcatacactaaaagcttactatgtgccagatactgtgctggacacttacatagataagccattgaatccacacagcagccctgtaagaaataagtaaaatctgcataaagtgttgaaataggaatatacatttcattatgaaaaatgaatagattatgcctatctgaatcaatattgcattcaaataagtgattacttaaatcatatagtttacactccttaaaaaaaggtacataaattcagtgaggtttttttcttaacatacagaagtactaaatactgcttgcagtataatattgatattggaagctgcagtttccagaataagtggagtaataactaaacagacatttaattttatttcaatatctatggaaaaaacacttattaaatctccctgtattttatgttgtctttattacagaatcacttgtctgtttgttgtgtgccacttactgacaaaactttaaacagtacctaaatatttatcatatccttgcccttgagtgcttgttggagagaaagagaactactaaggaaaataatattatttaaactcgctcctagtgtttctttgtggtctgtgtcaccgtatctcaggaagtccagccacttgactggcacacacccctccggacatccagcgtgacggagcccacactgccaccttgtggccgcctgagaccctcgggccccccggccgcggcctctgtgcccttgatggaaattgaccatacaatttcatcctccttcaggggatcaaaaggacggagtggggggacagagactcagatgaggacagagtggtttccaatgtgttcaatagatttaggagcagaaatgcaaggggctgcatgacctaccaggacagaactttccccaattacagggtgactcacagccgcattggtgactcacttcaatgtgtcatttccggctgctgtgtgtgagcagtggacacgtgaggggggggtgggtgagagagacaggcagctcggattcaactaccttagataatatttctgaaaacctaccagccagagggtagggcacaaagatggatgtaatgcactttgggaggccaaggcgggaggattgcttgagcccaggagttcaagaccagcctgggcaacataccaagacccccgtctctttaaaaatatatatattttaaatatacttaaatatatatttctaatatctttaaatatatatatatattttaaagaccaatttatgggagaattgcacacagatgtgaaatgaatgtaatctaatagaagcctaatcagcccaccatgttctccactgaaaaatcctctttctttggggtttttctttctttcttttttgattttgcactggacggtgacgtcagccatgtacaggatccacaggggtggtgtcaaatgctattgaaattgtgttgaattgtatgctttttcacttttgataaataaacatgtaaaaatgtgtcacacaactactaaatagataataccgaacaaaaaaaaagggggcgtctaagtttccgtgggggacaagttaaggtacccggtgttgctcaaggggacctataggatcggatataagatggaggggagtttaaaggtgggagggaactgtgctggcttggaggactcttga

SEQ ID NO: 20162 - DNA, 1641 bp, Homo sapiens
  misc_feature 1, 2, 3, 4, 5, 1639, 1640, 1641: n = A,T,C or G
nnnnnctgattcctgtggtgagaaggaaagctacaggacctggagaaggggatgcagaggcaggcctgctgaccaacttgttgcaatcacaaaggtgggggtcctggtgcaggcagtgaacaggcttctaatgtggggttcagtagtgccagcacgtgggggaaactttcagtattgcgctaggtaacacttcctgctgcatttccttccctttgcacagcttgaagaaatagagtagacagaatcacacatcatgtggtgggcagatggaaataagtacctgtggtgaacaagtttctactgtagttggagatcattagaattgaattcagtttctcttagaatataatcaggtataaacctaagttaaactttttcccaaacaaggagcatccaaagacacagtgacttgagctatagatagtaaaaatcatacgagagttgaactgagtcaggtttaggaagcaagtttggttgcatcaattaagcaggctcttttcaattgactgatgctggggccttcagttttattctcagtatagattgccagtattgttaagagtatccaaaggcctttctagatggagacagaataactgacttgaacatacagtgtgcctgtaagtgtccaggctcagagctggtgaaaacccttctgttgggcgtgtgcagggttaaactcctgaagtaacttgtgaggacttcagtgcttgctggtgtcctgggcagcaccatgaatgcctttaccaagacatgccaagttggatcccccgaatgaagcagatgtggctgtggtgtgacccttgctccctgctacacagagcatcgcagggctggcctgtgtggtttccagatgagggtctgggtcccggaagcttgtgttgagagctcagtggacccaccccgcttgctgaaccctcacagttcttggggttgtccagcctggacttgtagcacacatgtcctgaagcaaagctccggtgactgcatgagccacctggccacagtcctcccatggagggcctgccgtgacgctcagtggagagggcagggcctgtgtctccacttaggccacacagtgatgaggaaaccacagatggagcttcttgccgataatactgactctagcccatgattgccttgcccaagccaaagaggaaggttaggttggcttgtcgagcccttgagcgttgggagatggggtgggaaggaggtgagcccctgcagagagttgggtagtgtccttcaggaatgaaaggaggggcaaaggagtcaccagaggtcctgcatttccatcagggtttccacagtcatcagggcttctctcttgagttgctgataggagatgtgagttatgcccagagatgtcttatcgtgaggaaaaagaaacttccttttgttcacattcaggactctcagtgccatatgaagtagcacaagggcaggctccgccacgatcagtgcttacattgatctacaattacgaggtccccctagacacctattacgtgccgggtctgttcggagactggcggcacaagacgccttcctctggatacaatcaggatctatattgccactacaactggcggtactcaccttgagtggaacgccccgaatggcgagcttcgcgcgcggnnn

SEQ ID NO: 20163 - DNA, 1973 bp, Homo sapiens
  misc_feature 1972, 1973: n = A,T,C or G
ggatcgaccacccgcccggggcgcgggagcgcacgccggcggcgcggaggccggctctgcgcttcgggccgccccctccccccaccccgctcacacccggcacttacttcggctgtctccgctgccctccagcggagacgcagctcctcaggcgcccggcggtatttgttgggtcggcggcgtcagggattcgcagtggcctgtggtcggcgtcgtccggccactggtgcgcccccgcggcaggcagagctcacgctcctgtcccccggctggtccggggtctgggcgccgcgtcgacggcggctccgcaggacgcgcagaccgggccgcagcccatgccccgagcggactgcattatgaggcacctgccttacttctgccggggtcaagtggtgcggggcttcggccgcggctccaagcagctgggcatccccacagctaattttcctgagcaagtggtagataatcttccagctgatatatccactggtatttactatggttgggccagtgttggaagtggagatgtccataagatggtggtgagcataggatggaacccatattacaagaatacgaagaagtctatggaaacacatatcatgcataccttcaaagaggacttctatggggaaatcctcaatgtggccattgttggctacctgagaccagaaaagaactttgattctttagagtcacttatttcagcaattcaaggtgatattgaagaagctaagaaacgactagagttaccagaacatttgaaaatcaaagaagacaatttcttccaggtttctaaaagcaaaataatgaatggccactgatgaaaaattgtattatttattcattcactgttttctagtgtttctgtgtttattactgttcagcatcatcttggttatatactgaaaatcaaacactttactacagttgtgaattagtttaaaccgtacaatgttgttatcatatcatgcttcaactattaaattaagcccatcatatcatagcactaaaaagattgagttaaaaataagatttaaaaaatatatattgattaaaatgtaccactagaaaggtattacatgtgtataagtatgggtaaaaaggcaagtcactagtttgagatgaaaactaaaattttcatggtaaaatgccagcatgtatgtacttgtgtagtgtgtacttctaaacagagaaggcttataaaagtaaatgcattaaggccaagtgcagtggctcacaccggtaatcccagcactttgggaggccgaggtgggaggattgcttgagctcatgagttcaagaccagtctgggcaacatagcgagactccatctctataaataaaaaaaaaggaaatgcattaaatagaaggttgatagtttatcataaacctgcggggaagaaactcagactttctatttttgatattttgtgcattaatacattacaaacatgaagatgtttgtaaagttttgttttagtcattttctttgcagtcacatcattgtaccaccttcattattgtatagagctgcttcaattctgagtcctctggacttcccctgcctatctgtttgttgttgttgttgaagacagtaaaataagtgttttcaaatctatatgtctcctttttgttggataatgtttcttctttttaatggtaaatattcttgttcttcaacattttcttggttcttttttccttttttaggaaaaacaaacacagacttcatcttaggtttctcagattaggtggacccttaccctatcatttcttaagaaccaaatgtttctccctagcaacttttgagacataacttgaataggttcaaacttttaattaggggaaatatttcaggaactaagggggtcgatgccgagttatgtcgaaagatcacctggggagaagtggacccccgggttccccacaatgtggaaatagaggcgccaaatgatggtggcgaggatann

SEQ ID NO: 20164 - DNA, 4723 bp, Homo sapiens
  misc_feature 4720, 4721, 4722, 4723: n = A,T,C or G
agggagtcgacccacgcgtccgcggacgcgtgggagcggctggggccggagcacacgtgtttcgtgtttcggtgagtgtggcggagatggagagccgggatcccgcccagccgatgtcgcctggagaagcgacgcagagtggcgcccggcctgccgaccgctatggcctattgaagcacagtcgcgagttcttggacttcttctgggacattgcgaagcctgagcaggagacgcgacttgcggccacggagaagctgctggagtatctgcgtggcaggccgaaggggtccgagatgaaatatgccctgaagcgtctaatcacgggactcggggtcgggcgagaaacagcccggccctgctacagtttggccctggcacagctgttacagtcttttgaagacctccccttgtgcagcatcctgcagcagatacaagaaaaatatgacctgcatcaggtgaagaaggcaatgctgagacctgctctctttgcaaacctgtttggagtgctcgccctctttcagtcaggtcggctggtgaaggaccaggaggcactgatgaagtcggtgaagctgctgcaggccctggcccagtaccaaaaccacttgcaggagcagccccggaaggccctggtggacatcctctccgaggtctcgaaggccacattgcaggagatcctgccggaggtcctcaaagccgacttgaatataatactcagctcccctgaacagctagagctcttcctcctggcccagcagaaggtgccctccaagctcaagaagctggtgggatccgtgaacctattctcagatgagaatgtccccaggctggtgaatgtgctgaagatggccgcctcctctgtgaagaaggaccgcaagctgcccgccattgctctggacctgctccgcctggcgctcaaggaagacaagttcccacggttctggaaggaggtggtggaacaagggctgctgaagatgcagttctggccagccagctacctgtgtttccacctgctgggcgcggccctgcccctgctgaccaaggagcagctgcacctggtgatgcagggagacgtgatccgccattacggggagcacgtgtgcactgctaagctcccaaagcagttcaagtttgccccagagatggacgattacgtgggcaccttcctagaggggtgccaggatgaccctgagcggcagctggccgtgctagtggccttctcatctgtcaccaaccaaggcctccctgtcacgcctactttctggcgggtcgtgcggttcctgagccctccggccctgcagggctatgtggcctggctgcgggccatgtttctccagccagacctggactccttggttgacttcagcaccaacaaccagaagaaagcccaggattcatcgctccacatgcctgagcgagctgtgttccggctgaggaaatggatcatctttcgattggtgagcattgtggacagcctgcacctggagatggaggaggccttgactgagcaggtggccaggttttgtttgttccactcgttctttgtcacaaagaagcccacatcccagatccctgagacaaagcacccgttctccttccctttggaaaaccaggcccgagaggctgtcagcagtgccttcttcagtctgttgcagaccctcagcacgcagttcaagcaggcaccgggccagacccagggtgggcagccctggacctaccacctggtgcagttcgcagacctcctgttgaatcacagccacaacgtgaccaccgtgacacccttcactgcgcagcagcgccaggcctgggaccggatgctgcagactctgaaggagctggaggcccactccgcagaggccagggctgctgccttccagcaccttctgctcctcgtgggcatccacctcctcaagtcccctgcagagagctgtgacctgctgggtgacatccagacctgcatcaggaaaagtctgggagagaagccccgccggagccgcaccaagaccatcgacccccaggaacccccgtgggtagaggtgctggtggagatcttgctggccctgttggcccagcccagccacctcatgcgccaggtggcccggagcgtgtttggccacatctgctcccacctgaccccgcgtgccctgcagctaattctggatgtgctgaaccccgagaccagtgaggatgagaatgaccgtgtggtggtgacggacgattctgatgagcggcggctgaagggtgcagaggacaagagcgaggaaggtgaggacaacagaagctcagagagtgaagaggagagcgagggggaggagagcgaggaggaggagcgcgacggggacgtggatcagggcttccgggaacagctgatgaccgtgctgcaggctgggaaggcgctgggtggagaggacagtgagaacgaggaggagctgggggatgaggccatgatggccctggaccagagcctcgccagcctctttgccgagcagaagctgcgtatccaggcccggcgagacgagaagaacaagctgcagaaggagaaggctctgcggcgcgacttccagatccgggtgctggacctggtggaggtgctagtgaccaagcagcccgagaatgccctggtcctggagctgctggagccgctgctgagcatcatccggcgcagcctgcgcagcagcagctccaaacaggagcaggaccttctgcacaagacggcgcgcatcttcacgcaccacctgtgccgtgcccggcgctactgccacgacttgggtgagcgcgcaggggccctgcacgcccaggtggagcggttggtgcagcaggctggccgccagcccgactcccccaccgccctctaccacttcaacgcctctctctacctgctccgggtcttgaagggcaacactgctgagggctgcgtgcatgagacacaggagaagcagaaagctggcactgaccccagccacatgcccacgggcccgcaggctgccagctgcttggacttgaacctggtgacccgggtgtactcgacagcactgagctccttcctgaccaagcgcaacagccccctcacagttcccatgttcctcagcctcttctcccggcacccggtgctctgtcagagcctgctccccatcctggtccagcatatcacgggcccggtgcggccccgtcatcaggcctgcctgctgctccagaagaccctgtccatgcgggaggtgaggtcgtgctttgaggaccccgagtggaagcagctgatgggccaggtcctagcaaaggtcaccgagaacttgcgcgtgctgggggaggcgcagaccaaggcgcagcatcagcaggcactgtcctccctggagctgctcaacgttctcttcaggacctgcaaacatgagaagctgaccttggacctgacggtgctcctgggtgtgctgcaggggcaacagcagagcctacagcagggggcacactccaccggctccagccgcctgcacgacctctactggcaggccatgaaaaccctgggagtccagcgccccaagttggagaagaaggatgccaaggagatccccagtgccacccagagccccatcagtaagaagcggaagaaaaagggattcttgccagagacgaagaagcgcaagaaacgcaagtcagaggatggcacgccagcggaggatggcacacctgcagccaccggcgggagccagccccccagcatgggcaggaagaagaggaacaggacaaaggctaaggtcccagcccaggcaaacgggacgccaaccaccaagagtccagcccctggcgcccccacccggagccccagcacccctgccaaatccccaaaactgcagaagaaaaaccagaagccgtcccaggtgaatggagctcccgggtcccccacggaacctgcaggccaaaagcagcatcagaaggctcttcccaaaaagggggtcttgggcaaatcaccactgtccgcgctggcacggaaaaaggcaaggctgtctttggtcatcaggagtcccagcctgcttcagagtggggccaagaagaaagcacaggtgaggaaggcagggaagccctgagcacaggtacgggcccccctcagcccctgcctccatctgcctgagacgcctattttttttttttttttaaaaccatgattttaatacgcaagctgtttctaaggcgctgccactggggagggtggctgttgccgcctgcccgggcatcctgctctggcaagcacagcctgagccattcctgcaggggtcccagggtgcagagacctccccacccccggttctgggctgggaccctggctccagggccatgtccagggctctggtgtttgcctgggttggtgcaggttgatgtgctggctgcaggcaggtgtgaccatctctcgtgcctgccacctctttgcccccaggcttttttgctgtgagggagccaccagggggtgatttaaataggtttatttcttcatttacaagaggaatatatttggcttctctcttaagactctgagattcacaatcagcagctctaaaaaataaaggagcagtttggcttccggaaggaagaggaggcaacactcggacctggttcttgtacaacaagaaaacatcgctggggccccgctgaggctggagaaaagagggggggggggaaaaaatatggagggggagaaatatgtgaccctttttagaaagggcctaagagggagtannnn

SEQ ID NO: 20165 - DNA, 1788 bp, Homo sapiens
  misc_feature 1, 2, 1788: n = A,T,C or G
nncatttaagctagttctctgaaaattctgccatttatctacagaaatttgattataaatatgttcctttttcaaagaaactttattctagagcaaaatagtctatatggtacttgatctacatttaagtggaaaaattagcagtatttgaaagctcagtttatgtcattgtcttaacttcagatacaaataactgaacagaaagttttaacctttaatatctcatgttctgttttttattcagtattttcctttatgttgattcaattatatacttctgaatggcaccttactttttggaaacaaatcttctgttatttacaaaataataatttttaaaaaacatttaaaaaaaatccaaagctgctctcgataatagtcaacatttgcatatatatggaatttcttactttttttctcccaaactctatttaataaacttattttaatgtttgtgtatttcatgtataattgtgatctcaattataaaagtttaattcagcatgtctttgagccaatataattactgcacacccactaaattgggatcagccattataaataatgtagttttagaataataaaacatgacacatatatatatatataaatatatagtatatattggcacatcggtgaaagtttatatgtgcagaagtttttttctttctcaagttaaaaattattttttgccatatgtaattttgtgttgcaggctgtcgagagataaaaatgattttaaatctgtgtactgatgattctttcggtgttaagaaacacagggttgtgtacttccctttttatgggcttatggattctatttatattaagacctgtttataattgttttctgccaaagggaattgtctaacttcagatttctacattgggttcatacttactgttttatatcagaaataaaaaaatagcttctgctttttcatatgaaatcttggtacatcagaaagaattcctgaaaatttataatagaatgaattttattaatgcagaaaaataccccagggtgttaaaatatatgaagtgtgggatatattcttatagtttgtaaaatgtagtcaaccaatactgtcttctaatttggtaatttatttataaaattacttaaacattaggtaattatatttgttaggatttgaaattatttgtagttaaattgtcatgctgtttgaaataattgatacttgtctacgtaatacattttactgtatgttttgaagatggttataatttcactttcaaaatttaaaaaatcaattttaaatgttttaaaaacatatagcttagggattttttttaaaaaggttttcttagtaaaaacataaatttaaaagcccctgagttctaggagagggcttattgaattgctataagaaagctggagttactttgataagtaataaattataaatagcactgatctataatgctttatttctatcggaaggtactttttcttctttcatcatcagttttagccagttagtaaatgggaatactcagttttagggatttgatttttgtttggtttaattttctttcaaaaattaaaagtatatttctaaaagttttccccagaggccagatacagtggctcatgcctataatcccagcactttgggagcctgagataggagtattgcttgaggctacgagtttgagaccaacctggcaacatggcaagaccctatctctacaaaaattttaaaacttagccaggtgtggtagtgcacctgtagtcccagctagtcagtaagctgaagtgggagn

SEQ ID NO: 20166 - DNA, 2245 bp, Homo sapiens
  misc_feature 1, 2, 2245: n = A,T,C or G
nngctcgcttcggcagcacatatactaaaattggaacgatacagagaagattagcatggcccctgcgcaaggatgacacgcgaattcgtgaagcgttccatatttttacctgctttgaaacgccagcgactagaaatcaattgccaggatccatctataaagtcattcctgtattccatcaaccagacaatctgcttgcggttggatagcattgaagccaaattgcaagccctggaggctacttgtaaatccttagaagaaaagctggatctggtcacgaacaagcagcacagccccatccaggttcccatggtggccggctcccctctcggggcaacccagacgtgcaacaaagtgcgatgcgctgtgcctgggcgtcggcagaacaccattgtggtgaaggtgccgggccaagaagacagccaccacgaggacggggagagcggctcggaggccagcgactctgtgtccagctgtgggcaggcgggcagtcagagcatcgggagcaacgtcacgctcatcaccctgaactcggaagaggactaccccaatggcacctggctgggcgacgagaacaaccccgagatgcgggtacgctgcgccatcatcccctccgacatgctgcacatcagcaccaactgccgcacggccgagaagatggcgctaacgctgctggactacctcttccaccgcgaggtgcaggctgtgtccaacctctcggggcagggcaagcacgggaagaagcagctggacccgctcaccatctacggcatccggtgtcaccttttctataaatttggcatcacagaatccgactggtaccgaatcaagcagagcattgactccaagtgccgcacggcgtggcggcgcaagcagcggggccagagcctggcggtcaagagcttctcgcggagaacgcccaactcgtcctcctactgcccttcagagccgatgatgagcaccccacctcctgccagcgagctcccgcagccacagccgcagccgcaggccctgcactacgcgctggccaacgcacagcaggtgcagatccaccagatcggagaagacggacaggtgcaagtaatcccacagggacacctccacatcgcccaggtgccgcagggggagcaagtccagatcacgcaggacagcgagggcaacctccagatccatcacgtggggcaggacggtcaggtgctgcagggtgcacagctgatcgccgtggcctcctcggaccccgcggcggcgggcgtggatgggtcgccactccagggcagcgacatccaggttcagtacgtgcagctggcgccagtgagtgaccacacggccggggcacagacggccgaagccctgcagcccacgctacagccggagatgcagctcgagcacggggccatccagattcagtgagcggtgcccatggcaccaggagcccctcgccggctccgcctacggcccggcccccacgcgccctgctctcacggcctcggcacaggcagcggctgcacgtgttctgctgaagtgcgtctgaaggccgctgcctccgcggggaacagcatcctatcaactgaaagagcagccgccgccgcccccagccggagacccctttcgtttgagtcctgctgttggtgtcggagcacgaggggaggcacggtgcggagagcgtcgcatatgcgcgggaaatcaagaactatgatatttttctgtttaaacagctttttttaatttgctatggtgtttataacaaaaaagaaaatttgaaaaaaaaaatcccaggggagtagcaggagccctttgctgtgtgctctgtccagtgtcatgagacgggagccctttgctgtgtgctctgtccagtgtcatgagacgggagccctttgctgtgtgctctgtccagtgtcatgagacgggagccctttgctgtgtgctctgtccagtgtcatgagacgggagccctttgctgtgtgctctgtccagtgtcatgagacgggagccctttgctgtgtgctctgtccagtgtcatgaggcaggtgtttgcaaagccagctctcggttccgatggggtattgctgacctacttttctaggggaaatgctcttaaacactgtaattatgcatttctaatgaaataaaatgtatttatgaccacagcagccttacgcttttcctcctgcgagacggttcgccagagagtgcctgtccctggggggttgggctcgctggccttcaggccacgctgctgccctcn

SEQ ID NO: 20167 - DNA, 1455 bp, Homo sapiens
gtccggcggcggcgaagaccctgaaccccaaggccaaggtggccggagcgcaggcggcgctggcgttcaacattagcggggcgcggggtctgcaggacgtgctgaggaccaacctggggcccaaagggaccataaagattcttgtttctggcgctggagacatcaagcttactaaagacacaggagttgacgatcagccctggccaacatggtgaaactcagatctctactaaaaatacaaaaattagccgggcacggtcctgcacagtgcgctgcttcacgaaatgcaaattcaacacccaacagcttccttaatagcaaaggtagcaacagcccaggatgatataactggtgatggtacgacttccaatgtcctaatcattggagagctgctgaacttgcagatgtctacatttctgaaggccttcatcccagaataatcactgaaggatttgaagctgtgaaggaaaagcccttcattttttggaagaagtcaaagtaagcagagagatggacaaggaaacacttaaagatgtggccagggcatctctttgtactaaagttcatgctgaacttgcagatgtcttaacagaggctgtagtgggctccattttggccattaaaagaaaagatgaacctattgatctcttcatgattttgtgatcattgacaagaaacataaatctgaaactgatacaagagaagtgaattctggcgttttttacaagagtgcagaaagagaaaaactcataaaagctgaaagaaaattcattgaagatagagttaaaacaaataatagaactgaaaaggaaagtctgtagtaattcagataaaggatttgttattaatcaaaagggaattgaccccttttccttagatgctctttcaaagaaggcatagtcgctcttcacagagctaaaaggaggaatatggagaggctgactcttgcttgtggtggggtggccctgaattcttttgaggacctaagtcctgactgcttgagacatgcaggacttgtatatgagtatacattgggagaagttcacctttattgagaagtgtaacaaccctcgttctgtcacattattgatcaaaggaccaaataagcccacacttagatcaaagatgcagtaagggatggcttgagggctgtcaaaaatgctattgatgatggctgtgtggttccggtgctggtgccgtggaagtggcaatggcagaagccctgaataaatataagctcagtgtaaagggcaaggcacagcttggagtccaagcatttgctgatgtgttgctcgttattcccaaggtgagcccgtggtagcagcagaagcaggcattatgggataacgattgtgtaaagaaacagcttcttcattcctgcactggttgccaccaacattctcttggttgatgagatcatgcgagctggaatcttctctgaaaggttgaattgaa

SEQ ID NO: 20168 - DNA, 10470 bp, Homo sapiens
  misc_feature 10455, 10456, 10457, 10458, 10459, 10460, 10461, 10462, 10463,10464, 10465, 10466, 10467, 10468, 10469, 10470: n = A,T,C or G
acgcccacgcgtccgggctgtggtaaaagccgtccggaaaatggccgccgccgccgccgccgcgccgagcggaggaggaggaggaggcgaggaggagagactgctccataaaaatacagactcaccagttcctgctttgatgtgacatgtgactccccagaatacaccttgcttctgtagaccagctccaacaggattccatggtagctgggatgttagggctcagggaagaaaagtcagaagaccaggacctccagggcctcaaggacaaacccctcaagtttaaaaaggtgaagaaagataagaaagaagagaaagagggcaagcatgagcccgtgcagccatcagcccaccactctgctgagcccgcagaggcaggcaaagcagagacatcagaagggtcaggctccgccccggctgtgccggaagcttctgcctcccccaaacagcggcgctccatcatccgtgaccggggacccatgtatgatgaccccaccctgcctgaaggctggacacggaagcttaagcaaaggaaatctggccgctctgctgggaagtatgatgtgtatttgatcaatccccagggaaaagcctttcgctctaaagtggagttgattgcgtacttcgaaaaggtaggcgacacatccctggaccctaatgattttgacttcacggtaactgggagagggagcccctcccggcgagagcagaaaccacctaagaagcccaaatctcccaaagctccaggaactggcagaggccggggacgccccaaagggagcggcaccacgagacccaaggcggccacgtcagagggtgtgcaggtgaaaagggtcctggagaaaagtcctgggaagctccttgtcaagatgccttttcaaacttcgccagggggcaaggctgaggggggtggggccaccacatccacccaggtcatggtgatcaaacgccccggcaggaagcgaaaagctgaggccgaccctcaggccattcccaagaaacggggccgaaagccggggagtgtggtggcagccgctgccgccgaggccaaaaagaaagccgtgaaggagtcttctatccgatctgtgcaggagaccgtactccccatcaagaagcgcaagacccgggagacggtcagcatcgaggtcaaggaagtggtgaagcccctgctggtgtccaccctcggtgagaagagcgggaaaggactgaagacctgtaagagccctgggcggaaaagcaaggagagcagccccaaggggcgcagcagcagcgcctcctcaccccccaagaaggagcaccaccaccatcaccaccactcagagtccccaaaggcccccgtgccactgctcccacccctgcccccacctccacctgagcccgagagctccgaggaccccaccagcccccctgagccccaggacttgagcagcagcgtctgcaaagaggagaagatgcccagaggaggctcactggagagcgacggctgccccaaggagccagctaagactcagcccgcggttgccaccgccgccacggccgcagaaaagtacaaacaccgaggggagggagagcgcaaagacattgtttcatcctccatgccaaggccaaacagagaggagcctgtggacagccggacgcccgtgaccgagagagttagctgactttacacggagcggattgcaaagcaaaccaacaagaataaaggcagctgttgtctcttctccttatgggtagggctctgacaaagcttcccgattaactgaaataaaaaatatttttttttctttcagtaaacttagagtttcgtggcttcagggtgggagtagttggagcattggggatgtttttcttaccgacaagcacagtcaggttgaagacctaaccagggccagaagtagctttgcacttttctaaactaggctccttcaacaaggcttgctgcagatactactgaccagacaagctgttgaccaggcacctcccctcccgcccaaacctttcccccatgtggtcgttagagacagagcgacagagcagttgagaggacactcccgttttcggtgccatcagtgccccgtctacagctcccccagctccccccacctcccccactcccaaccacgttgggacagggaggtgtgaggcaggagagacagttggattctttagagaagatggatatgaccagtggctatggcctgtgcgatcccacccgtggtggctcaagtctggccccacaccagccccaatccaaaactggcaaggacgcttcacaggacaggaaagtggcacctgtctgctccagctctggcatggctaggaggggggagtcccttgaactactgggtgtagactggcctgaaccacaggagaggatggcccagggtgaggtggcatggtccattctcaagggacgtcctccaacgggtggcgctagaggccatggaggcagtaggacaaggtgcaggcaggctggcctggggtcaggccgggcagagcacagcggggtgagagggattcctaatcactcagagcagtctgtgacttagtggacaggggagggggcaaagggggaggagaagaaaatgttcttccagttactttccaattctcctttagggacagcttagaattatttgcactattgagtcttcatgttcccacttcaaaacaaacagatgctctgagagcaaactggcttgaattggtgacatttagtccctcaagccaccagatgtgacagtgttgagaactacctggatttgtatatatacctgcgcttgttttaaagtgggctcagcacatagggttcccacgaagctccgaaactctaagtgtttgctgcaattttataaggacttcctgattggtttctcttctccccttccatttctgccttttgttcatttcatcctttcacttctttcccttcctccgtcctcctccttcctagttcatcccttctcttccaggcagccgcggtgcccaaccacacttgtcggctccagtccccagaactctgcctgccctttgtcctcctgctgccagtaccagccccaccctgttttgagccctgaggaggccttgggctctgctgagtccgacctggcctgtctgtgaagagcaagagagcagcaaggtcttgctctcctaggtagccccctcttccctggtaagaaaaagcaaaaggcatttcccaccctgaacaacgagccttttcacccttctactctagagaagtggactggaggagctgggcccgatttggtagttgaggaaagcacagaggcctcctgtggcctgccagtcatcgagtggcccaacaggggctccatgccagccgaccttgacctcactcagaagtccagagtctagcgtagtgcagcagggcagtagcggtaccaatgcagaactcccaagacccgagctgggaccagtacctgggtccccagcccttcctctgctcccccttttccctcggagttcttcttgaatggcaatgttttgcttttgctcgatgcagacagggggccagaacaccacacatttcactgtctgtctggtccatagctgtggtgtaggggcttagaggcatgggcttgctgtgggtttttaattgatcagttttcatgtgggatcccatctttttaacctctgttcaggaagtccttatctagctgcatatcttcatcatattggtatatccttttctgtgtttacagagatgtctcttatatctaaatctgtccaactgagaagtaccttatcaaagtagcaaatgagacagcagtcttatgcttccagaaacacccacaggcatgtcccatgtgagctgctgccatgaactgtcaagtgtgtgttgtcttgtgtatttcagttattgtccctggcttccttactatggtgtaatcatgaaggagtgaaacatcatagaaactgtctagcacttccttgccagtctttagtgatcaggaaccatagttgacagttccaatcagtagcttaagaaaaaaccgtgtttgtctcttctggaatggttagaagtgagggagtttgccccgttctgtttgtagagtctcatagttggactttctagcatatatgtgtccatttccttatgctgtaaaagcaagtcctgcaaccaaactcccatcagcccaatccctgatccctgatcccttccacctgctctgctgatgacccccccagcttcacttctgactcttccccaggaagggaaggggggtcagaagagagggtgagtcctccagaactcttcctccaaggacagaaggctcctgcccccatagtggcctcgaactcctggcactaccaaaggacacttatccacgagagcgcagcatccgaccaggttgtcactgagaagatgtttattttggtcagttgggtttttatgtattatacttagtcaaatgtaatgtggcttctggaatcattgtccagagctgcttccccgtcacctgggcgtcatctggtcctggtaagaggagtgcgtggcccaccaggcccccctgtcacccatgacagttcattcagggccgatggggcagtcgtggttgggaacacagcatttcaagcgtcactttatttcattcgggccccacctgcagctccctcaaagaggcagttgcccagcctctttcccttccagtttattccagagctgccagtggggcctgaggctccttagggttttctctctatttccccctttcttcctcattccctcgtctttcccaaaggcatcacgagtcagtcgcctttcagcaggcagccttggcggtttatcgccctggcaggcaggggccctgcagctctcatgctgcccctgccttggggtcaggttgacaggaggttggagggaaagccttaagctgcaggattctcaccagctgtgtccggcccagttttggggtgtgacctcaatttcaattttgtctgtacttgaacattatgaagatgggggcctctttcagtgaatttgtgaacagcagaattgaccgacagctttccagtacccatggggctaggtcattaaggccacatccacagtctcccccacccttgttccagttgttagttactacctcctctcctgacaatactgtatgtcgtcgagctccccccaggtctacccctcccggccctgcctgctggtgggcttgtcatagccagtgggattgccggtcttgacagctcagtgagctggagatacttggtcacagccaggcgctagcacagctcccttctgttgatgctgtattcccatatcaaaagacacaggggacacccagaaacgccacatcccccaatccatcagtgccaaactagccaacggccccagcttctcagctcgctggatggcggaagctgctactcgtgagcgccagtgcgggtgcagacaatcttctgttgggtggcatcattccaggcccgaagcatgaacagtgcacctgggacagggagcagccccaaattgtcacctgcttctctgcccagcttttcattgctgtgacagtgatggcgaaagagggtaataaccagacacaaactgccaagttgggtggagaaaggagtttctttagctgacagaatctctgaattttaaatcacttagtaagcggctcaagcccaggagggagcagagggatacgagcggagtcccctgcgcgggaccatctggaattggtttagcccaagtggagcctgacagccagaactctgtgtcccccgtctaaccacagctccttttccagagcattccagtcaggctctctgggctgactgggccaggggaggttacaggtaccagttctttaagaagatctttgggcatatacatttttagcctgtgtcattgccccaaatggattcctgtttcaagttcacacctgcagattctaggacctgtgtcctagacttcagggagtcagctgtttctagagttcctaccatggagtgggtctggaggacctgcccggtgggggggcagagccctgctccctccgggtcttcctactcttctctctgctctgacgggatttgttgattctctccattttggtgtctttctcttttagatattgtatcaatctttagaaaaggcatagtctacttgttataaatcgttaggatactgcctcccccagggtctaaaattacatattagaggggaaaagctgaacactgaagtcagttctcaacaatttagaaggaaaacctagaaaacatttggcagaaaattacatttcgatgtttttgaatgaatacgagcaagcttttacaacagtgctgatctaaaaatacttagcacttggcctgagatgcctggtgagcattacaggcaaggggaatctggaggtagccgacctgaggacatggcttctgaacctgtcttttgggagtggtatggaaggtggagcgttcaccagtgacctggaaggcccagcaccaccctccttcccactcttctcatcttgacagagcctgccccagcgctgacgtgtcaggaaaacacccagggaactaggaaggcacttctgcctgaggggcagcctgccttgcccactcctgctctgctcgcctcggatcagctgagccttctgagctggcctctcactgcctccccaaggccccctgcctgccctgtcaggaggcagaaggaagcaggtgtgagggcagtgcaaggagggagcacaacccccagctcccgctccgggctccgacttgtgcacaggcagagcccagaccctggaggaaatcctacctttgaattcaagaacatttggggaatttggaaatctctttgcccccaaacccccattctgtcctacctttaatcaggtcctgctcagcagtgagagcagatgaggtgaaaaggccaagaggtttggctcctgcccactgatagcccctctccccgcagtgtttgtgtgtcaagtggcaaagctgttcttcctggtgaccctgattatatccagtaacacatagactgtgcgcataggcctgctttgtctcctctatcctgggcttttgttttgctttttagttttgcttttagtttttctgtcccttttatttaacgcaccgactagacacacaaagcagttgaatttttatatatatatctgtatattgcacaattataaactcattttgcttgtggctccacacacacaaaaaaagacctgttaaaattatacctgttgcttaattacaatatttctgataaccatagcataggacaagggaaaataaaaaaagaaaaaaaagaaaaaaaaacgacaaatctgtctgctggtcacttcttctgtccaagcagattcgtggtcttttcctcgcttctttcaagggctttcctgtgccaggtgaaggaggctccaggcagcacccaggttttgcactcttgtttctcccgtgcttgtgaaagaggtcccaaggttctgggtgcaggagcgctcccttgacctgctgaagtccggaacgtagtcggcacagcctggtcgccttccacctctgggagctggagtccactggggtggcctgactcccccagtccccttcccgtgacctggtcagggtgagcccatgtggagtcagcctcgcaggcctccctgccagtagggtccgagtgtgtttcatccttcccactctgtcgagcctgggggctggagcggagacgggaggcctggcctgtctcggaacctgtgagctgcaccaggtagaacgccagggaccccagaatcatgtgcgtcagtccaaggggtcccctccaggagtagtgaagactccagaaatgtccctttcttctcccccatcctacgagtaattgcatttgcttttgtaattcttaatgagcaatatctgctagagagtttagctgtaacagttctttttgatcatctttttttaataattagaaacaccaaaaaaatccagaaacttgttcttccaaagcagagagcattataatcaccagggccaaaagcttccctccctgctgtcattgcttcttctgaggcctgaatccaaaagaaaaacagccataggccctttcagtggccgggctacccgtgagcccttcggaggaccagggctggggcagcctctgggcccacatccggggccagctccggcgtgtgttcagtgttagcagtgggtcatgatgctctttcccacccagcctgggataggggcagaggaggcgaggaggccgttgccgctgatgtttggccgtgaacaggtgggtgtctgcgtgcgtccacgtgcgtgttttctgactgacatgaaatcgacgcccgagttagcctcacccggtgacctctagccctgcccggatggagcggggcccacccggttcagtgtttctggggagctggacagtggagtgcaaaaggcttgcagaacttgaagcctgctccttcccttgctaccacggcctcctttccgtttgatttgtcactgcttcaatcaataacagccgctccagagtcagtagtcaatgaatatatgaccaaatatcaccaggactgttactcaatgtgtgccgagcccttgcccatgctgggctcccgtgtatctggacactgtaacgtgtgctgtgtttgctccccttccccttccttctttgccctttacttgtctttctggggtttttctgtttgggtttggtttggtttttatttctccttttgtgttccaaacatgaggttctctctactggtcctcttaactgtggtgttgaggcttatatttgtgtaatttttggtgggtgaaaggaattttgctaagtaaatctcttctgtgtttgaactgaagtctgtattgtaactatgtttaaagtaattgttccagagacaaatatttctagacactttttctttacaaacaaaagcattcggagggagggggatggtgactgagatgagaggggagagctgaacagatgacccctgcccagatcagccagaagccacccaaagcagtggagcccaggagtcccactccaagccagcaagccgaatagctgatgtgttgccactttccaagtcactgcaaaaccaggttttgttccgcccagtggattcttgttttgcttcccctccccccgagattattaccaccatcccgtgcttttaaggaaaggcaagattgatgtttccttgaggggagccaggaggggatgtgtgtgtgcagagctgaagagctggggagaatggggctgggcccacccaagcaggaggctgggacgctctgctgtgggcacaggtcaggctaatgttggcagatgcagctcttcctggacaggccaggtggtgggcattctctctccaaggtgtgccccgtgggcattactgtttaagacacttccgtcacatcccaccccatcctccagggctcaacactgtgacatctctattccccaccctccccttcccagggcaataaaatgaccatggagggggcttgcactctcttggctgtcacccgatcgccagcaaaacttagatgtgagaaaaccccttcccattccatggcgaaaacatctccttagaaaagccattaccctcattaggcatggttttgggctcccaaaacacctgacagcccctccctcctctgagaggcggagagtgctgactgtagtgaccattgcatgccgggtgcagcatctggaagagctaggcagggtgtctgccccctcctgagttgaagtcatgctcccctgtgccagcccagaggccgagagctatggacagcattgccagtaacacaggccaccctgtgcagaagggagctggctccagcctggaaacctgtctgaggttgggagaggtgcacttggggcacagggagaggccgggacacacttagctggagatgtctctaaaagccctgtatcgtattcaccttcagtttttgtgttttgggacaattactttagaaaataagtaggtcgttttaaaaacaaaaattattgattgcttttttgtagtgttcagaaaaaaggttctttgtgtatagccaaatgactgaaagcactgatatatttaaaaacaaaaggcaatttattaaggaaatttgtaccatttcagtaaacctgtctgaatgtacctgtatacgtttcaaaaacaccccccccccactgaatccctgtaacctatttattatataaagagtttgccttataaatttacataaaaatgtccgtttgtgtcttttgttgtaaaaatcaagtgattttttcataaggttcttttactattggaaaagatgggcagcacgcagttttattttatttttgtaagttttttaatacatgtgaaagcaaagaatactcagcatgcctttctaagtgacgcgtttgcaccttttgttgggaagtactgtatcctgtgctgttagcattctcgataaatctctctgtgaaagtgnnnnnnnnnnnnnnnn

SEQ ID NO: 20169 - DNA, 1874 bp, Homo sapiens
  misc_feature 1, 2, 1871, 1872, 1873, 1874: n = A,T,C or G
nnagaagactaataatctctatttataactaaatcattgagatagaaaaagattcccattgactgtagacttcttcccattttgtcttcccttctgcctgtttccccttcaggcttggctctaggaaccaaagtgattggttgttgttccaacctgggctttgtgactttggttagtgccactaccttcttccctcctttcccccttcaatttggaaataaatttctgtatatgttgcaattttaggtttaggtttgttctttttctttttcattaatcctctctcacctcacagataccccctcccatggcaaataatataataaccagtgaattttcaggaatttaaaaattagcttttttccacttaaaggagaaaaatatttgggactagcagcagaggcagtaagagatgtgaaccttggtgagctctgatacagtgagaagagattatactcatgaaagagaatgttagtgttacagagaagcagccgatagcaaatcgactgtagagacttggcggcggtggcattgccccaggtcgtcagcagtgtggtattatctatgagaacttgagcgacagagtatttcttgatgaatttatagatcatttgagatgttgagttactttagtttagttttgttttgttttttcaaataagtagagactattgtaaaaaacgagaaaggaaaatgaaatgtgcgtgttgatagcaataatttgtttcttttaaagattctaaaaggtctgagacctgtagcattaattatttgagtgccctcccttctcccctcccctcccttttctcttctcttttttcctctcctctccttctcctttattcattgttttgcttttggagtaggtgttgttcaagtatctgtggtttggttctggcattttgttcccaccatccccttcccccattaacttcccccctgcttgccatcctgcagtagtataaatcatgaataaaaaataattttgctgttgtagtatacattggagaaactggcaggttttatttccattattttatttccactatatctatgataagatgcaattataaggagagaagtgactgttttttattgataaggcaagattttcagaaaaatgagtaaaataattaatgaaacatatttagagcacttaatggtctctgttttcaatataattcttgatttcatttttctctggaatatattggccttctacagctattactgaattatagaaactggtttatttctggcagaaagctgcagtgccacctgagttccaaattttaccattctttgtaaacagttggatggattatgataaagaagatgctaccaatgaaatagaaaaccaacgagatgagaagactgtgatcctcatgtactcagaggcacttccctcctaagtcaaagaccatcctcactgactatgtgccaacgcctcgtttcaggcttgtgactcaacaaagggcttttccattgatagaagcagtttgggatttgtagttgcgacttcttcgatagttacctgcacgtccattgctggcaactgacttgtcattaaaacctggctctttggttaagggagctacgctgtggtttattcttaagttacgtggataaactaacctctaacagaaatatactttggttaattttgaaatgtgtcatttttaaacaatcttaaaagtaatacagaattgtgatttattaattttaaatcattcgaacctgtgaacgaaactttttcgaatcagaatagtttgaattaattgtggacgaggttcatcggcacagcgggtggggactgtctcgttatgggaccgttcggtagattatgcttctgtggcacggccgcccaccannnn

SEQ ID NO: 20170 - DNA, 841 bp, Homo sapiens
  misc_feature 1, 2, 3, 841: n = A,T,C or G
nnngtcgacccacgcgtccggttaatggagaaagtcagaaacatggccctggatgatgtcgcgatcctgaatgtggaccccagcgtccgggaaacccccttcgatgacctccagagcctcccaaacgacgtgatctcttccctgaagaacaggctgaaaaaggtctccacaaccactggggatggtgtggccagagcgttcctcaaggcccaggctgctttcttcggtagctaccgaaacgctctgaaaatcgagccggaggagccgatcactttctgtgaggaagccttcgtgtcccactaccgctccggagccatgaggcagttcctgcagaacgccacacagctgcagctcttcaagcagtttattgatggtcgattagatcttctcaattccggcgaaggtttcagtgatgtttttgaagaggaaatcaacatgggcgagtacgctggcagtgacaaactgtaccatcagtggctctccactgtccggaaaggaagtggagcaattctgaatactgtaaagaccaaagcaaatccggccatgaagactgtctacaagttcgcaaaagatcatgcaaaaatgggaataaaagaggtgaaaaaccgcttgaagcaaaaggacattgccgagaatggctgcgcccccaccccagaagagcagctgccaaagactgcaccgtccccactggtggaggccaaggacccaagctccgagaagaccggcggcaaatcaacagtccacttttggacagctgcagagactgcgtccaccgaacgctccaagatacagcgctcgagccgtgcgccactcgtcacctgttgtagagaccaagagcaan

SEQ ID NO: 20171 - DNA, 1675 bp, Homo sapiens
  misc_feature 1, 2, 3, 4, 5, 6, 7, 8, 9, 10, 11, 12, 13, 14, 15, 16: n = A,T,C or G
nnnnnnnnnnnnnnnnaaaatgtattctgatacacaaaataataaaaatgaaaaataaaaaatttggccgggcgcagtggctcatgcctgtaatcccagcactttgggagactgaggcaggtggatcacttgaggtcagcagtttgagaccagcctgaccatcatggtgaaaccccatctctactaaaaatacaaaaattaagctgtgtgtgatggtgcacacctgcaatcccaggtactcaggaggcttatgcgggagaatcgcttgaacctgggaggcggaggttgcagtgagccgagatcgggtcactgcactccagcctgggcgacagagtgagattccatctcaaaaaaaaaaaattgtagattcacattgcagtacaactgtgcatcttgcccattgatttctaaatgtattaactacttaaattaatcctgaatcttttcccaggcttaagtgggataatgttttattgtagatgcatatttcctggctctacccagtctttctttgaagactttatcatcctattttctgaatccagtggctgactttaatcttctctggaggaactagataatttctagactaatgcttacactcatgatccagattgtaatttctgaactccttcttccaaatagaatcaaaacaagaaaggggaaagcctctcaaagcaactgtgcgttaataatgaaacactctttttttctaatccaaggagggtttcatactttttcttagtttcttgccctcttcccttctgatcaataattgtaataggaaatttgcaattgtgccaatactcagattcaatactgaactactttcttgcattgtaattcaaattccaaggttaacaactagctgtatgtttccaaaacaatcttattgtatatgtattttcttaggtgaagtttccagaaatgattttttttttttgcagagccaaacacacatggtaatttaaaaaaataatgcacgtatgtggtaaaaacagtaaaagcaaggtatcaagtaaaaagtgaagagtcctccctttctcattcccattcctactctctaattttttatatatccattttgtaagctataatacagagattccatatactcttcacatactttccccagtggtaacctcttgcataactataggacaataacacactataggacaaaaatcaagaaattgacattgatacaatccatcaaccttattcagagttcaccagtttaacacatgcttattgtgtgtctgtatttagttctatataattttatcacatgtatgctgatgaccaccaccacagccaagatacaaaacattttcagtgtaaagatttctcatgctacccttttatagccacagctacctccctccctccctgtacttccctaacccttggcagtcactaatctgatctttatgtcttgtcatttcaaaaatgctacataaatgggatcaggtttgattggttttcattcagcacaatccctttgagatctatccaaggttttgacatgtatcgagagtttattcctttttattgctgaatagtattaatattttatagtatggatgtaacatagtgtgtttaaacattcgcctgttgaaggacacttgggttgtttccagtttcaggtttttacaaataaagcccctccctgtgt

SEQ ID NO: 20172 - DNA, 3034 bp, Homo sapiens
  misc_feature 1, 2, 3, 4, 5, 6, 7, 8, 3029, 3030, 3031, 3032, 3033, 3034: n = A,T,C or G
nnnnnnnnggagacgggtttcactatgttggccaggatggtctcgatctcatgaccttgtgatctgcctgccttggcctcccaaagtgctgggattacatgcatgagccatcgtgcctggcccgatttttttttttttttttttttttaagaaactgaagcctctacttcggtctcttggtagccttcctcctgggaagctctttcttgaatctagtcaccattccattccaccacgccacatatgtcttctccaggcaacagccaacatcaattgtcagccatgtaagtgagtttcagatgactgtggccccggctaatgtttgactgtagcacatgtgagaggccccatgcagaaccacctagaaccatggagagcagtcaccctgcagaaccatgagtaagttaagcttaggggtggttaattacgcagaaataagtaaacagagcactccaccaggtattaaagattattacaaagattatgtaattaaaacaatacagaacagaccagggttgactacaagatcaatgggacagaataaagttacatatccaatgcctgctgctgaccacagggatttgtcacagatctcatcacttagaaaccctacagtggtttccctggtcaccttccagtcaccactacaccttggctccttttagcactcctccctagcttatcactatatgaaattgctttatctctttgtattgtctgtcacctgccaccataatgtgaatttctagacctccatagcatgcaaagctctagaacagttctttgaacacagaaggtgcttgacaaatattttctgaaagaaaaagaagatacttcaatacctcagtttactaaggacgtggggctaccatatggctgcctgaacaaatacagcttgacattcactttcttgctactgattgaagtgtattaacttgtgtaatcacacaactaccctatggggtaggtgcccttatttctccatttggcagagagggactaagtatcttaaccaaggtcacacggctttcaagtgccagagccaggactcagatctacacaggtctggctccagagcccccaatctaacctcttaacctctctgctttactgggctaaaccttcaccacctatcatatggaaaaagaaattcaatagaaagttatatggaaaaaatacaaccctgtgttaatattagaaaatccatagtaacatgtagaatgaggaagcttcctcaagcccaactatacaggtcagatcggttgaaaaaataaaactaacaaatttttacatgtcaaaatatgcaatatttgaaaatccaaggctaatatctttaaataggcaaagatttattaatactccttgacacacaaacaggaagtgagaaaatgggcaactgacacaaatcgataattaactgtgaggacataggtggtggagtctctcctaatcctctattcttggagatctggatgcctgccattcgcgtatgggaagaacagagacggtcatggaaaacagcatttaatctagaaaggaccacaatgaggtcaaagggcggtctcagggcagtcttaagagctccccatccccaaagaactggcaaggactctccaggtgctcgtatgcgactgctgcccaactcccatcacgaactcagaagacctgtcattttctgaaattttcatgacttctaagacactagttattggggaaaacttcaaattatttaaataatgagaggcgaaaaacattgctaaactcatgaatactctgtatttaaaacctccactggcgatcagggcacatagaatctctactactgatccctgacgctggccatcccccaacccgtcggcccacggaccccagccctgaccccacctcctcccagcatcttacacaaggattctcatcacactccccagagactcgcctgcccagggcccctctctaaccccatatagctcaggtctctgatccagagactgcatcaccgacctctccgactacctatttccagattagagtccctgatcacagagcattgtctaaaataactagctcttacaactacgtccacttcaggaaccgccctgtgatgtcagaactttgaggccgcccggccagggctgcacatgctcagtgaggtcggcgcccgccagtaacaaacatggctccctgaagccgctcaggctcaagagcaacatggaggtctgcacttaatcgctcctctccgggggcggccataccgaggaggcgtctcttccgtgcaggcaggctctcctggggacctcagagattctctccagcggcagcagaaaacgggcaatgggtggattcgggtccagattctggcaggagggagtttgggatcgagatctggaaaaaagcactagactggaagaggacgcgatggagtcggagccgctggcggggacaaaaaccagaggccggggaaggcgccggtgggaggcaaggcacggatggactttacctgcgcacgcgtcgcagccatctccgcgcacagtggtggccaccgcgactggtgctgaagtgtcggcgtgtgccgggcgctccgctgggacccgggttgctggccctgagtctcagctttctcatctgtacggttgggacaagtacagtaaccctcgcccgtcaagacgggccagggctgtggcgagggtccacgccttagagcaggcacctatcttgtgcagggccctgagatggggtctgactcagttcctgcggggaacttcaccagtgacccagtcagtgcccttcagttaaagaccaccaggagcacacttgcaggagtagggctgattggagccattgtacagtgtcgggaacataccaggacactgagaatagtgtcatgtcataaggacccagagcagatggaccctgctgtgatgcacaaagaggaccacgcaagatatgataaagatctacatcactgaattttggttccatttttgtatctcagcttccaggaaataaaaaagaattctaacattcatacnnnnnn

SEQ ID NO: 20173 - DNA, 4430 bp, Homo sapiens
ccgcgtccggctgggaagtttctgcgctccccgctgtccagtctgcatctccgcgcctcccgccgggcccccgcggtcccctcccgcccgcttcccccgctgccctccctcgctgccccctaccctctcccggggctcccggccctctactcccttcgggcgcgggcccctcgccccgcccgggcgcgccccccctcccgacccacgcgtccgcccggatgcccgggccccgaggggctgctggcggcctggcccctgagatgcgcggggcgggggcggcggggctgctggcgctgctgctgctgctgctgctgctgctgctgggcctgggcggcagggtcgagggggggccggccggcgagcggggcgcaggcgggggcggggcgctggcccgcgagcgcttcaaggtggtctttgcgccggtgatctgcaagcggacctgtctcaagggccagtgtcgggacagttgtcagcagggctccaacatgacgctcatcggagagaacggccacagcacagacacgctcacgggctccggcttccgcgtggtggtgtgccctctcccctgcatgaatggcggccagtgctcctcgcgaaaccagtgcctgtgtcccccggacttcactgggcgcttctgccaggtgcccgcaggaggagccggtgggggtaccggcggctcaggccccggcctgagcaggacaggggccctgtccacaggggcgctgccgcccctggctccggagggcgactctgtggccagcaagcacgccatctacgccgtccaggtgatcgctgaccctcctgggcccggggaggggcctcctgcccagcacgcagccttcctggtgcccctaggcccgggacagatctcagcagaagtgcaggccccgccccccgtggtgaatgtgcgcgtccatcacccgcccgaggcctcagtccaggtgcaccgcattgagagctcgaacgccgagagcgcagccccctcccagcacctgctgccgcaccccaagccctcgcaccctcggccgcccacccagaagcccctgggccgctgctttcaggacactctgcccaagcagccgtgtggcagcaaccccctccccggcctcaccaagcaggaagactgctgcggtagcatcggcactgcctggggccagagcaagtgccacaagtgtccccagctgcagtacacaggagtgcagaagccagggcctgtacgtggggaagtgggcgctgactgtccccagggctacaagaggcttaacagcacccactgccaggacatcaacgagtgcgcaatgccgggcgtgtgtcgccatggtgactgcctcaacaaccctggctcctatcgctgtgtctgcccacctggccatagtttaggcccctcccgtacacagtgcattgcagacaaaccggaggagaagagcctgtgtttccgcctggtgagccctgagcaccagtgccagcacccactgaccacccgcctgacccgccagctctgctgctgcagtgtcggcaaggcctggggcgcgcggtgtcagcgctgcccaacagatggcaccgctgcgttcaaggagatctgcccagctgggaagggataccacattctcacctcccaccagacgctcaccattcagggcgagagtgacttttcccttttcctgcaccctgacgggccacccaagccccagcagcttccggagagccctagccaggctccaccacctgaggacacagaggaagagagaggggtgaccacggactcaccggtgagtgaggagaggtcagtgcagcagagccacccaactgccaccacgactcctgcccggccctaccccgagctgatctcccgtccctcgcccccgaccatgcgctggttcctgccggacttgcctccttcccgcagcgccgtagagatcgctcccactcaggtcacagagactgatgagtgccgactgaaccagaacatctgtggccacggagagtgcgtgccgggcccccctgactactcctgccactgcaaccccggctaccggtcacatccccagcaccgctactgcgtggatgtgaacgagtgcgaggcagagccctgtggcccggggaggggcatctgcatgaacaccggcggctcctacaattgccactgcaaccgcggctaccgcctgcacgtgggcgccggggggcgctcgtgcgtggacctgaacgaatgcgccaagccccacctgtgcggcgacggcggcttctgcatcaactttcccggtcactacaagtgcaactgctaccccggctaccggctcaaagcctcccggcctcctgtgtgcgaagacatcgacgagtgccgggacccaagctcttgcccggatggcaaatgcgagaacaagcccgggagcttcaagtgcatcgcctgtcagcctggctaccgcagccaggggggcggggcctgtcgcgacgtgaacgagtgcgccgagggcagcccctgctcgcctggctggtgcgagaacctcccgggctccttccgctgcacctgtgcccagggctacgcgcccgcgcccgacggccgcagttgcttggatgtggacgagtgtgaggctggggacgtgtgtgacaatggcatctgcagcaacacgccaggatctttccagtgtcagtgcctctctggctaccatctgtccagggaccggagccactgcgaggacattgatgagtgtgacttccctgcagcctgcattgggggtgactgcatcaataccaatggctcctacagatgtctttgcccccaggggcatcggctggtgggtggcaggaaatgccaagacatagatgagtgcagccaggacccgagcctgtgccttccccatggggcctgcaagaaccttcagggctcctatgtgtgtgtctgcgatgagggcttcactcccacccaggaccagcacggttgtgaggaggtggagcagccccaccacaagaaggagtgctacctgaacttcgatgacacagtgttctgcgacagcgtattggccaccaacgtgacccagcaggagtgctgctgctctctgggggccggctggggcgaccactgcgaaatctacccctgcccagtctacagctcagccgagttccacagcctctgcccagacggaaagggctacacccaggacaacaacatcgtcaactacggcatcccagcccaccgtgacatcgacgagtgcatgttgttcgggtcggagatttgcaaggagggcaagtgcgtgaacacgcagcctggctacgagtgctactgcaagcagggcttctactacgacgggaacctgctggaatgcgtggacgtggacgagtgcctggacgagtccaactgccggaacggagtgtgtgagaacacgcgcggcggctaccgctgtgcctgcacgccccctgccgagtacagtcccgcgcagcgccagtgcctgagcccggaagagatggacgtggacgagtgccaggacccggcagcctgccgccctggccgctgcgtcaacctgccgggctcctaccgctgcgagtgtcgcccgccctgggtgcccgggccctccggccgcgattgccagctccccgagagcccggccgagcgtgccccggagcggcgcgacgtgtgctggagccagcgcggagaggacggcatgtgcgctggccccctggccgggcctgccctcaccttcgacgactgctgctgccgccagggccgcggctggggcgcccaatgccgaccgtgcccgccgcgcggcgcggggtcccattgcccgacatcgcagagcgagagcaattccttctgggacacaagccccctgctgttggggaagcccccaagagatgaggacagttcagaggaggattcagacgagtgtcgctgcgtgagtggccgctgcgtgccgcggccgggcggcgccgcgtgcgagtgtcccggcggcttccagctcgacgcctcccgcgcccgctgcgtggatatcgacgagtgccgagagctgaaccagcgcgggctgctgtgcaagagcgagcgctgcgtgaacaccagcggctccttccgctgcgtctgcaaagccggcttcgcgcgcagccgcccgcacggggcctgcgttccccagcgccgccgctgacgccgccgacgccgccctcggcccagacctcggtgatcactgagggatttccgcgagctcggcctcacttctgccccgacttgtggctcggacccagggaccttcagggcccgcagaccctcccggcgccttgagacccgaggcgcccctaccggcccccctccccggttagcgggcggttgtaaggtctccggcgggcgctgcctgccttcctcccagagggtgtttcctagaaactgataaatcagatcgtgcctctttaaaaaaaaaaaaaaaaaaaaaaaaaaaaaaaaaaaaagg

SEQ ID NO: 20174 - DNA, 949 bp, Homo sapiens
  misc_feature 947, 948, 949: n = A,T,C or G
atagggagtcgcccacgcgtccgggcggcccggccaggcccccggcacttcctcgtcctcggcccgggtgccctgcccccgtccaggagccctaggagtgctacggggggccggagccttgcccgggccgctgccccgtccctggattcggggctggacgcagcaagcggggcgctgtgtccccaagctccccgtcctcgggggagcttttggaagagtcccagatggaagcgaccaggctccggcagaaggcagaggagctagtgaaggacaacgagctgctcccaccaccttctccctccttgggctccttcgaccccctggctgagctcacaggaaaggactcaaatgtcacagcatctcccacagcccctgcatgccccagtgacaagccagcaccagtccagaagcctccatccagtggcacctcctctgaatttgaagtggtcactcctgaggagcagaattcaccagagagcagcagccatgccaatgcgatggcgctgggccccctgccccgtgaggacggcaacctgatgctgcacctgcagcgcctggagaccacgctgagtgtgtgtgccgaggagccggaccacggcacagcctcttcacccacctgggccgcatggccctggagttcaaccgactggcatccaaggtgcacaagaatgagcagcgcacctccattctgcagaccctgtgttgagcagcttcggaaggagaacgagggctctgaaggccaagttggatcagggcctggaacagcgggatcaggctgccgagaggttggggagcgacaatttggagctcacgaagtgtgctgaccaccgggaacaagaaggtgcttctgggcggcaggtcaacgcaatggacggcggcagacgcgtggggccagaggctcgtgcgcaggaggccaagggggcctgggacagaccagcgaaggacannn

SEQ ID NO: 20175 - DNA, 1716 bp, Homo sapiens
  misc_feature 1, 2, 1716: n = A,T,C or G
nnaggtgaattcctggaaaaggcgcaaaattctgggcgaaggtgaacgtgcgcatatagctaaaggtctggaacagagccagttgaacacaagtgatgagattatcgcgtcggatataaaaagcatatgccgtgttgaaattttaaacatgccaagcaggcagaatgcacttttgtgtaaaggaattggatgttaccaaacactagaatgtcatgggttcaaaaaatatcctacacaactggcatacattttggttgatcttagtctgtgatacattaacagttcatgtaattatacctgatcatttgggataatgaaatgaagttagttgtagatgaagtaaagttataaaagagattaaaaatgcggtaactttttaagataataatcatacagaaggtatgaagttcattttcggtagtcttccaacctctcaggtgcctaataatttatgtttgaggataacaggtaacaaagatagtcgagataggagaacgtgtctattagtctttgcatctaaaaggcagtgagttacgttcctgccttccactgtgtttctgacatagcaatgtttgtttgatattggaacctggattcatattttatgtaaataatatcaagctgtatatttttcaaaggttttttaaactttggagactctttcttttgttaagcagttaaaggaataaaagagctggaaaaaaaattgtaccttcaactcaggttattccatataacatacgtattctctgctgttacgtaagttttccgattcacagagtccattcatgtacatcacttacacttaaattgtaaaaataattagtctgaccatctgactttaaaagactgttgctacacgtacatcatgtttaggagaatgtgggatatggggaaggggagaagaagacagtccagtggtgactagttgctgctgcttaacctatggcctattgctgcccattgtccctggttttaatccaagcctattatggaatactgcagtgagattatccattctcagcctgttgagctgcattaaattagaatgggaggctgtaagtaaaactcatgcctcttggccaggcattctgcaccagcgtgtccctctgtggcttgctggtcctggttgttctcagactggcagctgagctgcgcttggcttgaagcatactgaagcctgcagccagggacaccgccattgaatcagatggagggggatgaaaaagcagagaagggggcatgtggctggctattcttgctctctggagaacagcttcattgttaggagtagttaggctgaaagtggacttcccactgctgagccacccaagaggcacactgagcattagtgacgggtgagccacataagaataatgtttaaaaaagagaggacttgaagtagctatgcgaaaatttagaactttgcactttgttaacgcttatttatggtttagtgttgatgccatttggagtgacctatgggttggacccatgtctttttattattaaggtctcaatctggctctggttaataaacgtttcccgcttcatcccttaggaaaatggtccaagtctcctcaggcttttggatactgaattgttataaaacacatcaattctgccagtttataaaacactggaattgtattagacatgtctgagtatgtacctcggccgcccccccggtggaagctccaattcgccctatagtan

SEQ ID NO: 20176 - DNA, 1585 bp, Homo sapiens
  misc_feature 1, 2, 3, 4: n = A,T,C or G
nnnncgaggtcgacggtatcatgggcgccctttttttttttttttgtttaaaatcatttattattatcaggagtgccttttaggtggaccgctctgtatgactctcatgcttcaaaactattttttattcaagtgacttacaatggccctaggaaacaagttctgttattatcccccattttaaaatgatgaaaatggacaaagcaaaagcaagcaacttaaccaataccccatggcctcacagcctttagaatagtcatattatataaatatggcaataacaatgcactgaaaatgtctccaaaacaaactctacattttaaaaaatgtataacaggaatctaaggaaggggtcttacttctctgattcagggagtgcgaaatcccttaaactcatatcagacctgtgatgaacaaactcacactaagttttaaaaactgcttaatttactttatcatgactagtaatatataagaattttgtatatactttattaaaaataactttggaaaactatttttgcctgatcagcaataaaactactgataagataagctggttatcaaataattccctagtgttaatctggcaaataattgttataacccaatcttgtgaattgaagacaggcacattatagataatcaaaaatattagaaacacatttaaaatgtccatatgtttagtataaatagaaaattcattgactaaaataagtcatgaaacatggactggaattttgtgagctattaagtttcattttgttttactgttttaaaatttaaatagtttggctcatttctacatttgttaaaattgtaatcttaaaatattaaaaaaataactttacaaacacacagatatgactagccattttatctaagttataaaatagttaccccagggagccttcaagatccctatattttaaagcttatttcaaaaaccatcactacttcacatttttaaactgcatccttgcattacagaactgtaaatgtgttgtcatacagtaaatatccacatcccaattctaattacaccattcttgttgttaacacagagcactgcttctaataaaagcatggcatagttctacagtttcaatggcaaaattaaaggttttttttgttgaagagataatgaagcaatcaccaagatatttgaaacaacaaagttaacattacaatgatttcaagaaaaactaagaatatatacacttacataaaacaaaaaaaaggaataattcactttatgagagaagaaaagagagacagatttttaaaatatttggattctttagcccatatggaaattaaaaaaaaaaaaaaaactggagagagaaacagaaagagacagagagaaagagagagatgctacttgacattttaaagaccaaaaacttgcagtagtaaaaatacattctgaaagtattttaaaacttaaatttcactggcaaaagtaggtaacaggggagacacagattcagtgccccgcgtctatacaaagcaccttttggccacattcctgtcctggagaccagccaatgtcaactgatctatgaatctgttattgcttgtgagt

SEQ ID NO: 20177 - DNA, 702 bp, Homo sapiens
  misc_feature 1, 2, 3, 4, 5, 6, 686, 687, 688, 689, 690, 691, 692, 693,694, 695, 696, 697, 698, 699, 700, 701, 702: n = A,T,C or G
nnnnnnaacgagcgccgggttccgtccaagcactgtgggagcaggcaacccctttgaagcaggaaaagacagtctctagagcaacatggaaaggatccagtatttgttttcaggcaaaagcaagcctccaaaagccccttggttcttctctgtgtgtctcgccccttctgccttgtacaccagactgccggcaagcaagcggggaggtggcgaacagctgggatcctccagtgaaaagtttgctcagcgcgagagatgtcaagaggctgggattgtcgcctatcgggaggtggggagctctctcactcacacttcctgggaaatgaaggagaactaataggcagcccgcatttgcagccagccagcctgggtggtattccttgaagtgaagcgctcataaatcccttctggggccagagccggtttcacaagctgcaggatttgggtggcctgcctgctctttgggagcgggcttgggaagctgaagaaattgaatcaggacctcaggccctttacagactcccttctacacttggttgctgattaagaacattatgtggcatttaaaatggcacaattatcttccgttggccgttcctagctaaaagtagactcctatcagcccgtgactgacgacaagaaggctcttcgtccctgtttttgaaataaacatgggtataatcagnnnnnnnnnnnnnnnnn

SEQ ID NO: 20178 - DNA, 2793 bp, Homo sapiens
acccatctacaaagacctctattacataaacactgcttcttacaggaaacaaacctcttctgggatctccttttgtgaaaaccagtttgatgtgctaaaagtaaaaagtctattttccagtgtggtcttgttcagaagcagccagatttccaatgttgtttttcccctccactcagaaacccctgccctttcccttcagaaaacgatggcaggcattcctctgagtttacaagcagagactcactccaacccaaactagctgggagttcagaaccatggtggaataaagaaatgtgcatctggtctcttctgttgtttttatttcatatcagattaaatttctttaccatgttggctaagtctaaatattagagatgaggctgtgcctactccctggccagctctgctgatagcctatgatgggttccaatgggaaatgactctttactattaaaagacaaggaaagctctgacttcgtacttctctgatgaatggcaatgtaaatgaacaaggctccatgtgactggagcatggaagtgaatgctactttcttaatttaatctgccctgtcctacctgctcctctgattgttagccatcacataacttattgaatgcttgccatgtgccaggcactgtgctgagtgccatacatacatttcatttaattatccaataatcctacttactattgtttattctcaatttacaggtgaggaaactgagacatagaaagcttaaataatttgctctaggtccctatactaattgagatgttttcagcagacaaaaataagtcactcttacgcatgtaaaaatattctttcactcataataaaagaaatgcaacttaaaaccatactgagatcctttttaaaactgtcagattggcaaagatcaaaaagcttgttaagactcctagctggcaagcatgtgggaaataggtactctcataacagctgacagaagtacatattgaagaggacaatatggcaatgtccttcaaaattataaaagcactaactctttgatccagtagtttccacttctaggaacttaaccttcagatatattttcaccagatataaaatgacatacgtaagaagttattactgcatcatttgtaatagctaaagattagaaacaattaattgctatggaacccttaaaaaaggtggctctaaattccttaagaaagatatccaaaacaaattaaggggaaaagggagggttgcataacagcatgtaacataacactatttgtctaaagaatggggaaagagaagcggttgtctgttcacctcatccttgccactccgccttatacctcaccatcggagaacttaccatcccccaaatatatcctgctggcactacaccttcgtaactgctgttcccactgcccccacaacactccaatctccaccttcctgccaaccttgagatattgtatgcatatatacatatttcctttgtttaaaatacaaatagcatactatgcatgctgttctgcactttgctttttttttatacttgcaattagagctgcctcatttcattttacagctgtatactattccattgaatggataaaccataatttatttaatcagtccctcactgacagacgtttccattgtttcctgtcttttgctataaataatgctgtaatgaatattcttgtgcatatttcacattaatttatgggattacatctgcaggataaattcttagaaccaatggtggtttgtggggagggtgacagggtggataggtacaggattgggagacttttcactgtatctccttttgtatttttttgaattttgtaccatatgtatcacctattcaaaaaaaataaaatatttttaaatacagttgctggccaaagattgcttaaatgctccttctctttatatatttatctgactataatttacaactaaagccaggcgctaattatgtcaaaattccttaatgcaaatttgtcaggcagccctgtggcatttttatgaagaggggaaaatacggattttaaaagaacgatcataaacatcaatgctagataggaagaaaaatagaagagattccttcctttcagacaaaacatgcagtgaacagtgttaggccctgcccaaagccagctgcacaacattagcttgggtccagatttcaagggagagctgtaccaccacgatcagtgctgcccacttccctataccaggttgatcctgccaaatgccacccctgcactctaatgctttataacaaacgacaaaacaacagagctcgattctcagaagttacagaaagaagagtctcttcctgaacacctactttagtagtccttcctaatcttttacttctcaacttctttcctcctatcccttgtaatcactcaacattcccatacgaagaaactatgggtgggccaggcatggtggctcgtgcctgtaataccggcactttgggaggctgaggcaggaggattgcttgagcccaggagttcgagactcctgtgcaacatggtgaaaatttgtattggaatccggagcatccacctccctccacttgcagcctgaggaattctgacccttcggtgatttccaaaagcctctggacgcaactgtctgtgaggcggatctgcccttcgccggcctcggggctggaggacgacgcctcccgacgcgcctggggtcccagggaggccgtgaggagcctgcccctcggccagggagtgaccgctctctgcgtcgcggccgttagggacgacccccaggcggcagcctcttc

SEQ ID NO: 20179 - DNA, 2730 bp, Homo sapiens
  misc_feature 1, 2, 3, 4, 5, 6, 7, 8, 9, 10, 11, 14, 2723, 2724, 2725,2726, 2727, 2728, 2729, 2730: n = A,T,C or G
nnnnnnnnnnncgngaatacttctagaattaattaacgcggggaaaatagtggcaaagccacaaagattcagatcttctgactcgaagttgagagttctttatactctattatgctgcctctccagggtaatatttgcctttccggaaaatgggattaaatatgatttgtaaataaaggacatctgccctccttttttgggacattaaggcactttataaatggacttttattgtctcatttttcgtatataattatttccatcatattctttatggaagatgcaattaattttaacttttttactcttataaaaccagttcctgacattttaaaaaacaatatctgtaaaatggatccttttatgagtgaatttttctgctaattgcccaaggctaaatccaatttaaggattgcttagtttctttattttgtttatggtctctgaactggtatttttttataaaccaggctaattcacaggtcataccatttcattcttgtcgtgttggcttccagtcactggaaaagcttttgcattttaaagatttttagagccatgcaaaactgggcattaaatgttgcataaagcaaatcttttaagtaaggtaaaatgttgaagtcttaaccagaattcctacaactaattactaaaactgctatttctaactcttcatgaaagcattacctttggaaagttaaactttttttttcctttcatcaccgtctttgaaacaaattattttccaattcataagaactttggtaaaaaaaaaaataaaaggaaattatatgtttttctttggacattcattggaaggcttgttgaagacatgatcccccagaagccttagtgacccagatctcaaccagagactcaagatagcctcaaatacagtgaaagattatgtatccaaaaaaaaaaaaaaaaaaaaaagaaaaggagcagggaaggacagttctagttaaagccaaatggatgtgagtctgacaagggtgtctttgatttatatttcctaactgcaaattacacagaaagtgagaatggggaataacttttattaagtatttatgtgccaggcggttagtgtggccttcatgttattacatttaatcctcaaatttctacaaaggaataattttgcatgattttatgattgacggagcattttcaaatctcctctaattctcataacatctctgtgaggaaggaatttttatccttattttacagatgaggaagctgtttggagataatttaagtgacttgcctggggaatctagccagtagtagagtactgattaatcaggtgctgacatctgctctgctttgtgtatgtaattcagcagtgcttcaaagatccaagaagctgtagcagatctcaatacactctcctataaaattagtgaataatcaccatgacaaaattggtatggcggaacagtcattatacattatttagactcattccttcttccagtgcccttatgattatttcctacctttaccattgatcttaaactgtgcaggctaaaaagaggaaccagaactcccttaagcacttttaagactatttaaaaaataaagttttgttggcattgaagagtaagctgcttaagggactgaatgaaaagatagtaccctttgtggctgtatgaagagagaaactgaatttctatccaagagaccttaatttagtttattagggaattatcttccccaaaagtacaagtaattttgcactgcaggagaaggataagtagatttgatttacatcacattttatacacacctttcaaaaggaagaaatctgtttcataaatagtagtaatctatgcttaaacttaacatttaatgttgacttcttacaacagccttgaaaattatttgtaattttgatcatgatgttggaaagcttgtaataaagaatatctttctcttctgcatccttttatcctcaaacttagcatggattcacatgctgagtaaatgtttggttaactagtgaacattttagatagttgtgtcaaaaataagggttagggataggtaaaaccagtaatttactgttttttacagaagacatctcagcatttctttggcatttttgcacaaataaatgactatatattcaccttggccatttttttttttaagtagccctatgagctgctcattctttttcatatacagtggaagtatacagatgttatccattttacaaattgttggatcggaatttgacagaattgggactgtggaacctgggtcacttgaattttctatattttgtatggccaaatcaggaaccagacagtctccatagtctcctttgtttttatggaaaattgcatattcacatatttcattatcctaatggtattgtcatccaacattgaagaggtctttcttgacaggtgcatctaagaagtcactactgtttcccatctcagattaaatattccgaattattttacctactccttggctccaacacaaatttatgactcccgcaattctcaggatttcacccggacatggttcttcccttaactccattaatcagggaaattcaactgcaataacatgaatgatcgtccacgccgccataatataacagacaaagaacacaatcagcaacacaacagaacagcgccaagaaagacgaaatagagcaggaccagaaaaaagaagcacatacaaaacgatttcttctattctannnnnnnn

SEQ ID NO: 20180 - DNA, 1883 bp, Homo sapiens
  misc_feature 1, 1882, 1883: n = A,T,C or G
naactacttgatttttgtttagttaaatgcaataattattatgcttagttttataacctgctctccttgtgaattcttccttcaaatgattacttaacgcagtagtaatagctagctagtaggatgtcctttaaattttgtgcaaaaaaaaatttataccaggtatttggaaatatactttacaatattggaaaatgaagtatttttaatgtattacagcaattatgtttctaagcttaatgttaagcatgtagtcttagaataggacatgaaattaaattgtatgtagctgggaatatattgcttcagaaaactgaatgtgtatgtcggtcatattgcctttataaccatgctaatatctatgctttatacatactcaaacttgccttgccttaaaaaaatacatactacatacttaaatcaggaattctagccatctcacagaataccaactaaaactaagtgcattgagatctgagattggtaaacccagattcatttaccacagctgtaattaagtttttagaaactattctctttttggggaaatccattgaagttaatttctgttatcttattagaagaaaatgatgttgatatgtgtttcagattttccatttgaaatcttataattaatttgatttatttactgtaagtaggaggtataaatgacactcttaaattggaaggaggggtgttttagtgtctgttttaggtcaaaattagtgattctatttttatcaaaagttttatcctgaagtttcaggaccactcttccttaataaacttgttaatggaaagcgagctttatgaacatttaaaaatgttgctgctgctttgttgcttaaaaagaaagttgccaagagagacttcttagggaaaatatttgggttttttttccaaaaattgctgaaatattgttttgccatttttaaaaagtctcaggttattaccactctgccattaaatatttgtatgcctgcatttttaaaaattctgtgcatgtactttatggagtacattctatttttgttttcagataccctacaaccaattttttttagtaatcttttagaattgaaattatcataaatgatcgagaataatcatcacatagtttaagattgtatatgttgagtagtttaaaacaatctttgcattttacagtaagaatcaaagtcccttcagtgtgcctttgtcagctaatatgtgaccagcaatgacaaccttgggagtatttattaaatattatgctatgaatataggcaacacagaacagggtttgcagtatagcgtcttgatgctaaattctcatatacctctacacgagaaatatggaggagaaaaacaagcatttacatatattcttcgtcactttgaagatgcatggcctgaactcgactgcttgtgtttgtttacatatcaggcatacccaggcatctcctgcagccagaggttccattgctgtctttgctcagtcctcttttaaaatatgaattagtggacaggcacggtgcctcacacctgtaatcccagcactttgggaggtcgaggcaggtggatcacgaggtcaggagatcaagaccatcctggctaccactgaaaccccatctctactacaaaaaaattagccgggcgtggtggcgggcacctgcagtcccagctactcgggaggctgaggcacgagaatggtgggaacctgggaggcgagctttggtaggctagatacgccctggcttcagctgtgggacgaggacgttttttcaaaattatctgatttgatgcgttctgaaacaacgcggcaaattaggagtataaagagtctctccaaattcgacgccttacgaaaacacaattcgcggattatcacaaggagcagaann

SEQ ID NO: 20181 - DNA, 2021 bp, Homo sapiens
  misc_feature 1, 2021: n = A,T,C or G
natagcttgtccacctttgggaaacctttaatcttccttactattccttggtgacatccaccccaatgccaaagtgtcccctgcggtaaaaaatttttaaagccctattagtctcttaagtgccattgttgtaataattaacaacaatagtaatatttcaaattaaccgatatccttgtttaccttgactaatgaataggtttatttaactctaccgcacctgattaatagaaataaaccgtactatatttctaatggtcccaatggtgatgggttccaagaaccccctaggatactaaagtccatgatgttcaagtcccttatagaaaatggtgtagtatttgcatataacctgtgcacatcctaccatacactttaaatcatctctagattacctataatagctaatacaatgtaaatgctttgtaaatagttgttatactatattgtttaatgacaaaaaaaagtttgtacatgttcagcaaaggcgcaaccatccatttttttccccaaatatttttgacccacagtgggctgaatcacagatgcgaagcctatggacatggagggccaactggagaagcataagcaggggatactttttaggttgctacttcagcaggcaacattcagaccatggaagtctagagaaagattataaatctgaacttaccgctaaaaattttaaaatgggaaataaatccaaggagtttttagtcatgcattatgattttaatctatgttatgccaagtatagcattccaaaatatacatctagagactaaaagtaaatgctctatagtgaagaagtaataattaaaaaatgctactaatatagaaaatttataatcagaaaaataaatattcagggagctcaccagaagaataaagtgctctgccagttattaaaggattactgctggtgaattaaatatggcattccccaagggaaatagagagattcttctggattatgttcaatatttatttcacaggattaactgttttaggaacagatataaagcttcgccacggaagagatggacaaagcacaaagacaacatgataccttaggaagcaacactaccctttcaggcataaaatttggagaaatgcaacattatgcttcatgaataatatgtagaaagaaggtctgatgaaaatgacatccttaatgtaagataactttataagaaatctgggtcaaataaaattctttgaagaaaacatccaaatgtcattgacttatcaaatactatcttggcatataacctatgaaggcaaaactaaacaaacaaacaaaaagctcacaccaaacaaaaccatcaacttattttgtattctataacatacgagactgtaaagatgtgacagtgtacattatatgacaatgcacattagccagcaagtcttttataggtggtttcagcagcaacgataaataatgcagaattcagctccagcactttatttcaaaagaaatttcctgcctccctccaagatgcagggtgaggaggtagcttggggttgctattggagaagtattcagtttgctactttgtgtcaccccttgccattcttttatccccagttaattattatctgcatataatataaatctgctagaccataaattaacagctttcaggacagatgccttgaaagttcttagggaggttaaacaaaatattgtagcctaaaacctcctctataacaaacatgcacacaatggaagtgatgtcgtaagtgagtgatggggcaggaaggacctagggctctgtctcgactataaaatcaccttgccccaaacaaatttaaattataacttaggaggttcatggactttcatccattctggaaacaaagagaaaaaccaaatcaaataccagaatctgttttctcactgggcaaatagcaacaggatccccagttttaccacaattgtttccctgtctccatgtagataccacatggagacagggaaacaattgtggtatctaccccacgcgtccgcggacgcn

SEQ ID NO: 20182 - DNA, 1266 bp, Homo sapiens
  misc_feature 1263, 1264, 1265, 1266: n = A,T,C or G
gtccggttcagaggactctatacagggacgtgatgctggagaattataggaacctggtctccctggatatctcttccaaatgcacgatgaaggagttcttgtcatcagcgcatggcaacacagaagtgttccatgcagggacattgcaaatacatgaaagtcatcacaatggagagaaaccttacaagtgtaaggagtgtggcaagaccttcaatcagcaggtaacccttaaacgccatcggagactccataggggagagaacccttacaaatgtgaagatagcgacaaagcttacagtttcaaatcaaaccttgtaatacatcagaaaattcatactgaagagaatccttacaagtgttatgagtgtggcaagaccttcaggccgacgtcataccttgtgtaccatcgtagatttcatactggagagaaaccttacaaatgtgaagaatgtgacaaagctttcagtttcaaatcaaaccttgaaagacataggaaaattcatactggagagaaaccttacaagtgtaatgaatgcagcaggacctttagtcggaagtcatcccttacacgccatcgtagacttcatactggagagaaaccttataagtgtaatgattgtggcaagaccttcagtcagatgtcatcccttgtataccatcgtagacttcatactggagagaaaccttacaaatgtgaagaatgtgatgaagctttcagtttcaaatcgaaccttgaaagacataggagaattcatactggagagaaaccttacaagtgtaatgattgtggcaagaccttcagtcagacatcatcccttgtataccatcgtagacttcatactggagagaaaccttacaaatgtgaagaatgtgatgaagctttcagtttcaaatcaaaccttgaaagacataggataattcatactggagagaaactttacaagtgtaatgaatgtggcaagacctttagtcggaagtcatcccttacacgccattgtagacttcatactggagagaaaccttaccagtgtaatgagtgtggcaaagcctttcgggggcagtcagcccttatgtaccatcagagcaattccatggtggtaggggaacctttcacgttgtggtgctcggtccccaggtctttggtcatggtacacaccttgcactcatgggggatcctagtggggacacccggtgcgtgtcatggtgtggcactttccgaccttcgcaccctgcggtctggcggtcgtcggggggacacccagnnnn

SEQ ID NO: 20183 - DNA, 1008 bp, Homo sapiens
  misc_feature 1008: n = A,T,C or G
gcgtccgcgctccgctgccgggggcgggagggaggaatggttgcttcacgccccgggggaagagacgggaagctcggctctgggttgcgggccccggcgtctccgcgtggggcgcaccgtccgacccgcccctcccggtgtgcagcgccccgcaccgccccgcctcgcctgggagaagccgccgggacgcgccgggctggagtgggcggttataggctttgagctaggccgtttccgggaggcggagctcagaccccatttcctttctccacatccaggtcaggtggcgtttgctgtggcggctaggcccgcgtgcgctggagacctccgcgctggcccccgcgagcctcctgccctggcccggcgctgcggctctgccgcggcggcagcatgggtggcccccggggcgcgggctgggtggcggcgggcctgctgctcggcgcgggcgcctgctactgcatttacaggctgacccggggtcggcggcggggcgaccgcgagctcgggatacgctcttcgaagtccgcagaagacttaactgatggttcatatgatgatgttctaaatgctgaacaacttcagaaactcctttacctgctggagtcaacggaggatcctgtaattattgaaagagctttgattactttgggtaacaatgcagccttttcagttaaccaagctattattcgtgaattgggtggtattccaattgttgcaaacaaaatcaaccattccaaccagagtattaaagagaaagctttaaatgcactaaataacctgagtgtgaatgtgtcgacctccgtcagataccttatacgcaccaccatgaagcaagccacatggccgatgcctccgtgtgaaagcatgctaaatccgcacaaatgtccagtgccccacattctccaaaacaaaacgaacagtactaagcagagccaagacaactacgctaatttaaaccgagcccgcgatactatctaccacacattctccaaacacgtcccgtctaan

SEQ ID NO: 20184 - DNA, 1976 bp, Homo sapiens
  misc_feature 1, 1975, 1976: n = A,T,C or G
naccgaggagggcccacgcgtccggctattttgtttgtagtattgtggaacagtcttgttatggagtgccagcttagaggttgttgcaaacttgtctagaagtgagagcatggttttttttagccctttgagagtctacatctaatgaacattcttgctcacccataaataacgtcaagcctcaatgtcaccgtcacgttgggatactctttctcatctggcatcctagacaggacaaggttggttacctttccttccatgaaccatgaacctgtgacggcatcattcatcctgacttcaccaagctccgcctgtgggtgaggccagagctcccactggcaatttttagaagagccagaggctccctgcttcctctagaaataacagttcagggtgaagcatggagggtttcagttcccagacaatggaaccatttagagacaacacagttggacatttccactttttccttgattcctggaagtccagtgggttctgcagctgaaaaagccctgggtcccagcagcagagagacaggacagaggggatgcttgggcggggagggacggtaacctgcagaacagattccatttttatagaacgagtacacgtttgctaaaacagtcctgctttcccagactggattcccaccacagggacagtcggaactcaggactagctccagcgacatctttcctccgaattcaagccttctatcacaatgtcaaaacagctatttataaagccattttcattgtacttgataacagcacgagtcccaaaacttttagaaataaaataggacattggcttgattgaaaagagggactttttaaaaattgttctttcgtcagaagccttttggatgacttacaatagctctgatgaagataccaccccagcgtcagtccaataggtcagtgagtttcaacaggcatccatccctcccatgaagggattctggtgatgggaagtttctgtaatgacaggaaagcattgaccctcattgattgtcaactttggtattagccatgaaagacaggatgctcattgggtgttctgtagagtgaggaatgctgcctattccctcccagaacgtctgacccaggggtgtgtgttgaggagccctgggggaaatggaccaagttttcccacagagcagtattaggctgaagagcaggtgactggtaggccccagctcccatcattccctcccaaagccattttgttcagttgctcatccacgctggattccagagagttttccaatttgggaagccatgagaaaggtttttaaatcttgggaagatggagagagggacataggatagttgactccaacatgacaggaagaggctggagattgggaattggccatcaaccaagcctgtagtagtaaagccatggtcccgcattggaattacttggggaacttatacagttctgatacccaggctctcctagaccagttcaaccaattctaggtgggggactcaggcatcagtgtgtttcgtagctccccgggtgttttccctgtgcagccgagcttgggaaactgccatgctttttggatgtcaaggcgctgttggaggctgggtgtgacagcacagagccaggttgtcttgtggaaaccacagccacgggtttgccactggctcagcatggcctcactgccagtcccagcctggctgagggacaagatggtttctcttgggagttcctgagtggagcacccttccaggctttttgaaagccagctgatctgtggagccttgttaagggactcaatacggtgtttggatattgatgtttttccttgagactgtcttgtccatcaataaagatggaggatgtctcctctttgaaccccgcttccccgatttccgttggtatgaggtcccggctcgctcgcctctcgcgcttgtaaatgtgtgcatgttcggtatactttctctactagcggtcccggctacann

SEQ ID NO: 20185 - DNA, 1044 bp, Homo sapiens
  misc_feature 1044: n = A,T,C or G
gcgtccgtttggataattcttggcttaatttcttagctacttgaaggttaatttgcaagacttttaaaaccttagaaaagttttaaggttgcaaagttatcaacactggggcagagggtggagaggccaatgcgggtagaaggaggcagttatgtttatattgaaggtgaaatttttctttcatttagaatggaaaacatccccaaatgtatcattataaactagtcagccttgactacacaaaattgacctttaagttgcttgagaaaaacacaatgcaaatcgttcagaagggtcaacatcctttggtgctaaaatcttgtgtatgttttcagaatggctttttctgtatgttatagaataatcactaaaggaaaggtagttgaatttaaagtcatgaagcaagactctttaattcagttattttaaacaagaattaaaaccccaaacatccttggcaggctttgaagcacacagaattttctagtatttcttattaaatacaccaataataaacatatacttagtttacctgatgagtttagacataattctatataatgttcgcttatattcatttattaactagcaacacttgtgcaagaacaaggtattctgcttgaaaacactgatttttaagttcctgttgcccgattgtaaagaaaatcatctgacacagaagcctggattttgctctcctaacactggtgttttccttgagcctctaattcaaataaaacaaactgatacaccttacagccttattcatctgtgtctggataactcacttttcatctattgaataagaaaaagtgtttaaacttaataaaataaaaaattgtgcaccaattactacagatccttgaaacagtaagccttggattttagtcaagtaatccagtttttttttaatttaaaaaaaaccatcaccttttaaagaactttaaaaacacctgtgatgccaatgtggacattgccgctgccatgtctttacacgcatgtgtcgtatagctctgtcatcgagttgaggaagtccatggtttn

SEQ ID NO: 20186 - DNA, 4422 bp, Homo sapiens
  misc_feature 4406, 4407, 4408, 4409, 4410, 4411, 4412, 4413, 4414, 4415,4416, 4417, 4418, 4419, 4420, 4421, 4422: n = A,T,C or G
gggcttacagtggcgggagttggaggcgataacgatttgtgttgtgagaggcgcaagctgcgatttctgctgaacttggaggcatttctacgacttttctctcagctgaggcttttcctccgaccctgatgctcttcaattcggtgctccgccagccccagcttggcgtcctgagaaatggatggtcttcacaataccctcttcaatcccttctgactggttatcagtgcagtggtaatgatgaacacacttcttatggagaaacaggagtcccagttcctccttttggatgtaccttctcttctgctcccaatatggaacatgtactagcagttgccaatgaagaaggctttgttcgattgtataacacagaatcacaaagtttcagaaagaagtgcttcaaagaatggatggctcactggaatgccgtctttgacctggcctgggttcctggtgaacttaaacttgttacagcagcaggtgatcaaacagccaaattttgggacgtaaaagctggtgagctgattggaacatgcaaaggtcatcaatgcagcctcaagtcagttgccttttctaagtttgagaaagctgtattctgtacgggtggaagagatggcaacattatggtctgggataccaggtgcaacaaaaaagatgggttttataggcaagtgaatcaaatcagtggagctcacaatacctcagacaagcaaaccccttcaaaacccaagaagaaacagaattcaaaaggacttgctccttctgtggatttccagcaaagtgttactgtggtcctctttcaagacgagaataccttagtctcagcaggagctgtggatgggataatcaaagtatgggatttacgtaagaattatactgcttatcgacaagaacccatagcatccaagtctttcctgtacccaggtagcagcactcgaaaacttggatattcaagtctgattttggattccactggctctactttatttgctaattgcacagacgataacatctacatgtttaatatgactgggttgaagacttctccagtggctattttcaatggacaccagaactctaccttttatgtaaaatccagccttagtccagatgaccagtttttagtcagtggctcaagtgatgaagctgcctacatatggaaggtctccacaccctggcaacctcctactgtgctcctgggtcattctcaagaggtcacgtctgtgtgctggtgtccatctgacttcacaaagattgctacctgttctgatgacaatacactaaaaatctggcgcttgaatagaggcttagaggagaaaccaggaggtgataaactttccacggtgggttgggcctctcagaagaaaaaagagtcaagacctggcctagtaacagtaacgagtagccagagtactcctgccaaagcccccagggtaaagtgcaatccatccaattcttccccgtcatccgcagcttgtgccccaagctgtgctggagacctccctcttccttcaaatactcctacgttctctattaaaacctctcctgccaaggcccggtctcccatcaacagaagaggctctgtctcctccgtctctcccaagccaccttcatctttcaagatgtcgattagaaactgggtgacccgaacaccttcctcatcaccacccatcactccacctgcttcggagaccaagatcatgtctccgagaaaagcccttattcctgtgagccagaagtcatcccaagcagaggcttgctctgagtctagaaatagagtaaagaggaggctagactcaagctgtctggagagtgtgaaacaaaagtgtgtgaagagttgtaactgtgtgactgagcttgatggccaagttgaaaatcttcatttggatctgtgctgccttgctggtaaccaggaagaccttagtaaggactctctaggtcctaccaaatcaagcaaaattgaaggagctggtaccagtatctcagagcctccgtctcctatcagtccgtatgcttcagaaagctgtggaacgctacctcttcctttgagaccttgtggagaagggtctgaaatggtaggcaaagagaatagttccccagagaataaaaactggttgttggccatggcagccaaacggaaggctgagaatccatctccacgaagtccgtcatcccagacacccaattccaggagacagagcggaaagacattgccaagcccggtcaccatcacgcccagctccatgaggaaaatctgcacatacttccatagaaagtcccaggaggacttctgtggtcctgaacactcaacagaattatagattctaatctgagtgagttactgagctttggtccactaaaacaagctgagctttggtccactaaaacaagatgaaaaatacaagagtgactctataactctggtctttaagaaagctgccttttcatttttagacaaaatcttttcaacgctgaaatgtacctaatctggttctactaccataatgtatatgcagcttcccgaggatgaatgctgtgtttaaatttcataaagtaaatttgtcactctagcattttgaatgaatagtcttcactttttaaattattcatcttctctataataatgacatcccagttcatggaggcaaaaaacaagtttcttgttatcctgaaactttctatgctcagtggaaagtatctgccagccacagcatgaggcctgtgaaggctgactgagaaatcctctgctgaagacccctggttctgttctgcctccaacatgtataattttatttgaaatacataatcttttcactatgcttttgtggggttttttttaagtatgtgtaaaaatgtgatgctcagataagtacatttatatcagttcagtgttaaaatgcagtctcttgagttaaagtcatctttattttaaatgcagtgataaatgtcaactcttcggagaaactaggagaacaacaacagaaagctgtgtttgtcttttttctctcaaatatatctcccgtatgagatttcaggtccccatgttttcaccaagcaatctgctatgtcagccaacccaacatcactttctacaggaggttatgatttttgccatttactagaggaagatgttttatgaaatcaatttggggtttgaattcaggtgcagtcatcagttctttaggggctgcaatgttttaaaaaaaataagtcatcagattttaagaaaaaagtgatgatttcttattgatatttttgtaacagaatatagctcttaactgaaaatccagaaccagaaacataaatcttgagtttcttttcatgtacataaaaagcaatagccttttagtatagatagccctgagccaaaaagtaatagaattttctctagatatttaatacagagagtgtatagactgactctaagttaataatgtgcaaaatatcttaaacatccctccccttattcaacaattatgtatcagtgatcttgaaccattgttttatatttttcacctttgtaacctcatggaaagaggctttacatactttctatgtactatttacttagaagggagcccccttccagtcatgaaacttcatttgttttatccatatccctgaggactgtgtagactttatgtcagttctgtgtagactttatgtcagtttttgtcattatttgaaaatctattctgacaactttttaattcctttgatcttataagttaaagctgtaacaactgaaattgcatggatcaagtaagcatagttttatccagggagaaaaataaaaggaagccatagaattgctctggtcaaaaccaagcacaccatagccttaactgaatatttaggaaatctgcctaatctgcttatatttggtgtttgttttttgactgttgggctttgggaagatgttatttatgaccaatatctgccagtaacgctgtttatctcacttgctttgaaagccaatgggggaaaaaaatccatgaaaaaaaaaagattgataaagtagatgattttgtttgtatccctacccatctcctggcagccctactgagtgaaattgggatacatttggctgtcagaaattataccgagtctactgggtataacatgtctcacttggaaagctagtacttttaaatgggtgccaaaggtcaactgtaatgagataattatccctgcctgtgtccatgtcagactttgagctgatcctgaataataaagccttttaccttatctgatgtccttttttgagctttttgcattacctagaagcagtctacaaaaaagaactatagtagtcaagaatcccttctacttgttcattaaaatgtttattccccagttataatctatttcaagctgaaagagcttttaataaaaaacatcttgcnnnnnnnnnnnnnnnnn

SEQ ID NO: 20187 - DNA, 2479 bp, Homo sapiens
  misc_feature 2475, 2476, 2477, 2478, 2479: n = A,T,C or G
cgccacgcctggtctctgggacgcccctccggacccgtttcgcctcgcggagccggtaggtccaggtgcagcggccgcagtgctgcgtccgtgcgccgcgggctggggcggtctcaggtgtgccgaagctctggtcagtgccatgatccggcaggagcgctccacatcctaccaggagctgagtgaggagttggtccaggtggttgagaactcagagctggcagacgagcaggacaaggagacggtcagagtccaaggtccgggtatcttaccaggcctggacagcgagtccgcctccagcagcatccgcttcagcaaggcctgcctgaagaacgtcttctcggtcctactcatcttcatctacctgctgctcatggctgtggccgtcttcctggtctaccggaccatcacagactttcgtgagaaactcaagcaccctgtcatgtctgtgtcttacaaggaagtggatcgctatgatgccccaggtattgccttgtaccccggtcaggcccagttgctcagctgtaagcaccattacgaggtcattcctcctctgacaagccctggccagccgggtgacatgaattgcaccacccagaggatcaactacacggaccccttctccaatcagactgtgaaatctgccctgattgtccaggggccccgggaagtgaaaaagcgggagctggtcttcctccagttccgcctgaacaagagtagtgaggacttcagcgccattgattacctcctcttctcttctttccaggagttcctgcaaagcccaaacagggtaggcttcatgcaggcctgtgagagtgcctattccagctggaagttctctgggggcttccgcacctgggtcaagatgtcactggtaaagaccaaggaggaggatgggcgggaagcagtggagttccggcaggagacaagtgtggttaactacattgaccagaggccagctgccaaaaaaagtgctcaattgttttttgtggtctttgaatggaaagatcctttcatccagaaagtccaagatatagtcactgccaatccttggaacacaattgctcttctctgtggcgccttcttggcattatttaaagcagcagagtttgccaaactgagtataaaatggatgatcaaaattagaaagagataccttaaaagaagaggtcaggcaacgagccacataagctgaagtcacctcgcgttgtttagagaactgtccacatcaatgggagctgtcatcacttccactttgtaaacggagctatcaacaatcctgtactcacttgaagaaatggggccttgctgggaggaacagcatgtaaaactggaacttctaaccccgtcccaaaagaggcggtgtagagcctaatagaagagactaatggataaacctacaagttatttaaatatttaaattattaataaactttttaaagagctggccaatgacttttgaatagggtttgtagaagatgcctttcttcctgtttggttcattgtattgtattaggttaagctctactagggtaatgaaggctctacttttcactttttaaaagtggacaaaagagtgtgattttctttttccaaaaattcctgagtatcaagacgtgcaggtcatgctttggagcctatgcactgtacacaaaggcaaaaccctatgactttggcatcatctgccattgatgtccagcctctgacatgctctttgatttgttaaatgttaaatgagactttaaggctactagaaactagtaattaagtttcttaatggactgagtagccacctacttgtccggctagaatgtttgttgatgtatgagtttagattaacactcaaaagcactaggacagatgtacatagaaggtgcctactcattgtattttgatgatttcattaacaggtaaataaaagttaatacaaaaggaacgagtgtgacaatatgaatatctgctcaatcatcgggcacaattactttcatttggtgacttccaaggacaaaaaggtagtatgagtctggactcccaagatggatctaactctcaaggtatgttctaactgcttccagggaagggtttgttaggcatggcaactgatggcaggtgtccagaaagagtgacctggtgtccccgaggaagctgggttaactctttactgtgtccacaaaactacccatcatatgaggaaggggtatacgcagtgtgaccctcaaaaagcttttagcctagcctttgacagaaatgagtatgcattaaaaaaaagtctatttttcacattaaggttctaaaaattgtttccagagttttaaattatttatgtgcctgttgcttcaaagaggacttggtagcatttcctaaattttgtaatctggcttccgataatccaaagggaataactcaaatgtatgaataggcattttaaatgggaagaaactgttttttggatgaatgattaaaagtgaactgtannnnn

SEQ ID NO: 20188 - DNA, 1930 bp, Homo sapiens
  misc_feature 1, 1926, 1927, 1928, 1929, 1930: n = A,T,C or G
ncagcacgctggcgtagggtagtatgtttcaagacaccatagtaggccagttacattttaattaagtcatcgacagtattgacacgtaaattgtatttttcaatctgtgctcatcaaaattaaaattagttattgatttagtcatcacatttaagtagaacacatgtggcacaatagtattaagtatatttgagcacttttgcaagacagaaagtatttacaagcatctattgctactttatgcctaatgaaatataaaatgtaggatgatgagagactttgtggcattctttcatttaaacctttatgaaattaaccatctagttcatcattacatactcctagaaaaccatccatttcactgcccacattttggcttcctaccacaaattccacataagacttctctatgaaggaccagtcatttacattgctcatttcattctgtgttcagaagtcagtattgtctttctccaataattaaggtgcaatacaaattaaatcaaccttgattttccagactatttgaataataacttgcttttatggctttaaactccaggtctttcctttttaaaatatttctgcattctcttttatgaactagatcaggatgccgtgtttttcctgtgctttcacccccaaaaggttttgtgcatgtgtatgaatacacataatattagtgaatgtgaacccatgttctatacgcactaaacacacagttaatatataaacgcctgcttcatttgtttcaacaccttcattatcaatatgattcatattgatgagatatagtgatgcataatgagccaggcagagagctgaaatgatatcagttaatgatgtcacagtgttagcaccctgcatggatgtggtcaaaatatcattcaagttgtacttcctagtttttatcatcatactactatgtcatatgattttcagactaatttaacatgagaaatgttttggccctaaaggatttcacttaacctagttaccctatttcagtaagtattttggaattcaaccctcgaattattttttctcatttcagcatagtgataggggatgcaatgaggcttcattattttttatgacctgcccctcatttgctctgatgttccctaaattctgtaatcatatcataacttttgttatgaatagagaggaatgggctcactgaaacctgacactagaaattggtgggtgatgctcataactgcaaacacttagcttattgaagtgcctctatttacatgttctttagttataatatgtatttttctaacagaaatacacgtctgtaattggtatatattatactttgtatgtgtcacaacaaaagctaaacagaggctaaagtctttagcagagaagaatgaattacaaatttaccaataagagctctgtttatggttctgtattgaaggacaaccatgacaaccttctgtcattttcacgaaggccaagttggtactttgattatagccatcgtagaacattagcactagaaatctgtctcccttacaatgacttacctagctagcatcaagtaacttgtatcacctgctttaaatgtaagggatagaaaatactattttgtctacactgaaaaacattattattcattgataagtagtaataattataaaagtaacattctttaaagcaaacacattgaaaatattattacaggcagaaccctgatttttaatttatattccctgctgcagacattagccttctttaattcttttgccattacatacatgtttcggctacagactgaacacgaataaagtccctaaggagggaaacttagatcggaggggcttatacttgaagcattcaaggggggacaaacctgagggggtcacaaggaaatattccttataggagggggtttaaagggtggagaagaaacannnnn

SEQ ID NO: 20189 - DNA, 1751 bp, Homo sapiens
  misc_feature 1, 2, 3, 1707, 1708, 1709, 1710, 1711, 1712, 1713, 1714,1715, 1716, 1717, 1718, 1719, 1720, 1721, 1722, 1723, 1724,1725, 1726, 1727, 1728, 1729, 1730, 1731, 1732, 1733, 1734,1735, 1736, 1737, 1738, 1739, 1740, 1741, 1742, 1743: n = A,T,C or G
  misc_feature 1744, 1745, 1746, 1747, 1748, 1749, 1750, 1751: n = A,T,C or G
nnnagtactgccggtggctagtgtttcccccccgcggatctgccctctcttttggtcttcccggtgatgccatgtttcgggccagtgatcgtccatcccgtgcttaatacatcggggcgaggccccagagcgacgcgagagaccacccagagtggcccgagactcccagatcagctaccaggcaggatattccaagggcttagagatgaatgcccaggagctgaggataaagggcccgatctttctttgggcaaggttaagcctttactgcatagcagaccacacagaagggtgtgggccaccagagaattttggtaaaaatttggcctctggccttgagcttctaaatctctgtatccgtcagatctctgtggttacaagaaacagccactgaccctggtcaccagaggctgcaattcaggccgcaagcagctgcctggggggtgtccaaggagcagagaaaactactagatgtgaacttgaagaaggttgtcagctgcagccactttctgccagcatctgcagccactttctgccagcatctgcagccagcaagctgggactggcaggaaataacccacaaaagaagcaaatgcaatttccaacacaagggggaagggatgcagggggaggcagcgctgcagttgctcaggacacgctcctataggaccaagatggatgcgacccaagacccaggaggcccagctgctcagtgcaactgacaagttaaaaaggtctatgatcttgagggcagacagcagaattcctcttataaagaaaactgtttgggaaaatacgttgagggagagaagaccttgggccaagatgctaaatgggaatgcaaagcttgagctgctctgcaagagaaaataagcaggacagaggatttgctctggacagagatggaagagccgggaacagagaagtgtggggaagagataggaaccagcaggatggcaggggcaaagggctcaagggtgaggaggccagtgggaccccacagagttggggagataaaggaacattggttgctttggtggcacgtaagctccttgtctgtctccagcacccagaatctcattaaagcttatttattgtacctccagcggctgtgtgcaatggggtcttttgtggaaatcaaggagcagacaggtttcatgtgtactgtcaccacgtgggatggaaccagaggcatggaagcaagacgctaaatgaagagggccataagggctgggattcccaggcaccttaggaacagcttgtctttttttttttcctctccaaaaaaaatgtttaagggacggtgtctcctgtcacccaggctggagtgcaatggcacgatcatggctcattgcagcctctaactccggggctcaagcaatcctcccacctcagcctaccgagtagctgtgaccacagctgcccctcaccatgctaagctaatttttttaattagatagtacataaacgtcccaaaattagaagataaaaagacatgagggatccattctaatttgtgtttggagtgtaatggtccagctccattcttctgcacatggatattcagttttacacaacactgtgaatgtaatgaatgccactgaatcatacactcaaaaatagctaaaatggcaaattggctgttatctctttttaaccaccatttttgaaaattaattataccaaaaaaccattgaatagtgcacnnnnnnnnnnnnnnnnnnnnnnnnnnnnnnnnnnnnnnnnnnnnn

SEQ ID NO: 20190 - DNA, 1201 bp, Homo sapiens
  misc_feature 1200, 1201: n = A,T,C or G
ccacgcgtccggctgtggcatcccattgttcatatttgccaagtcttctgtaaagatgtctaggacgaaatattttatgtgctaatgcatgtatttgtaaaccagatttgtttaccactcaaaattaacttgttttcttcatccaaaaaagtttatttcttccacgtacttaaattttctgtgtgggtataatatagctttctaatttttttctttcacaaaggcaggttcaaaattctgttgaaagaaaaatgctttctgaaactgaggtataacaccagagcttgctgtttaaaggattatatgatgtacatcagttctataaatgtgctcagcagtttaacatgtgaatcctgttttaaagtgctcagatttcaactgtgtaagccattgatataacgctgtaattaaaaatgtttatatgaaataacttaatgttttaaatttatttatgtagatcacatcatttttatcgtatgcagtgcaaatatgtgaaatgtcttttggtttattccaacaattatttattttagaaagtaagtttaaagactttaaggacattcaaagtttaaaatagtgttcaaattgcaaaatttggcaatcttcatataaattggtttcttttctaacttttcaaaaactaacattaaatgtcaattataggaaaacatagttggaaatgtaatcatccaaagatcatttttaaaatgaaatttaattagcacatattgaacatttgacttaattgttaaaccccagttttgttttgtttttttaatcagatttttgcacactgattagtttttgtgttgtggcttttgttgctttattattcaaggtttttttttttttttcttccccatgggggagattgtcttccaatgtttaactacgtttaaataaataaaaattgaattttattgttcatttatataaaatctgataccttgatgtaatttcacaatacagttccaatttttatggcttttataattacaatgatattttcttctataataaaatccaaagtaaacatttaaattgtagaactgatatttttcatttatatgaagtataagcctctactgggtctatattgtgaatcatcctgcctttcaaatttgtttcataattgttagatgaaaactatttttttggagatgttactgaagttgattgagcaataaaagtctacttaann

SEQ ID NO: 20191 - DNA, 6643 bp, Homo sapiens
  misc_feature 1, 2, 3, 4, 5, 6, 7, 8, 9, 6619, 6620, 6621, 6622, 6623,6624, 6625, 6626, 6627, 6628, 6629, 6630, 6631, 6632, 6633,6634, 6635, 6636, 6637, 6638, 6639, 6640, 6641, 6642, 6643: n = A,T,C or G
nnnnnnnnngtcctgatttttgttgcttcttgtagtttgctgcctttttgttgggtaggaagtccttggtcctcttctctgtgtggtctgtgtccatgccctggtccaattcccggttcgtattggctgggctgctcttgtgtctcttgtcctatcgttgtgcgtgagtacttgggtttgggacattgggctatttcctggtcttcaccggggagttccttaaggggaaccgagccgggctacggggcgagcgcggggtcggtggtcgtcgtggaggcccccgcgctttaaaataatgcccgcggcgcccgcgcgaccatgcaatggcgagcgctcgtcctggggctggtgctcctccggcttggcctccatggagtattgtggctcgtcttcgggctggggcccagcatgggcttctaccagcgctttccgctcagcttcggcttccagcgtctgaggagccccgacggccccgcgtcgcccacctcggggcccgtgggccggcctgggggggtatccgggccgtcgtggctgcagccgccggggaccggggcagcgcagagcccgcgcaaggctccgcggcgtcctgggccggggatgtgcggcccagccaactggggctacgtgctgggcggccggggccgcggcccggacgagtacgagaagcgctacagcggcgccttccctccgcagctgcgtgcccagatgcgcgacctggcacggggcatgttcgtctttggctacgacaactacatggctcacgccttcccccaggacgagctcaaccccatccactgccgcggccgtgggcccgaccgcggggacccttcaaatctgaacatcaatgatgtactagggaactactcattgactcttgttgatgcattggatacacttgcaataatgggaaattcatccgagttccagaaagcagtcaagttagtgatcaacacagtttcatttgacaaagattccaccgtccaagtctttgaggccacgataagggtcctgggaagcctcctttctgctcacagaataataactgactccaagcagccctttggtgacatgacaattaaggactatgataatgagttgttatacatggcccatgacctggcggtgcggctcctccctgcttttgaaaacaccaagacagggattccatatcctcgggtgaatctaaagacaggagttcctcctgacaccaataatgagacatgcacagcgggagccggttccctcctggtggaatttgggattctgagtcgactcctgggggactccacatttgagtgggtggccagacgagcagtgaaagccctttggaacctccggagcaatgatacaggattactaggcaatgtcgtgaacattcagacgggccactgggttggaaagcagagtggcctgggtgccgggctggactccttctatgaatacctcttgaaatcttacattctctttggagaaaaagaagacctagaaatgtttaatgctgcatatcagagtattcagaactacttaagaagagggcgggaagcctgcaatgaaggagaaggagaccctccactctatgtcaacgtgaacatgttcagtgggcagctgatgaacacctggattgactctctgcaggcctttttccctggactgcaggtgctgataggagatgtggaagatgccatctgccttcatgccttctactatgccatatggaaacgatatggtgccctccctgagagatataactggcagctgcaggcccctgacgttctcttctacccactgagaccagagttagtggaatccacatatctcctctaccaggcaaccaagaatcccttctacctccatgtaggaatggatattctgcagagtctggaaaagtacacaaaagtcaagtgtgggtacgccacgctgcatcacgtcattgacaagtccacagaagaccggatggagagcttctttctcagtgagacctgtaaatatttgtatctgctgtttgatgaagacaatccagtacacaagtctggaaccagatacatgttcacaacagagggacacattgtatctgtggatgagcatcttcgggaattgccatggaaggaattcttctctgaagagggagggcaggaccaagggggaaagtctgtgcacaggccgaaacctcatgagttaaaagtcatcaactccagctccaactgcaatcgtgtacctgatgagaggaggtactccctgcccttaaagagcatctacatgcgacagattgaccagatggttggtttgatttgatctgctctctgtgaggcctcatcttgaaccagaccttaacgaccaaacccagaccatgccaaagtccagtctgaaatgaaaggggacagaagtcttgctgtccatggtggtgtaggaatttctgtgcaacacctcaccacgtctggttaatccttgcacacttcagtgtttctctcctgttcaataaaatgccctgttaaggatataatttgaagtgagaagatacatggaaattgccctcttatgacatgttgatgttataagcacaatagatggggcatctttggattgatgttcacagctttatacttcagaacctaagtctcttcactttgctggcacctgctatactggagtattgctatgtctttaaaaaattttttttattatattttatttttttgagacagggtcttgatatttttttgggacagggttacctgggctcaagtgatccttctgcctcagcctcccgagtagctgggattacaggtgagcaccactgtacctggctagctacttctttgttagaggattgagaatgaaatttctgcaaaagggcccatggttcatttggtatccctatttaattgcattgaaaatgtcatcctttctgttgttagataattggggtcttcccctgatatccaaccgtgattttggatcacatgggagaaaaagtcatccagtttttcatgtttgcctcaagtaatctttacagtgttacaaattatttgcttaagaagaatggtcttaaccagaattcttaacagatagtctcttaggttattatgttatggtctaagaggttaactgacatcttttggatggtattttgcattttgaatatgaacttacctgaggaactcccatagttccagaatcaggtgccttttagggagagaacaatacctaagattgtctgagcttccatctttctcatatttcctaagcaaggattctcacttctgaccatatttgggttagagttctgttttgtttctgttttctgtgtctagtgccaattagctaaatcagggagaaagaaatgatcacatgacttttagcatccttgagccatttctctgtgtaatacaggctttagattagtgccttatattggttttggtttggggcactggatgtcgcagctactgctatggtttcaggaggcctgtttagccacatggtgagaccgtggtgaaagggggatggaaattgcttggccagtctttgcctttcatcctgtaaaagtaagcatgtagaaggaggaagttgtgctaaaatgcctttgtttttttgttattattttcttagccagaacatctctctttgaactcacactgatacacacctgctactcttacacagtgcagcagggctgactcttagtctggcttccatgaagcgtcatgggtggaaacgcattctagtaaaaaaggtaggaaatccctaaaacttccagcctcacatagcacggttctcacctgtcactgttttcccacctctaaggatttcatgtacatcttttcaaagctagaaataagcactgtctaagtttatgttgcatttttagtcaaaagggagaaatcttattccttcttgaaaattttaagtgttatggttttatatagttcagttctttgagatttttgaaaagagtattttcagtaataaacgtgccatctctatctcttaaacatttattacaacaattgttttaaaatagaaaaaataaaatgcttctattttaccttttttcatttcagaagcattattctgtttattaacagtgtcccatctactgaatagaaaactttgagaataatatatatatatattttaaatgttttcactgactcattgaaaatgttaattacacacacatgcatgcatgcacacacgagcatacttgtacctttgtctctgggcaaacaggtgggactgttagtgacccatttgggaaaatagagcatctcagagaaggaggtgagttcttcctgcctgtgatttctcttggcgctcccctcctctcccgctctggcttctgtggcggcagtggtgggtaagcactccagtgttctcttaatgaggcactttgcctgtcactcgagcaagcctgggtgttccttcctcctcatgctcctggaatagggaatagggatctcatgcttgcaaactacacaatgctgcaggtgcttcccaggggccacaggctgtcaggaaacgtgttttatgttaagtcacaaacccacttgacttctgggtactggaattaataccagtgggtgagactgagggtgagtgagttagtacatattaatcctggttgttgagcttccagactaccccgtccaaagtttgatgctatgtagtcagtggtttgtggggctggatgccagaaggttctttgagccagtttcaaaggttacttgtttttttttttttttttaaagtcagaatgttaacagctgtgatatatcctgcagggcttttgcagtttcttctgttctgtgttctgaaatcctgggtagagaatggctgaggaggagattaccagagaagttgctttgctcagtgctttgccccaggattgcctcaaatctgagtggacttcatcctttgcggcggctctgagcctggcccatcttcctattcccacgtgtagctagtgtctagtgtcagctttgctcaatgtggtggaaacattttgcagaactgttgtagaaagctgccttatagttggcttgacaaagcataattctctcataacaaactttcaaatcattacagtagcttagctactttagttgatgtgaccgaggaatcccttctagaatcataggtggcaagggagggtttgctagctctccatttgcactggccattgtgaaaaaccagcttctgtattcaaatctttccttcatttttttaaattttttttttggcagcgcttgtgctggaacttactcattgtaactgaatcctcagggcttttcttgttttagatcatggactgtgcacgtgacacttaaataattttctatgtatttaaagaaaaatgcaccaggatggtgtctgtgcacgtgactattagaggagcgtctgtagaagtacctggtttggtcagtgcagttgtgcaatctgagggccttgtttcctcctcccctttccccttctccccaccaaaggaaaatatccctcttaatgatttcgtagttcagtttactgaatgattaccacctgtaattcctctttggattgtgtagactcaacatgagacattcctttctgctttctggagggcaccaggggcctttctctttgataaattttttttgtctgttgacaaaaacaaaaatcttttttcaaatgtagtgctggtgaaaaggtagggctgagtgattaccttagccacagggtggctgagcaggaactttagaagaaaatcctgagctttcctgtccattcccagcatccagctcctattctagtgcctcttccctgcagggcagggaccccttgggaaatcgaggaggtgggacgggctgggccctgtgtcccaggtttcacagggctcagggttatgctcccgcttgaatctggacgtgaatctggtaaaaatatcaagtacctgtggaactccctgattctataccctcttccttctttctgcaaggcagaggaataatatttttaaaggttattttgttttagttttaaatagcaaaacacaagctgcatttttatttattttgcataagaaaggtaaatctttttacaaaaaaaagtatagagttggaaactctgggaaaacttacggaaatacacaaatgcttctctgtaatgtgcaatatgctttgcaactgtagatgatattttatgtttaatctgtaaataagaaatgtatttaaattaaaagggatctttttgtaaaaggaccaaatgttcttttataaatgtaataaggaatatcttgctctttaaaatttattaggatttttatgagtaatttttattaaaagatttctttttttgagtggtaaaacacacaaaaacaaaaaaaaaaacaaaaaaaaacacgggcgcgcgcccccccaacacaacccccccacgggggcgcccaacacaaacacaaaacaccacgcactacctggaaaccagggggccccaaagacggacccccaccaaaacccacacaccggccccccacccccccacccccccacactcggacaacacccccccaccacgccagccaccacaccccaccacgaaccccccaccccccgcgacaaaggaacccccaaaccgggccccaacacannnnnnnnnnnnnnnnnnnnnnnnn

SEQ ID NO: 20192 - DNA, 630 bp, Homo sapiens
  misc_feature 1, 2, 3, 4, 574, 611, 612, 613, 614, 615, 616, 617, 618,619, 620, 621, 622, 623, 624, 625, 626, 627, 628, 629, 630: n = A,T,C or G
nnnnagtcgacccacgcggtccgataaattttaaaagatgattattcatttaaaatatattctacctgtgtttatttatagagcttcgttatttatccacatagtaaaacatacctccttttagaagagaggagtcagttgagacactgcatttttgtatgtgatgaaaacagttttctaagggtttgggaaactttatatggttggggataagaattgaatgcaaattaatgaactagatttgcatttatggagttacctcatcatggagttaccttggtctgtcccacgtcaattaatcttgattccttattttcatagaccatcctctagaacagtgttttcacactgtgtatcatgatcctataatgcaggggtgtccaagcttttgtcttcccttggctacactggtagaagaattgtcttgggccacacataaaatatactaacactaatgatagctgataagctaaacaaacaaaaaaatcacaaaaaatctcataatgtttttttgagattgtgctgtttttttagttgtgttttcaatggagaaatacatcatctgttgtcccanaaaaaaaaaggttaatatgaataataataaataatannnnnnnnnnnnnnnnnnnn

SEQ ID NO: 20193 - DNA, 2293 bp, Homo sapiens
  misc_feature 1, 2, 2288, 2289, 2290, 2291, 2292, 2293: n = A,T,C or G
nnagtagggccgggtgtgaaatcggacgagggtagcgcgttcgtgcgtcctagttccagtacagcgtggagggtttaggcagcgtgttctgattctttgcgggacggcgagcgcatttgtgctttgcccgccgcggcctaggaggccttttgaggccgcgtagtcggtgtttttgaactgactctacagcttctggcaggccgtgcggcgccctgacccggcctcaccatgttggtgctgtttgaaacgtctgtgggttacgccatctttaaggttctaaatgagaagaaacttcaagaggttgatagtttatggaaagaatttgaaactccagagaaagcaaacaaaatagtaaagctaaaacattttgagaaatttcaggatacagcagaagcattagcagcattcacagctctgatggagggcaaaatcaataagcagctgaaaaaagttctgaagaaaatagtaaaagaagcccatgaaccgctggcagtagctgatgctaaactaggaggggtcataaaggaaaagctgaatctcagttgtatccatagtcctgttgttaatgaacttatgagaggaattcgttcacaaatggatggattaatccctggggtagaaccacgtgaaatggcagctatgtgtcttggattggctcacagcctgtctcgatatagattgaagtttagcgctgataaagtagacacaatgattgttcaggcaatttccttgttagatgacttggataaagaactaaacaactacattatgcgatgtagagaatggtatggctggcatttccctgaattaggaaaaattatttcagataatttaacatactgcaagtgtttacagaaagttggcgataggaagaactatgcctctgccaagctttctgagttgctgccagaagaagttgaagcagaagtgaaagcagctgcagagatatcaatgggaacagaggtttcagaagaagatatttgcaatattctgcatctttgcacccaggtgattgaaatctctgaatatcgaacccagctctatgaatatctacaaaatcgaatgatggccattgcacccaatgttacagtcatggttggggaattagttggagcacggcttattgctcatgcaggttctcttttaaatttggccaagcatgcagcttctaccgttcagattcttggagctgaaaaggcacttttcagagccctcaaatctagacgggatacccctaagtatggtctcatttatcatgcttcactcgtgggccagacaagtcccaaacacaaaggaaagatttctcgaatgctggcagccaaaaccgttttggctatccgttatgatgcttttggtgaggattcaagttctgcaatgggagttgagaacagagccaaattagaggccaggttgagaactttggaagacagagggataagaaaaataagtggaacaggaaaagcattagcaaaaacagaaaaatatgaacacaaaagtgaagtgaagacttacgatccttctggtgactccacacttccaacctgttctaaaaaacgcaaaatagaacaggtagataaagaggatgaaattactgaaaagaaagccaaaaaagccaagattaaagttaaagttgaagaagaggaagaagaaaaagtggcagaagaagaagaaacatctgtgaagaagaagaagaaaaggggtaaaaagaaacacattaaggaagaaccactttctgaggaagaaccatgtaccagcacagcaattgctagtccagagaaaaagaagaaaaagaaaaaaaagagagagaacgaggattaacagaaaggaattacgattatatcacccggacacacatcatgcttaagattcaactgggagcataccagggatgctctctaacgtaatcaagggaaggttcagtaagacaaagtgatttatcatctataacttcaaacctatttgtcttgacatcaactctgttaaccttatgtcatcatttcttagagtctttgatatacaaataaaattttccttggtaattttaaaaacaacaaacacaaaaacagaaacgaaaaaaacaaaaagaaagaaagacaaaacagaaggaaccagaaccggcagaacaaagaagaaaagagacagaggcaaaccaaaagacaccaacaacgaacaacaacgcacgacccaaccaccagaaggcaggaagcccgacaacaagcgacgagaacaaaacagcacgacaaaaaaccagggacagagaaggaaaaaaaaaaggaggaaacaacgannnnnn

SEQ ID NO: 20194 - DNA, 3349 bp, Homo sapiens
  misc_feature 3348, 3349: n = A,T,C or G
cttctgcttctgagccaggcttgcaggcagcctctcagccggccgagactccatcccaacagggcattgtcttgggaccacttgcacctccacctcctccaccactcccaccagggcctgcacaggcttcagtagccctccctcctcccccagggccccctccacctcctccactcccatccaccgggcctccaccgccccctcctccccctcctctccctaatcaagtaccccctcctcctccaccacctcctgccccacccctccctgcatctggattctttttggcatccatgtcagaagacaatcgccctttaactggacttgcagctgcaattgccggagcaaaacttaggaaagtgtcacggatggaggatacctctttcccaagtggagggaatgctattggtgtgaactccgcctcatctaaaacagatacaggccgtggaaatggaccccttcctttagggggtagtggtttaatggaagaaatgagtgccctgctggccaggaggagaagaattgctgaaaagggatcaacaatagaaacagaacaaaaagaggacaaaggtgaagattcagagcctgtaacttctaaggcctcttcaacaagtacacctgaaccaacaagaaaaccttgggaaagaacaaatacaatgaatggcagcaagtcacctgttatctccagaccaaaatccacacccttatcacagcccagtgccaatggagtccagacggaaggacttgactatgacaggctgaagcaggacattttagatgaaatgagaaaagaattaacaaagctaaaagaagagctcattgatgcaatcaggcaggaactgagcaagtcaaatactgcatagaggaacagactaaggagagataggactttaatctggaggaaaaatatcctacaaacaacaactgttcacaacagcaaacccctacatttatgagctgtaagaagaaaatggagacaaacagaaggagggaaaaaccaacctactctgaaagccttcagacattatgactctggtgataagctctttccctctccgtttgctgcttttttctggcctttacaacagaatggaagagaatcatttaagagttcctgtaacagttatgcagaaaatactaaaacccatcaggcaagatcaccacgcattgaaatattttcatatcaagataaagtcgcacattttccacaatacattgctaaaataaagaggagaaaggcttaggaagtttttttgcagagagtgctggtaaagaattgagcaagtttgctattgtattgtaatgtttctctcaggtttgttcttcctatcatgtttgatattccatgaataattgagatcagccctatgtaagttaagatcataatatgtggaacaaatggaattgtaagtgctttcaaagggtaatatttataagaaagtgtccgaaaaatgtttcttcagcttgagaaattttagaatgataggaagtttctcgagttagccttcatgcaattttgtagattaaaacataaaatttgtccagaacttaaagatttagatgccttcctaaattgttacaatgctttaccaaatctatgacttctacataacacaaaccagtggtcaaatgtaaacactatattgtagatttactgtaggttttcaaccttttttagatttatgcatgtggacatttttataatgtaattacaatcaccacaaggttagcttttttaattgcagacagtaatgcatgtcacactaatatgtagtggccttttcaaggcctagtcccagggaaaacattttgtagagtataggggagtgggaggaaggggaggaataattttttatttaaagttgatttctgcactatctttttctcagttacctgcatgaataaataatgagaaatattttgtgactttaattggtaaatatgttacaaaaccaagtacttaatcttttacatcatgtcttcagctatttgtattttaaccagtaatttcaatggtctgaaacatgattctgagcttcacataatatcttaactgtggaactcaaaagtttgatcactgaatttggcagttattattacctaggtacccccgctgttacacaggtgtttagatacgtgttcctgaatgaagctgcttttgaattttgttatgttgaaatgcaagaaataacaatgatggcagcaattaaggtcacagaaatcattaggtaaaggaaaaccaatgaggagttctgcagttttcttttaataagtaaagtgagacttgggtggtgggaagaaggaaggtgggaagaaggaattagacactctgcctgccactctgcgtgtgtgtgctctcgcgcacgtgctgtctatatggaagccactcccttttctttcctttgaaactggtaaggttaaaataggggagaaatcctacatgttggaatgatagctttttggaaaatttaagaaactctccaggctctccatcttgatttatgcttgagttgttatgtgccatatttgctttgaactctgattatcagaagttttactaaaactttgaaataattcactttcatctgctttctagattttgtacatctcagtccataaagcaaagcttgttgatagtgtagttttctaaacgctgcaaatttgcagcctttaccactacaaagaagtttggatgagggattttttttttctttgtcaaaatagttcctgtttctgtagaaatttcatttttagattaaactgtgatggatgagctatcataattcaagtatacatttcttttttctatcagatattcattgtcatgcagtagtagtaaaaacatcaaagatgcagcaagcttattaagtattattttctaaaagaaataggaggcattttcatctttattattgtacttttggttatgcaaacactttgataatataaacagttatgtcccctataaatctggtcagcaacctcttttgattttgttgggtaagttaaatagtctgtagtaggtagagtactgggtacaagtggtccaaactaagataagagactaaaataaaatgctaaatcttaaaagaaactgggtttatgcactaaacgttttgtgccttggtctaatattaacatgatgtatgtgtaaactgacaaaaaaaaaaaaaaagaggggggggctaaaaaaccggggggcaattaagggtaccgttttgacaggggccaatgaggcgaaaaagagacgggggtgaaacgtgtgtggaaagcgtggcttgagagccctctgggggatgaaccacggacggggaaaataagtatggacgtgctgtttaaggagagaann

SEQ ID NO: 20195 - DNA, 1025 bp, Homo sapiens
  misc_feature 1, 1016, 1017, 1018, 1019, 1020, 1021, 1022, 1023, 1024,1025: n = A,T,C or G
ncagcttcgccgagcccacctggtccccatcccggcctggcaatgaccctggcggcttcctcccagcgttcccaaatcattcgctccaagttccgatctgtcctccagcttcggatccacagacggaatcaggagcagaatccagttcaggcgcccatctcccagcaatcaagtcttgctccctggcctgccctccggcaccctggagccccgctttccacacagccttgctcctcccggcctggcttgctgcctgcaggcctctcagggtccttcaccgtctctccagtctcggatccggacccgtggatctcagcctcagaccctcctctggccccggccttgccctcgggcacggcccctttcctcttcagccctggggtcctgctccccgagccagaatattgtcctccttggaggtccccaaagaaggagtctcccaagatctcccaacgttggagggagtccaagcccagggggaacttgacataccaccagtacatgcccccagagccgagacagggatccagggggcggacgcccaagccgaggggtccgccctgggtcctcctgggccatctctgtgggaagggacagactcgcagcagcacatcctaggatgagccctctcccctcactccctggccaacagggagtcctagaccctcgcccccacaaaaaagtggggaattcagaccttaaacggaggagcatgacggccagagaccggagcactgggcctggggagccccaggcagggacaagagaaagccctgaacgatgtacaagcgacacccataaaaggtgaaacgggggaagaaccagcggcaccgagaaccaaaacaagcgcggagcgcgcgaaaggacaaacacaaaaaacaaggcaccacccgagaacagaagacagcaacaacagaagaacacaactcaccattagagaacagcagtaaaagacacagcagagaaaagacagatagaacacaaagcaacaagagaaccacaaagcgactctatannnnnnnnnn

SEQ ID NO: 20196 - DNA, 1269 bp, Homo sapiens
  misc_feature 1268, 1269: n = A,T,C or G
agtcgacccacgcgtccggaaaatatcccaggttgtagcagcagtggaagttgctctcaagggagtggtattttacactatgctcatggcgacagtcagcaaactcacctgttgaagcaaggaagaagctccatgggcactggtctcagtggtgggaaacgtcctagtcaggaagaggacacacagagtattggtcctaaagtccagagacagagcactaattaggtaaatattttagagctgtatttcttgctttagaagagtatataattaacataaattaagataatttcaaaaatggagcaaatctctattttcaaaccagaaaatcttgaggcattaatttttaagcaatttttacaaactcagttaatttttggtcaagagacatgcatctgtactggagaaattgttgcaccagttttatattcatctgaaccaatgctctttaaattagagatgtttatgattttgtggtcaagttttttcttagaaaaagacaacttttttatttccttactatgtaactatgagtctaaaacaattaaagtggcctgtttattttagtgacattaatataatctttttatgaactttcccctaaatctttgcctcttaaatgttgataaatttcttttatctgttatgatgcttctaaaatctaaattatttccaatttgggaatagttcaaaattttttaaaatgctggcccttattagaagtatcagaaagccttgcctgcattcaatttaattggatttgggatgtcattttgtgatttaaattaatatgaaaaatatttatacgttggatttgccagtttttaaaaattttctgtttcttcagtttctaacactgtttacattttttattgcttagtttttttatgtcaacctaattagactataagtatcttgaagataaggtcaataaacactcatcacatttttgtcattgaattatttgcaatcaagctttacctagtttttttttcccccttaaatcacagaaaacattcaggaggaatactgttgcagctgaaattggtggggagttcaatacttttcaattaagttatttaaaaatattcttcattgatggaaagcagttacatattgaaatatgttgtttctaatgacatttctgtggtttttaactttttaatgaatttcacagaggacaattggtaatttgtatataaagaacttggcaagagaatttgcttaatgtaaatataaacagtcacaattagtatagacccatcgann

SEQ ID NO: 20197 - DNA, 1533 bp, Homo sapiens
  misc_feature 1, 2, 1532, 1533: n = A,T,C or G
nnatagggagtcgacccacgcgtccggcggggcgccaggctagggcggcctggccactgagccggggtgcagtggcagcgggagagtacctggcgatggcgatatgagcggtgcgggggtggcggctgggacgcggccccccagctcgccgaccccgggctctcggcgccggcgccagcgcccctctgtgggcgtccagtccttgaggccgcagagcccgcagctcaggcagagcgacccgcagaaacggaacctggacctggagaaaagcctgcagttcctgcagcagcagcactcggagatgctggccaagctccatgaggagatcgagcatctgaagcgggaaaacaagggtgagccggcgcggggccctaggccggccctgcctccccaggcacactcaacactgccgctcccgcagcacagaaacacagccattaactccagcacacgcctgggctcagggggaacacaggacgatctccattacaagctcataatgaatcagacatcacagaagaaagatggcccctcaggaaaccacctttccagggcctctgctcccttgggcgctcgctgggtctgcatcaacggagtgtgggtagagccgggaggacccagccctgccaggctgaaggagggctcctcacggacacacaggccaggaggcaagcgtgggcgtcttgcgggcggtagcgccgacactgtgcgctctcctgcagacagcctctccacgtcaagcttccagtctgtcaagtccatctctaattcaggcaaggccaggccccagcccggctccttcaacaagcaagattcaaaagctgacgtcccccagaaggcggacctggaagaggagcccctacttcacaacagcaagctggacaaggttcctggggtacaagggcaggccagaaaggagaaagcagaggcctctaatgcaggagctgcctgtatggggaacagccagcaccaggcaggcagatgggggcgggggcacaccccccaatgatcctgccccttcccctgcgaaagcccaccacacttaggcagtgcgaagtgctcatccgcgagctgtggaataccaacctcctgcagacccaagagctgcggcacctcaagtccctcctggaagggagccagaggccccaggcagcccggaggaagctagctttcccaggaccaagaagccacgcatttccccaaggtctcaccaagagcctctcaagaaatgctgagcccacctgtggcggagcgttgcatcctgccgactgaagcagacccgaagaaaaattggcgagagagagaggtgcagcatgcggaacggggctgtcgtcagggtttgggccccccattgtcagttgcggccccaacggagtgggatggtctcatagttcgtactcggattaggcggtatccagacgtactcagattaggtttgttccagcgacgttttttagcgtggtggttagcaaacataaggtctcttgtgtgaactttttccacagaaacatccaaaacatcaagagggcggnn

SEQ ID NO: 20198 - DNA, 6342 bp, Homo sapiens
aacatacacttttcagtccttacatgaattccctagctcttatcgtataaaagagatgctaacattgtctatgatctggaccagacaggagtggccctcctccctttggagctgtgtaccatatagagtcgcccgagcctctctgtgtccagcgtttcattcctactcataaggtgctaattcctcacaacagactattttcaggctgaggcagtcagggcccccgcccccgtgccctggcgccaagcactcgccccagaatcggtcctgggaataaaggtcaaaaaggaacccttaaacccgctcctccccggaaggcacagcgcctccccttctctccagcccgcgactgcccatccaaaccgaggcctcgcggggcgagtcccttgtcctccagctcgttgaactggggccccgggcacaggtcggctggaccagcttggcgaaccggacagctgcgagaccctcaggtgcccaccggcccagtttccgcccgcccctccgggcccgcctctcattggctcgcgtcccaccaaaccctaccccctggccgtcacttccgggcaacggagcccgtggaaggcggaagtgtgagcgccgcggcggcagctgagttgggctgaggtgtccctagctggctctgcggctcttccgggtctgggctcggagattcacaggcggcccgcgaggccgagcgagggacgcatggccctgaggcggccgcagggcttggcggggtccggaggttgacctcgcccccgcaagccggccttcgaggctgcctcctccaggcagcctctggggcccggcgcccgcgcctgctcaggctccctgtgttcaggctgcccatcgccctccccaccggcgtcccggacgttgggacctgtgaccgtggcctcgggctgggcttccaaagccggccgcagcccggctgacccccgaggcctctcgccccgggcccctagacctctcactatgaccgcggccgccgcctccaactgggggctgatcacgaacatcgtgaacagcatcgtaggggtcagtgtcctcaccatgcccttctgcttcaaacagtgcggcatcgtcctgggggcgctgctcttggtcttctgctcatggatgacgcaccagtcgtgccatgttcttggtgaagtcggccagcctgagcaagcggaggacctacgccggccctggcattccacgcctacgggaaggcaggcaagatgctggtggagaccagcatcgatcgggctgatgctgggcacctgcatcgccttctacgtcgtgatcggcgacttggggtccaacttctttgcccggctgttcgggtttcaggtgggcggcaccttccgcatgttcctgctgttcgccgtgtcgctgtgcatcgtgctcccgctcagcctgcagcggaacatgatggcctccatccagtccttcagcgccatggccctcctcttctacaccgtgttcatgttcgtgcctcgtgctctcctctctcaagcacggcctcttcagtgggcagtggctgcggcgggtcagctacgtccgctgggagggcgtcttccgctgcatccccatcttcggcatgtccttcgcctgccagtcccaggtgctgcccacctacgacagcctggatgagccgtcagtgaaaaccatgagctccatatttgcttcctcccttaatgtggtcaccaccttctacgtcatggtggggtttttcggctacgtcagcttcaccgaggccacggccggcaacgtgctcatgcactttccctccaacctggtgacggagatgctccgtgtgggcttcatgatgtcagtggctgtgggcttccccatgatgatcctgccatgcaggcaggccctgagcacgctgctgtgtgagcagcagcaaaaagatggcacctttgcagcagggggctacatgccccctctccggtttaaagcacttaccctctctgtggtgtttggaaccatggttggtggcatccttatccccaacgtggagaccatcctgggcctcacgggagcgaccatgggaagcctcatctgcttcatctgcccggcgctgatctacaagaaaatccacaagaacgcactttcctcccaggtggtgctgtgggtcggcctgggcgtcctggtggtgagcactgtcaccacactgtctgtgagcgaggaggtccccgaggacttggcagaggaagcccctggcggccggcttggagaggccgagggtttgatgaaggtggaggcagcgcggctctcagcccaggatccggttgtggccgtggctgaggatggccgggagaagccgaagctgccgaaggagagagaggagctggagcaggcccagatcaaggggcccgtggatgtgcgtggacgggaagatggcaaggaggcaccggaggaggcacagctcgatcgccctgggcaagggattgctgtgcctgtgggcgaggcccaccgccacgagcctcctgttcctcacgacaaggtggtggtagatgaaggccaagaccgagaggtgccagaagagaacaaacctccatccagacatgcgggcggaaaggctccaggggtccagggccagatggcgccgcctctgcccgactcagaaagagagaaacaagagccggagcagggagaggttgggaagaggcctggacaggcccaggccttggaggaggcgggtgatcttcctgaagatccccagaaagttccagaagcagatggtcagccagctgtccagcctgcaaaggaggacctggggccaggagacaggggcctgcatcctcggccccaggcagtgctgtctgagcagcagaacggcctggcggtgggtggaggggaaaaggccaaggggggaccgccgccaggcaacgccgccggggacacagggcagcccgcagaggacagcgaccacggtgggaagcctcccctcccagcggagaagccggctccagggcctgggctgccgcccgagcctcgcgagcagagggacgtggagcgagcgggtggaaaccaggcggccagccagctggaggaagctggcagggcggagatgctggaccacgccgtcctgcttcaggtgatcaaagaacagcaggtgcagcaaaagcgcttgctggaccagcaggagaagctgctggcggtgatcgaggagcagcacaaggagatccaccagcagaggcaggaggacgaggaggataaacccaggcaggtggaggtgcatcaagagcccggggcagcggtgcccagaggccaggaggcccctgaaggcaaggccagggagacggtggagaatctgcctcccctgcctttggaccctgtcctcagagctcctgggggccgccctgctccatcccaggaccttaaccagcgctccctggagcactctgaggggcctgtgggcagagaccctgctggccctcctgacggcggccctgacacagagcctcgggcagcccagggcaagctgagagatggccagaaggatgccgcccccagggcagctggcactgtgaaggagctccccaagggcccggagcaggtgcccgtgccagaccccgccagggaagccgggggcccagaggagcgcctcgcagaggaattccctgggcaaagtcaggacgttactggcggttcccaagacaggaaaaaacctgggaaggaggtggcagccactggcaccagcattctgaaggaagccaactggctcgtggcagggccaggagcagagacgggggaccctcgcatgaagcccaagcaagtgagccgagacctgggccttgcagcggacctgcccggtggggcggaaggagcagctgcacagccccaggctgtgttacgccagccggaactgcgggtcatctctgatggcgagcagggtggacagcagggccaccggctggaccatggcggtcacctggagatgagaaaggcccgcgggggggaccatgtgcctgtgtcccacgagcagccgagaggcggggaggacgctgctgtccaggagcccaggcagaggccagagccagagctggggctcaaacgagctgtcccggggggccagaggccggacaatgccaagcccaaccgggacctgaaactgcaggctggctccgacctccggaggcgacggcgggaccttggccctcatgcagagggtcagctggccccgagggatggggtcatcattggccttaaccccctgcctgatgtccaggtgaacgacctccgtggcgccctggatgcccagctccgccaggctgcggggggagctctgcaggtggtccacagccggcagcttagacaggcgcctgggcctccagaggagtcctagcacctgctggccatgagggccacgccagccactgccctcctcggccagcagcaggtctgtctcagccgcatcccagccaaactctggaggtcacactcgcctctccccagggtttcatgtctgaggccctcaccaagtgtgagtgacagtataaaagattcactgtggcatcgtttccagaatgttcttgctgtcgttctgttgcagctcttagtctgaggtcctctgacctctagactctgagctcactccagcctgtgaggagaaacggcctccgctgcgagctggctggtgcactcccaggctcaggctggggagctgctgcgtctgtggtcaggcctcctgctcctgccagggagcacgcgtggtcttcgggttgagctcggccgtgcgtggaggtgcgcatggctgctcatggtcccaacacaggctactgtgagagccagcatccaaccccacgcttgcagtgactcagaatgataattattatgactgtttatcgatgcttcccacagtgtggtagaaagtcttgaataaacacttttgccttcacccagcctcggtggatgctgtttggtgtccaggaagcacagggagcaggggccagacaagccgggtgtccaggggcactggccggtgccaccctttgcactcctcatggttggcccagccctccattgtctgtgtttttcaaaatccaattgtggctttttttaaaaagtaaaaaacaccactgataacctgattagtgaagttggtcctgggggagtgactgaaaggaaagcctgaggccggctcaggattccagatgtgtaaagcagaggccagaggtcatgagggaacggcgccatgacctgagcgtcgcagtgactggacactagacgcagcacagccccagagagaccctgtgagcaggcagagccgcctggtgccaggaggtggtccagcccccagggccaggctgacgggcgtgctgcctcgtgaccaggacacgctccacagccctctcacctggcgggaaagaggaggtgctgctgtgtccacagcatccgattctgctttggctcgtcctctggggagcttgcgccccaaccctgccacgaaaccctgccacgaagggcagaggaccagggcctgggtctgggggaggcccgtgttggcgaagggtccctgcatggagggccggcctcagcctctggtggtgtcttcctgcaccttttgatatccttttggctttttattatagtttcttcccttgaaggatgtcactgggcagcctgaagactggaaattttttttcttttgagacggaagttctctcctgtgcccagccctggagggcaatggcgcaaatcttggcctcactgcaaactccctcctcccgggttcacgccattctcctgcctcagcctcccgagtagctgggactacaggcgcccgccaccacgcccggctaatttttttttccgtatttttagtagagactgggtttcaccatgttggtcaggctggtcttgaactcccaccccaggtgatccacccacctcaacctccccaagtgctgggattacaggtgtgagccaccgcacctggctcaagttgccagattttatccccgccttttctctgtgggccagagaaaaactgacacaagtctctagacttttttaagagaccagagaagatggtctctgtgcaggtctcgtaactgtgcaggtcttgttgatgccgaagcccgggtccactccccggcaacagggcagccctcccgccttaccgttggggataaggatgccaccaaccatggttccaacaccacagagagggtaagtgctttaaccggagagggggcatgtagccccctgctgcaaagggtgccatctttttgctgtacaaaagaaaaacaaaaggttttgaaatgactgatttcctccaccactctcctagaagcaaagcctgaaagggctctgccaggcacaccaggcacatctccacgtgaggcc

SEQ ID NO: 20199 - DNA, 2859 bp, Homo sapiens
  misc_feature 2845, 2846, 2847, 2848, 2849, 2850, 2851, 2852, 2853, 2854,2855, 2856, 2857, 2858, 2859: n = A,T,C or G
gcgtccgcccacgcgtccggcccatccttcgcctcctcagcggccgctggctgcggctcctcccggggccggttcccgctgtctcagccgcggcgcagagggcacatcggcctgaccgactagccggctgccagtgccgggagccgccgcgtccatccccgcccgcctggccggggacccaggactgagtcgtccagctgcgcccctcgcccatagccccagcggtcgccgggcgggcgagcagctcttcggcccttcccggacagcgacgcagtcgcagcgcgcgccctaacacagatgtgggaagataaatgaaggggtctagatgtaaatgtcagtggaaaggagagctaccatcactaagggctgaaaacacagttaaatcactttcaaagttaaaagactattaagaacacaagatggggactcctgcttctggaaggaaaagaacacctgtgaaagaccgattttctgcagaagatgaagctttgagtaacattgccagagaggcagaggcaaggctggcagcaaaacgggctgcccgggcagaagcaagagatatacgcatgagagaactggaacgacaacaaaaagagttggatgaaaaatctgacaaacagtatgctgaaaattatacaagaccttcatctcgaaattctgcctcagcaacaacccctctaagtggaaactcatccagacgaggaagtggggacaccagcagcttaatagatccagacacttcattaagtgaattgcgggaatctttgtctgaagtggaagaaaaatacaagaaagccatggtttccaatgcacagttagacaatgagaagaacaatttgatctaccaagtagacacactcaaggatgttattgaagagcaggaggaacagatggcagaattttatagagaaaatgaagaaaaatcaaaggagttagaaaggcagaaacatatgtgtagtgtgctgcagcataagatggaagaacttaaagaaggcctgcggcaaagagatgagcttattgagaaacatggcttagttataatccccgatggcactcccaatggtgatgtcagtcatgaaccagtggctggagccatcactgttgtgtctcaggaagctgctcaggtcttggagtcagcaggagaagggccattagatgtaaggctacgaaaacttgctggagagaaggaagaactactgtcacagattagaaaactgaagcttcagttagaggaggaacgacagaaatgctccaggaatgatggcacagtgggtgacctggcaggactgcagaatggctcagacttgcagttcatcgaaatgcagagagatgccaatagacaaattagcgaatacaaatttaagctttcaaaagcagaacaggatataactaccttggagcaaagtattagccggcttgagggacaggttctgagatataaaactgctgctgagaatgctgagaaagttgaagatgaattgaaagcagaaaaacggaagctacaacgagagttacgaacagcactggacaagattgaggagatggagatgaccaacagccacctggccaagcggctggagaagatgaaggccaataggacagcacttctggcccagcagtaggaaaaccacccttcaacctgggtgatgctccttggggccctacctagagggactgacttttgtccattgacacaaaccccttttagtactgttttgagttttgtcattaaaacagccacctttgtattttataatttatgacagaatgaagtcattttgaatctacatgaatgaacactttggattttgttgtagtttgattctagggtagaaccagtccatgctgtttttattttttatctccgtaattgtagaatcatgtttactcaacgtttttccccagctgcctcagtaactgggcactcggaggccttggcacgggttctggaggacagacagcaattctatgagtgctcactgagatacttgctggagacctcagaaaacacaagtgccttctccacggtgcaattcagacttcagtgatctccagtggtcaaaagacatttacccttaatatcagacaacatttatattttagtgaagaaacaagttctcgggtggggaatctatgtttcactcagatttatatgtttggaggaaaaaagcctttttttgtaaaatatttaaatttatataagaaaatgttagaaaaaaatatggggagtgtatataaaacttgctttattgcatggggcaggggaagtccaggcctaatactcctaaagtaagagttgggtcctttttttcttcaatacaactgtgctgtaccttgtaaagtattttatctgctgcttatttgtggaatgaaacctcaaacaaacccaaagggggagggtagggcagggcaggcagattggaaatctgcctgcagattctattaaatacacccttttgccaaccacaattggctactgacatgttcattttgttataggagactttaaaacaaatcatggcaaccacatccctcttcttttgtctccttctcaaggaaaaacaatctggaatgtagaacttttaaagacttgagtttcacctttagaggtaccctgtccaagaggtttttttaaaatcatggagtgcaactactttgcagaatttatgattctcttttgctcttagtacccaggtggttttatagaaatgattattgtatctttaaagtgcttacacagaaaatatattgggggaaaatctagtgactaaaggcacataagataataaaactagactttaaaaaggtaactcaaaagtgaataaaatctctaatatttgttccnnnnnnnnnnnnnnn

SEQ ID NO: 20200 - DNA, 768 bp, Homo sapiens
agggagtcgacccacgcgtccgctcgtcgcctgccaccggtgcacccagtccgctcacccagcccagtccgtccggtcctcaccgcctgccggccggcccaccccccaccgcagccatggacgccatcaagaagaagatgcagatgctgaagctggacaaggagaacgccatcgaccgcgccgagcaggccgaagccgacaagaagcaagctgaggaccgctgcaagcagctggaggaggagcagcaggccctccagaagaagctgaaggggacagaggatgaggtggaaaagtattctgaatccgtgaaggaggcccaggagaaactggagcaggccgagaagaaggccactgatgctgaggcagatgtggcctccctgaaccgccgcattcagctggttgaggaggagctggaccgggcccaggagcgcctggctacagccctgcagaagctggaggaggccgagaaggcggctgatgagagcgagagaggaatgaaggtcatcgaaaaccgggccatgaaggatgaggagaagatggaactgcaggagatgtagcctgaagcgaggccaatcacatcgctgacggattcagaccgccaaatatgaacaggtggccaggaagctggtgatcctggcagcgagagcctggagccgctcggaggacaggggctgagcgatgaccgagagttacatgtgcggaccctaaacgaagaccctgcaacctcgtaccaacaactgaaattcctgcaggccaagccggacaaga

SEQ ID NO: 20201 - DNA, 3571 bp, Homo sapiens
  misc_feature 3570, 3571: n = A,T,C or G
gtggtcgcggccgaggtacaaggcaaacaatttctttggggacaagcagcattatttcaattagaccttctcctgcagggcaaaaatcattcttccccacactatgaatggactccaagtatcataataagcaggtaaactcacaagaaccaaagctgacatatggataaaagcagcaagatcacagtacaccaaagtatcatatatatagaagaaataattcaatgtcttagatttgtctataaaaatttgtgatctatataggacttcattcacatggacactaacgataaggagtatttgctttggcggtagtggatcacacatctgcttatcttgctttgatattttttacataatgtttctgagtgatacagatgtgagtcaggtagcatttgatttccccacatatacacaactgaggtgccctgccattggcatcccctgggatccttgattcactgacgttagccatacgaatccagtgttcaaactcagaataataagcttagtttctgcattatcagtcagcataaataataaatccagaaaacgtgctgtatttgttgttgtttcctccatgggctttcccgccatctaatttgatatagacttcatctcccggctccaaatgaagaaccacactgttactggcatagtcgtaattctgatcagcatcttgggcaattgcactagcacgcacctacgtgaaacagacaagaattaggatgcgtaaatgagaattctcaagttttcttttttgccattcatgtagcatcacaagctgacttgctgccatagtacagaatttagcatagcaaagtccatgttgacctcagagctttatgaggatagtgctgtggcagtttccgctacgttagtgagaaggaggacagaaagggacaaaatagtgcttcagtggggaccattctggcagtcttatctaactacacattctaaactatgcatacaatttattatcttcctgtatcactcgtttttctaactccttcgatccctatgcccaatcacattttgaaatgaaactaatagtattttttgcattttaatttaagccagatagcaatattctaatcagctgtttatgagtacagaagttcaagtctaagttcagctgttcaccacaattattagaaaattgaggtatgtaatagctaaaaacacccaggaaaataccaactcctctactacttacaaagaaaaaaaaaaaaaaagaaaaagtcttttgatttagggctttccaaatctaattcatgtaaagccccctttaccaggctgcttcagaagcttagctcatttatacatctttgattatatcacctgagttttcagagttcttttttccatcgtgtctttttattacttaactatgacatgtgcatttaaatcaagaatttaacctcaacatatctaaaagttaaagaaaggactaaattttcatgctctgaggcctctcaagtttcaagaatttttgaatgatttcgttgaatatccacttacacttaggagattctaaatatgtggcttgatttgagggcagaggctgcttataatctgcccatggtaagcctgtgatctcattagtgagttgatagacatttacaaacagtcaaattgcctatcatctcatgcattgtggacattctgtcagatccttagctcaaattaggcttcatattcatttagatatattgtgattctgccttggaaaatctttcaacaggcagacttagatttgatttatttcagtaaaacatcttctactttgtggcttgtttcatttctattccactataatgatatttccctgaataacatagcaagtgatttagtggttttgtaaacctgcactatgtaataatgcatgatttggggtacaatatgctggattttatcacttggcaaaatgagagaaatgagacagaagtcaagaatttccatgcatttctttcaaaatttaaatgatgagttttccaattaaattttcttgtgatatagtctcacgttaatgctgaaatgttaaaaaaagaagactctttaacactgctgaacttgtaaagtcatttgagtagtatctttaaagtgtctttctgggtatcacatagcaaaaggagaaaatggcttaaaggatttagaattgcttaacgctgtactaacaggcactaatataatgaaagcaatataccatgtaattatgcttggaagcactgactccaatatatatgccaatttagtaaagtggtccgttttgaccattaaataatgatgcagtttgacttcataatattttctaaagattaatcatgagtttgtaggagttgaatgctttgattcattaatttcatctagccattaattcccagggaaacaaatctacaagaaggatattgctattatgacttgtgtttttttctcatctttggatttttaatggtgaaaaaaattaaaaacaaaatattcatgagctatattagtaatacattagttatcaacccataatatactcctcagctattactaataaccagacatattttattcagtgctttgggtatttaggacatgttctatggttactgggctttaacatggttttctacatgaaggtattggagaaacaggacatactaaaattacttgatttagacacaataatccttttaaaaatataatgccatttttattctccagggtgtaaccacaaaaccgagtgaacgtcaccatttttattcagtaggcgtaaccacaaattcctgcgaatgcattagagtgattccacagactgaaaggttaccctcacagtttctaccacctttgttggatcaagccagtgtggttgctttttaatgaatgtaattctgtaagattttaacctatactgtaccgtaagactgtcccaattaaataattgccatactccagtgtacctggcatgattttggtatggctgctcacctgatcctactctaaagatataacaggacttgaaatttcaagctctagtattcagctcagtgacttcaacaattctttcaagccatcaaactattgaggaaggcaatgtgttcaccctggaggctgtttccagattcctaaatgtacagtgatttcagcattctgtctgggaataagatccatccttccttcagcgcaatcaaccgatttctacctgaatttactctaatatcttttcttattacaagataactatttagattctgctttatgtttagtccgtatttctttaaccctaaaaagattatgaatttgacatgtcattgatctctctaataagcgaataccaacccacaaaccactcatccttttaaaaatatttcatgggcatcggtgccataattaataaatttttaagagtaccaactggtctttaattattttatgcttttaatcctgaaacagtattagttttcattcgagtggcttatttattatagtggcattagagtgattgtattcaaatagcaatttttcttcatgttttctgctaaaaggattatcaacattaaagagatttcctctttccaaagnn

SEQ ID NO: 20202 - DNA, 1710 bp, Homo sapiens
  misc_feature 1, 2, 1709, 1710: n = A,T,C or G
nncaccacgcgtccggctgcgggcggtcggggctccgggccggggcggcggcgccatcttgtgcccggggccggtggggaggccggggagggggccccggggggcgcaggggactacgggaacggcctggagtctgaggaactggagcctgaggagcccccggcagccaagaggaggaggaggagccgggactggtcgagggtgacccgggggacggcgccattgaggacccggagctggaagctatcaaagctcgagtcagggagatggaggaagaagctgagaagctaaaggagctacagaacgaggtagagaagcagatgaatatgagtccacctccaggcaatgctggcccggtgatcatgtccattgaggagaagatggaggctgatgcccgttccatctatgttggcaatgtggactatggtgcaacagcagaagagctggaagctcactttcatggctgtggttcagtcaaccgtgttaccatactgtgtgacaaatttagtggccatcccaaagggtttgcgtatatagagttctcagacaaagagtcagtgaggacttccttggccttagatgagtccctatttagaggaaggcaaatcaaggtgatcccaaaacgaaccaacagaccaggcatcagcacaacagacgagctggaagctcactttcatggctgtggttcagtcaaccgtgttaccatactgtgtgacaaatttagtggccatcccaaagggtttgcgtatatagagttctcagacaaagagtcagtgaggacttccttggccttagatgagtccctatttagaggaaggccaatcaaggtgatcccaaaacgaaccaacagaccaggcatcagcacaacagaccggggttttccacgagcccgctaccgggcccggaccaccaactacaacagctcccgctctcgattctacagtggttttaacagcaggccccggggtcgcgtctacaggtcaggatagatgggctgctcctctttcccccgcctcccgtgagccccgtatgcttcctcctctctggtctgaggaacctccctccccccacccctccccgtggtcttcaggaactttgtctcctgcctgtgcaggttgaggaaggtagttgcaggccaggccagaaggccagcctcatcatcttttctgcagtagaaattggtgataagggctgcatccctcccttggttcaaagaggcttccacccccagcctttttttttcttgggagttggtggcatttgaaggtgtttgcggacaaaactgggaggaacagggcctccaggcagtgaaagcactgcttggacatttgttacttttttcggagttagggagggattgaagactgaacctcccttggaagaataccagaggctagctagttgatcctccccaacagccttgtgggaggattttgagatacttattctttatttgagccagtcttgcaaggttaacttctcactgggcctagtgtggtgcccaggtttttgccttgcttcacttctgtctctacatttaaatagacgggttaggcatataaaccttggcttttcataagctctgcctgcctatccccaggaggtagggaggagctatttgtgatggcctagggtttaagagctgtggaggactgaaaactggataacttgttggcaagttttctgttaagccccctcccctggccaann

SEQ ID NO: 20203 - DNA, 2891 bp, Homo sapiens
  misc_feature 2889, 2890, 2891: n = A,T,C or G
cgcgtccgcgggactgccacggtccggcaaaccgggaaaggagaggatcccggagccggtgagaattctctgttttttctctaccatcctttccaggccttttcctcacctaatgagtcgtagagacgagggcccagagagtctgtaaagtggctggtgaaagattagtgtcccagggccctacatccgggaggtggttcgggataaagagaactagtcttgggaacaatgtaggtgggaacttaagggaatgggagagcggcccatagaggtggacggagggcgcgattggagtaaagcggaccctgtgtaggtatagagttgagtcaagtggagtcactgcctctgtccctctggtcagcgtgatggccagaggcctgggggccccccactgggtggccgtgggactgctgacctgggcgaccttggggcttctggtggctggactcgggggtcatgacgacctgcacgacgatctgcaagaggacttccatggccacagccacaggcactcacatgaagatttccaccatggccacagccatgcccatggccatggccacactcacgagagcatctggcatggacatacccacgatcacgaccatggacattcacatgaggatttacaccatggccatagccatggctactcccatgagagcctctaccacagaggacatggacatgaccatgagcatagccatggaggctatggggagtctggggctccaggcatcaagcaggacctggatgctgtcactctctgggcttatgcactgggggccacagtgctgatctcagcagctccattttttgtcctcttccttatccccgtggagtcgaactctccccggcatcgctctctacttcagatcttgctcagttttgcttccggtgggctcctgggagatgctttcctgcacctcattcctcatgctcttgaacctcattctcaccacactctggagcaacccggacatggacactcccacagtggccagggccccattctgtctgtgggactgtgggttctcagtggaattgttgcctttcttgtcgtggagaaatttgtgagacatgtgaaaggaggacatggtcacagtcatggacatggacacgctcacagtcatacacgtggaagtcatggacatggaagacaagagcgttctaccaaggagaagcagagctcagaggaagaagaaaaggaaacaagaggggttcagaagaggcgaggagggagcacagtacccaaagatgggccagtgagacctcagaacgctgaagaagaaaaaagaggcttagacctgcgtgtgtcggggtacctgaatctggctgctgacttggcacacaacttcactgatggtctggccattggggcttcctttcgagggggccggggactagggatcctgaccacaatgactgtcctgctacatgaagtgccccacgaggtcggagactttgccatcttggtccagtctggctgcagcaaaaagcaggcgatgcgtctgcaactactgacagcagtaggggcactggcaggcacagcctgtgcccttctcactgaaggaggagcagtgggcagtgaaattgcaggtggtgcaggtcctggctgggtcctgccatttactgcaggtggctttatctacgtagcaacagtgtctgtgttgcccgagctgctgagggaggcatcaccattgcaatcacttctggaggtgctggggctgctggggggagttatcatgatggtgctgattgcccaccttgagtgaggggtggataaactacccctgccccaaacctctacccctaactccaggtcaggggtgcgtagaggttgggggccctggccagggacatctgccaaaggaaggaactgtagcctgggagaatggttactttggcattagggccttcaagggctggcagtcttacagaggctggagcggtgagaatgagaggccagagggaccatagtgttgggcactgtctgaccatgttgcatttggaaggctaaatggggccatgaagaaggctggaagggacagggggtgatggcagcctacctggtgtcccctaccccacctgttctcggagaaccaagttgctacacaggaagttctccaaggtccagtttcctttctcccaccagttggtggaggcttcagggaagaccagagtcctggacagagagggtaacaggaggagtcggggataaacatcaaacatcaatcgtgtgtcctgatttgggagtgattggggggatggggtgggagagggttagttggtattctcatggcctgattttttttgtttctattccttttatatcactgtgtttgaatcgagggggaggggtggtaaccggaaataaagacctccgatcttccgcccaaaaaaaaaaaagaaagagaaaaaaggaaaggaaaagaaaaagaaggaaaaaaaaaaaaaaagaaaaaaaaagagggggggggggaaaaaaacaaacgggggggggaaaaaaagggagagacaaaacattttgaggaaaagaggaccccccaaaggccgagcttcaaaaaacaagacagcgcgggcggcccgacaacaacacgacggcagcggaccaacctcagtgcacgcggcacccctggagagaggcgacacccaccggggggggggcccgaccgggaacacccccacacagagacgacgcgcgggagaacaaacaacgcgtgtggtggagacccagagccgacatgcagcagaaaaggcaggcaaatacaatacatctaggggcgcagaaaaggcaagaggacgcagcacagccacgacacgacaacagcagcagaccaaccagggacatgaacgagcgacgaccatgagtaggtccacagcaacgcnnn

SEQ ID NO: 20204 - DNA, 4277 bp, Homo sapiens
  misc_feature 1, 2, 3, 4, 5, 6, 7, 8, 4275, 4276, 4277: n = A,T,C or G
nnnnnnnncgtgtggccgcccccggtgtccgccctgctgtcggcgctggggatgtcgacgtacaagcgggccacgctggacgaggaggacctggtggactcgctctccgagggcgacgcataccccaacggcctgcaggtgaacttccacagcccccggagtggccagaggtgctgggctgcacggacccaggtggagaagcggctggtggtgttggtggtacttctggcggcaggactggtggcctgcttggcagcactgggcatccagtaccagacaagatccccctctgtgtgcctgagcgaagcttgtgtctcagtgaccagctccatcttgagctccatggaccccacagtggacccctgccatgacttcttcagctacgcctgtgggggctggatcaaggccaacccagtccctgatggccactcacgctgggggaccttcagcaacctctgggaacacaaccaagcaatcatcaagcacctcctcgaaaactccacggccagcgtgagcgaggcagagagaaaggcgcaagtatactaccgtgcgtgcatgaacgagaccaggatcgaggagctcagggccaaacctctaatggagttgattgagaggctcgggggctggaacatcacaggtccctgggccaaggacaacttccaggacaccctgcaggtggtcaccgcccactaccgcacctcacccttcttctctgtctatgtcagtgccgattccaagaactccaacagcaacgtgatccaggtggaccagtctggcctgggcttgccctcgagagactattacctgaacaaaactgaaaacgagaaggtgctgaccggatatctgaactacatggtccagctggggaagctgctgggcggcggggacgaggaggccatccggccccagatgcagcagatcttggactttgagacggcactggccaacatcaccatcccacaggagaagcgccgtgatgaggagctcatctaccacaaagtgacggcagccgagctgcagaccttggcacccgccatcaactggttgccttttctcaacaccatcttctaccccgtggagatcaatgaatccgagcctattgtggtctatgacaaggaataccttgagcagatctccactctcatcaacaccaccgacagatgcctgctcaacaactacatgatctggaacctggtgcggaaaacaagctccttccttgaccagcgctttcaggacgccgatgagaagttcatggaagtcatgtacgggaccaagaagacctgtcttcctcgctggaagttttgcgtgagtgacacagaaaacaacctgggctttgcgttgggccccatgtttgtcaaagcaaccttcgccgaggacagcaagagcatagccaccgagatcatcctggagattaagaaggcatttgaggaaagcctgagcaccctgaagtggatggatgaggaaacccgaaaatcagccaaggaaaaggccgatgccatctacaacatgataggataccccaacttcatcatggatcccaaggagctggacaaagtgtttaatgactacactgcagttccagacctctactttgaaaatgccatgcggtttttcaacttctcatggagggtcactgccgatcagctcaggaaagcccccaacagagatcagtggagcatgaccccgcccatggtgaacgcctactactcgcccaccaagaatgagattgtgtttccggccgggatcctgcaggcaccattctacacacgctcctcacccaaggccttaaactttggtggcataggtgtcgtcgtgggccatgagctgactcatgcttttgatgatcaaggacgggagtatgacaaggacgggaacctccggccatggtggaagaactcatccgtggaggccttcaagcgtcagaccgagtgcatggtagagcagtacagcaactacagcgtgaacggggagccggtgaacgggcggcacaccctgggggagaacatcgccgacaacgggggtctcaaggcggcctatcgggcttaccagaactgggtgaagaagaacggggctgagcactcgctccccaccctgggcctcaccaataaccagctcttcttcctgggctttgcacaggtctggtgctccgtccgcacacctgagagctcccacgaaggcctcatcaccgatccccacagcccctctcgcttccgggtcatcggctccctctccaattccaaggagttctcagaacacttccgctgcccacctggctcacccatgaacccgcctcacaagtgcgaagtctggtaaggacgaagcggagagagccaagacggaggaggggaaggggctgaggacgagacccccatccagcctccagggcattgctcagcccgcttggccacccggggccctgcttcctcacactggcgggttttcagccggaaccgagcccatggtgttggctctcaacgtgacccgcagtctgatcccctgtgaagagccggacatcccaggcacacgtgtgcgccaccttcagcaggcattcgggtgctgggctggtggctcatcaggcctgggccccacactgacaagcgccagatacgccacaaataccactgtgtcaaatgctttcaagatatatttttggggaaactattttttaaacactgtggaatacactggaaatcttcagggaaaaacacatttaaacacttttttttttaaggaaagaattggtatatttattatgttctgtttttctaaataacctgtggacaagggaagccccactgatttactccctctcttccccactccctgtgaggctgggctgaggcacggatccctgggccacagagcaagtctccaaatcagacagctgcctcagcccctgggatgtgtgatttcagctcctgtcacctcatgcaagggcgtggagaccagtagaggtgtggaggccaggcagagagaggagcctgctctgcggggggcccagctcatgggcactgccccttcagctagcctgcctccgtcccctgagtccaacagtgggagccctagctgggaagttctgatccccaaagccacagcaggggactgatggctatagcagaatgaggtcgggtcaggaccctcaaacaccatctgggaacaccaagcaccctgaatcgagactgcaggagccctgcggggtgagactgtgtcagagatacactgctggccacaagtgtcccctctcagtcccaccttttcgggctgtcccatgtctatctcaggggcccgttacctctctgcagcagtcccccatcccagccacaccagggtctgtccggccaaccctcttccccagggaaaggagaaaagagaaaacaggctgggcccggtggctcactcctgtaatcccagcactttgggaggttgaggtgggcggatcacctgaggtcaggagtttgagaccagcctggccaacgtggtgaaaccccatctctactaaaaaaaattacaaaaattagccgggagtggtggtgggcacctgtaatcccagttactcgggaggctgaggcaagagaatctcttgagctcaggaggcagaggttgcagtgagctgagattgcgccactgcactccagcctgggtgacagagggagactccgtcccaaaaaaaagaaaagagaaacagctgtcacctcccgcaggacccaaatcctctctctgagcaccgtcatccaccacatggctgggcctggctcccaggaccagtccagtcctctagtgccttatctgaggctgcagccgccagtctccaccccaaggagacagcccctgctcctagatgcccttggcctccgcagtgcagcccccaggtgtcctgactgaagcacaggccatagccccatttccccggtgcctgcagggctaacctccacgggagcccaggagctctggccggcaggtccatggcacagggcatcggaagactgcaaaactgctggacttaccctgggctgcagtccattgtcggcccctgggttgaatcaagatagtacttgcagctagatggatgcttttagccaggggacattgtgaggggaagattcctccacccagtctggcctgtggtgtctgtctcctccctgagaccacagcttctccagtagcagactcatgggcgccaccaagtggaagcacctggagcggcctctgccatccagggcagccggcccaacaccggggacaagaccaaaccagcgcccaccacacaatagcacnnn

SEQ ID NO: 20205 - DNA, 4075 bp, Homo sapiens
agggagtcgcccacgcgtccggccgcggcgtcagagacactgcgagcggcgagcgcggtggggccgcatctgcatcagccgccgcagccgctgcggggccgcgaacaaagaggaggagccgaggcgcgagagcaaagtctgaaatggatgttacatgagtcattttaagggatgcacacaactatgaacatttctgaagattttttctcagtaaagtagataaagatggatgaatcagccttgttggatcttttggagtgtccggtgtgtctagagcgccttgatgcttctgcgaaggtcttgccttgccagcatacgttttgcaagcgatgtttgctggggatcgtaggttctcgaaatgaactcagatgtcccgagtgcaggactcttgttggctcgggtgtcgaggagcttcccagtaacatcttgctggtcagacttctggatggcatcaaacagaggccttggaaacctggtcctggtgggggaagtgggaccaactgcacaaatgcattaaggtctcagagcagcactgtggctaattgtagctcaaaagatctgcagagctcccagggcggacagcagcctcgggtgcaatcctggagccccccagtgaggggtatacctcagttaccatgtgccaaagcattatacaactatgaaggaaaagagcctggagaccttaaattcagcaaaggtgacatcatcattttgcgaagacaagtggatgaaaattggtaccatggggaagtcaatggaatccatggctttttccccaccaactttgtgcagattattaaaccgttacctcagcccccacctcagtgcaaagcactttatgactttgaagtgaaagacaaggaagcagacaaagattgccttccatttgcaaaggatgatgttctgactgtgatccgaagagtggatgaaaactgggctgaaggaatgctggcagacaaaataggaatatttccaatttcatatgttgagtttaactcggctgctaagcagctgatagaatgggataagcctcctgtgccaggagttgatgctggagaatgttcctcggcagcagcccagagcagcactgccccaaagcactccgacaccaagaagaacaccaaaaagcggcactccttcacttccctcactatggccaacaagtcctcccaggcatcccagaaccgccactccatggagatcagcccccctgtcctcatcagctccagcaaccccactgctgctgcacggatcagcgagctgtctgggctctcctgcagtgccccttctcaggttcatataagtaccaccgggttaattgtgaccccgcccccaagcagcccagtgacaactggcccctcgtttactttcccatcagatgttccctaccaagctgcccttggaactttgaatcctcctcttccaccaccccctctcctggctgccactgtccttgcctccacaccaccaggcgccaccgccgctgctgctgctgctggaatgggaccgaggcccatggcaggatccactgaccagattgcacatttacggccgcagactcgccccagtgtgtatgttgctatatatccatacactcctcggaaagaggatgaactagagctgagaaaaggggagatgtttttagtgtttgagcgctgccaggatggctggttcaaagggacatccatgcataccagcaagataggggttttccctggcaattatgtggcaccagtcacaagggcggtgacaaatgcttcccaagctaaagtccctatgtctacagctggccagacaagtcggggagtgaccatggtcagtccctccacggcaggagggcctgcccagaagctccagggaaatggcgtggctgggagtcccagtgttgtccccgcagctgtggtatcagcagctcacatccagacaagtcctcaggctaaggtcttgttgcacatgacggggcaaatgacagtcaaccaggcccgcaatgctgtgaggacagttgcagcgcacaaccaggaacgccccacggcagcagtgacacccatccaggtacagaatgccgccggcctcagccctgcatctgtgggcctgtcccatcactcgctggcctccccacaacctgcgcctctgatgccaggctcagccacgcacactgctgccatcagtatcagtcgagccagtgcccctctggcctgtgcagcagctgctccactgacttccccaagcatcaccagtgcttctctggaggctgagcccagtggccggatagtgaccgttctccctggactccccacatctcctgacagtgcttcatcagcttgtgggaacagttcagcaaccaaaccagacaaggatagcaaaaaagaaaaaaagggtttgttgaagttgctttctggcgcctccactaaacggaagccccgcgtgtctcctccagcatcgcccaccctagaagtggagctgggcagtgcagagcttcctctccagggagcggtggggcccgaactgccaccaggaggtggccatggcagggcaggctcctgccctgtggacggggacggaccggtcacgactgcagtggcaggagcagccctggcccaggatgcttttcataggaaggcaagttccctggactccgcagttcccatcgctccacctcctcgccaggcctgttcctccctgggtcctgtcttgaatgagtctagacctgtcgtttgtgaaaggcacagggtggtggtttcctatcctcctcagagtgaggcagaacttgaacttaaagaaggagatattgtgtttgttcataaaaaacgagaggatggctggttcaaaggcacattacaacgtaatgggaaaactggccttttcccaggaagctttgtggaaaacatatgaggagactgacactgaagaagcttaaaatcacttcacacaacaaagtagcacaaagcagtttaacagaaagagcacatttgtggacttccagatggtcaggagatgagcaaaggattggtatgtgactctgatgccccagcacagttaccccagcgagcagagtgaagaagatgtttgtgtgggttttgttagtctggattcggatgtataaggtgtgccttgtactgtctgatttactacacagagaaacttttttttttttttaagatatatgactaaaatggacaattgtttacaaggcttaactaatttatttgcttttttaaacttgaacttttcgtataatagatacgttctttggattatgattttaagaaattattaatttatgaaatgataggtaaggagaagctggattatctcctgttgagagcaagagattcgttttgacatagagtgaatgcattttcccctctcctcctccctgctaccattatattttggggttatgttttgcttctttaagatagaaatcccagttctctaatttggttttcttctttgggaaaccaaacatacaaatgaatcagtatcaattagggcctggggtagagagacagaaacttgagagaagagaagttagtgattccctctctttctagtttggtaggaatcaccctgaagacctagtcctcaatttaattgtgtgggtttttaattttcctagaatgaagtgactgaaacaatgagaaagaatacagcacaacccttgaacaaaatgtatttagaaatatatttagttttatagcagaagcagctcaattgtttggttggaaagtaggggaaattgaagttgtagtcactgtctgagaatggctatgaagcgtcatttcacattttaccccaactgacctgcatgcccaggacacaagtaaaacatttgtgagatagtggtggtaagtgatgcactcgtgttaagtcaaaggctataagaaacactgtgaaaagttcatattcatccattgtgattctttccccacgtcttgcatgtattactggattcccacagtaatatagactgtgcatggtgtgtatatttcattgcgatttcctgttaagatgagtttgtactcagaattgaccaattcaggaggtgtaaaaataaacagtgttctcttctcta

SEQ ID NO: 20206 - DNA, 1470 bp, Homo sapiens
  misc_feature 1, 1459, 1460, 1461, 1462, 1463, 1464, 1465, 1466, 1467,1468, 1469, 1470: n = A,T,C or G
ncacccacgcgtccgaagtatttgaagtgatgctggctacagaccgctcccactatgcaaaatgtaacccatacatggattctccacaatcaataggttttgctgaactgctgagccttggcagtgggcgcctttgaggcttagaagtgcctcaggattctgtcagtcggctgccatgctatcttcttttgacgcactattaccagccagcagagaagatcctggggagcttctgaaccccgaaggcacctgctaccaccgctcagtgaaacttgcttcagaggcagaaagaagcaggtttccaagcaacaatcagtgctccacacatgcatgcatatgcgctagaacttctatttgatcagttgcatgaaggagctaaagctcttgatgtaggatctggaagtggaatccttactgcatgttttgcacgtatggttggatgtactggaaaagtcataggaattgatcacattaaagagctagtagatgactcagtaaataatgtcaggaaggacgatccaacacttctgtcttcagggagagtacagcttgttgtgggggatggaagaatgggatatgctgaagaagccccttatgatgccattcatgtgggagctgcagcccctggtgtaccccaggcgctaatagatcagttaaagcccggaggaagattgatatgcctgttggttgcctgcaggcggaaaccaaagtgttggagcatgtatgacaagctacgaagatggcagcatcaataatgaagcctctgatgggggtgatatacgtgcctttaacagataaagaaaagcagtggtccaggtggaagtgattttatcgttctgctctttcttcttccacacatgcatagggatgaattgtaaaagcaacatcagcttgaccagtataaaattacagtggattgctcatctcagtcctcaacagtctttttgaaaaccaacaccatcgacagcttgttttggacttgttacactgttattttcagcagtgaaaatgtgtgtttttctcagggtttctgattcttcagagaggcgcagagccaaatggtagaggaaggatgcacagtataaattggtgtactattactttaacatgcccatattttacttggaatgattataagaagggtctgtccagtggacacttagttgtgacttgattttggggagtggctggcttgtctggcacttaattctgttctgggtattattatcagattgcctatgtgctttggttacgcacattccaagttagatgctggatgcgggttccgtcgatgcttcttagacatgagagggcgtccttttaagctgggggtgggcgggaaaccgggtgggtcaccccggctgggcccacaggctcgtgtttccccggggggggggcgtactccggcggggaaggggacctcttcccaagaggagggggggccgcgcggagagacaannnnnnnnnnnn

SEQ ID NO: 20207 - DNA, 2048 bp, Homo sapiens
ctcactatagggctcgagcggccgcccgggcaggtctagaattcagcggccgctttttttttttttttttttttttttttttttttttttttctctatacaaggctgtttatttctgtacaaaaccatgtttctattttacacaaagaacaccccaccctttcccctcacaccagcaccctaaccctggggagcatcccccaggaggagggggctgaaggaggccccaccccccaggccctagcttctgcctgccctggctgggccagcctgagtgccactgtaaagaaaataaataaggaggctcaggcagaatctgtgttggaccaggcagaatctgtgttggaccagccagactccagcccagcccagtggccaggcagcttggccctcagagggtgggcaggatgtggaatgtcagttcatgaaccgtgtagttatatggagaccccgccctggaggccttagctgccagggttacaagtaggtgtcctcactctcttgggacgtcaagctctcctgggagcggtggtgggctgagacctggggagccaaatcctgaggggctgagtccttgggggctgagtccttcgggggcacatgctgtgggggacatgcatctcctgcagcggccaccaccatggcttgatttggggctgggggcttctccagctgccctctccccttcatctgtttccgctgctccttctgggcctgcttgggtggcttgggcttggctttggagccagggaggggggcatctaggggcaggcggatggatggtgaaggttgtagggcaggccggggaccaggttctgcatccaagatagccttggcaccatgcagcctgggcggggagcggcactgcagctcaccccgggtctcctgccagcgccgcagctgaatgaggtgttcgcgctcaatctggcgctctgtcacgggcaactccaccacctcctggaccagaaaggcctcctgcatgatcttggggctgaggctccgcagtcgctcgatggtctcgtactggccctggcaggctttgaccttctcaggggagcccagcgcgtgcttcagcagcaccagccccacccggaagatgatcttgaccccttcacagaagaacatgtcccagacacgcagcacagagctccagggcaaggttcgggagaaggcgcacatgaaccattctgtcatatagaggagcgggtcgatcttctgacggctgaggtgcttgtgggccaccggcgacaccttctgcaacagcgagaaaaggatctccccgtccagctggatcgcctccagtttctcgctgtagtagccgggcaggtacttctcacagatctgtaccaggcaccagaaggcttgctcagcaggcatatgcatgagcaagacagcggcaatgggcgcctgggcctggcagtagccctcctcgggccggtacagcgtgtaggccttcagcacacggaataggtcctgctggccgtggcccccccgggacacaaacatctcatggaatgggaactgccggtgcaggtcacgctcaatcacgtccagccacttggggtccccaggggacatgtccagctcgtcaaactttccagggttctgctgtaacttcaccttgcctcctgacaggtactgccaagcacggccccgcagagaaggcgggatgcccttttggcaccgcagacgaatctttttgtgcttcttggccatccatttgtcccagttgttgagcatgtccagccacttggactccctctgcctcagcacctccaggggtacttcctccagcgcgccctcggcgccctgcgagcccacgatgaagccgaacttgtcgatgcggcgctcggcgaagccgttggcctccgagtcagacccgagagagctgagttcgtcggtggttgcggcgtcggggccctgggccaggctctcccgggttcccgacaggctttccccggccgcgggcgcgcccggcccattctctccgttgctcttcgccatcccagccgcgcccgccgcctgagctccagcggcccggacgcgtgg

SEQ ID NO: 20208 - DNA, 1025 bp, Homo sapiens
tcgacccacgcgtccgggaaaacagcaaaccaccttcacggatcttgtggcccaattaggcttggcatctgctctgaggccagatggagaatacactttgctggcacctgtgaataatgcattttctgatgatactctcagcatggatcagcgcctccttaaattaattctgcagaatcacatattgaaagtaaaagttggccttaatgagctttacaacgggcaaatactggaaaccatcggaggcaaacagctcagagtcttcgtatatcgtacagctgtctgcattgaaaattcatgcatggagaaagggagtaagcaagggagaaacggtgcgattcacatattccgcgagatcatcaagccagcagagaaatccctccatgaaaagttaaaacaagataagcgctttagcaccttcctcagcctacttgaagctgcagacttgaaagagctcctgacacaacctggagactggacattatttgtgccaaccaatgatgcttttaagggaatgactagtgaagaaaaagaaattctgatacgggacaaaaatgctcttcaaaacatcattctttatcacctgacaccaggagttttcattggaaaaggatttgaacctggtgttactaacattttaaagaccacacaaggaagcaaaatctttctgaaagaagtaaatgatacacttctggtgaatgaattgaaatcaaaagaatctgacatcatgacaacaaatggtgtaattcatgttgtagataaactcctctatccagcagacacacctgttggaaatgatcaactgctggaaatacttaataaattaatcaaatacatccaaattaagtttgttcgtggtagcaccttcaaagaaatccccgtgactgtctatagtcctgaaataaaatacactaggatttctactggaggtggagaaacagaagaaactctgaagaaattgttacaagaagacacacccgtgaggaagttgcaagccaacaaaaaagttcaaggatctagaagac

SEQ ID NO: 20209 - DNA, 1172 bp, Homo sapiens
  misc_feature 23, 29, 47, 92, 106, 159, 174: n = A,T,C or G
cacaaagaacattttattagccnaagaantaaaccattccttctctncccaagcccaccccaagcccctcaaaagatagtttggtaaggaanagcttggatgaatntcccttatccttcagaagactgaaggaaaacgacgttctgtgcaaataggttncccagagtgtatgtntgggggttatttagaccagattaaccagggaaagaggaaggggacagtggggaactgttgaagccccaggaaaaacaaggggagctgggcctaaggaaccaaaggaggtgggaagagtgggcctagaacccaaaagtggggtcctttctgaggcagggtggtcccttggctccccttcatcaccctcctcttgcccttgagtttcttcctcttggtcttcgtccccaggaccccgatgaacaggctgcttgcaaatggggcaggtcttccgggtctgagtgagccaggggtccacgcagcggctgtggtaggcatgagcacaggggagtacccgcagcttgtccccatcctcatattcatccaggcaaatggcacagacatcatactggtctcctgggacagaaagaaaataatctagtccttcactgagccacaatgacccagggctaaggcttttaaagccttgcaaaaatttcccctcacctacaaagccagtggaagagataagacaggtaggcaggataaggtcagggcagaacatggaagaatttagggctagaagggacaagcaaagagaagcagaggtaagaagggaagtgggtttttggggaggtgtgagggtggagatagggagtggaaggaacggaaatgggcagggcttctgccacagccttatacgggcactggaggccccagggcctaaagccccagccccttggtaccggtttcttccttctctaactgaatcctccccattcctcccatttttctgctctgtccacatcccctataagcaaagtctatccctctattgtttcccacaattatttcacttaatcatctttgctttccatctcctctcccgtcttcgttgtatttatgcataaaaacagaagaaaagacagcatctcaagctgaaaccttcctactgccatctttatttttattattatttttttgagaaagggactccctctgtcgcccaggctggagcacag

SEQ ID NO: 20210 - DNA, 2544 bp, Homo sapiens
  misc_feature 1, 2, 3, 2544: n = A,T,C or G
nnncatactttttgtcctgtacttgcgctgtcctgattcactctgcgactcgtagtgttgtcgctctttcttcttttctctcgtttcgctctgcttcttgtctctgcagcctttgatcgttgcagctcgtatccgtcgtcctgtctgctccctcgtcttgtgtctgtctcgggccgcttgctcttcgtgtttcgcgttgttcccctcggtctgctcgttcgtcctagtgtcttctgccgctctgtttctcgtggttcctcttcctccctcagccagtttgttccttgttctgttctctctttgttcgtcccaccgcctcctcctgcgccgcctcccccctctcgttgcccgtccgcctgtccagccctccgccctccactcctcgcggctgtcgctccgtccctctgccgcccgccgctccctgctgcgccctggtccctcgcgcggctcctctcttgccgtcgcgctccccctcgctcggtctgcgccctcccctcctcccctctttccttcccctctcccgttgctgttggctgcttcttgtccgctcggccttcctcttgtttctcgtctctgcttcgctcgttgttgctctcctcctctttcgcccgtggtcctgctccgttctcctgctccctcgctccgtctgccccacgctgctcctccccgcgctccctttctcctccgccttcccctgagtctgcgtcttctagctccgtctttattttgtactgtggttgtagtatggggtggggggctgttatggtgaggaggtgatggaggatggtgctgtggtaatgataaaaaaagaaaaataaaaaaatgatataatcaacagaacagtagggtgtcgagagatgtgtggtttgagggtcattggtgggtgttgtccgcgcgttgatgtcggatagtcgtgtgatcgtatagttgtggtccgttggacgatgcgtggtttaagggtttatgcggaccatgtgaatcaggctcagctcttcatctggaaagtaaagtttatataaaagtagtaaaaactagatattttataaaaattattggtagttcaaggatagcacagtggcaatatgaatcgagtcttaaaatatgcatcatttcagaaaacacttgcccctcttaaaaaaaaaaaaaacccaaaactaaacaacaacaacaaaaacctccaggaaaaaacaatcaggtatacacaattaacacaagaatagcaaacttctttgggaaaatgaaatagttaccaaaaacatctctcttaaagcttcaaacaggtatattacttgaggaaaagtatattctctgtgtactaaggatgaattaaaaaatcaactggtttgctctcttcccacctgaaaagggatgactgcattaatatatgtgctttccacatccatatatgttttaataaaagtctaccatctatgtcttttgtttcaaacattttgaaacaaaatatgtattgattcttcaatgaatgaaatcacgcctcaaagtttggagaaggaaaagccagtgaaaataaggccaaaaaaccataccacaaaaggacaggaagcctgcagaaataaacagttctctttctgaagcgatgttttagaatactgatataattcatggaaacaagaaaacaaatactgttcatctttattcaaattgagtgaattctggcaacatcataatctggtggctcaggccaacagaagtgactagaactttatggaaaagtactgttcaacattaaatctacaaacaaaggtttatggaagagggaatgtcaaatttatgtatttttatcatatggtgagctgctcatgtcgtcttgacagtctgaaggctttaaaagatggttttacattgttagctaataaattacagatgatttctattttgccatgtctaaaactagctctgggcaggtatgaacaagtggtgacatggaagctgccaggaggtatcaaaaacaaggcatgaatattcatttgctaggaagctataatgtctgttccctaggtgacatataggactactcaaacctcttaccacacaaagtgcacgatcacgcagtcctgaaaaatacacgttaggtttatattttgtgtaacagtttatggaaaactgaaatgaaaaattattttttctgactaaaaatataaaataccttgagactcaagaaaaatgtatatgtttgtgaatgtataaaaccaaaaaggacaaattctggttactttttaaagaggtaatttatattacttctgagtgaataattttgcctttcactgtgataaatataagtgggtcatgtttacagtattcccttagaagccttcaacttttcataactctcctaggaaaaatcccattgcaaataaagttgggggtgggagaagaatctcctttaaagctttcaaatcataaagttgttcctgtttacacattgaggagcatacttaaaggacatgaagggatctgaattcatgagactaaggcatagcatcactcatcagaaatactcaaacattttataaacacaagaan

SEQ ID NO: 20211 - DNA, 896 bp, Homo sapiens
  misc_feature 1, 895, 896: n = A,T,C or G
nacccctcttaaaaaaagccaaagcaccgccacacctcatagagccactgatcccccgcgtccccccccggaccaaaccccaggaggtgaccgacagcgagtggcccagaaaggatattcttacataaggcgtggcccacggggacatggcatgggagggcttgtttcactccatttccaatctggtgtacaggaaattccttatctataactgtccatttccccccagttaactgcttttccaacaaactcaaaccccttgaaaaggtgctaagattggtttctgttaacatcaaaaaaaaaaaacagccctcagagccttcccgatcactgctttagtgatgaatgtctcgaggctatttcttgattctgattgcaaacattgtttgttgtagaaaaactgttctgtcccaaagaattttctccttcatcaaactttttggattgtgagagctgaatgttttcatgtgtattctttcttctttgagtttttttcactggcaacaacaataatactaagataccaagaatgtgcaggcaataataccaggagctgtaaaacgtgagtgatggttttatagaaagaagcacaaatggcacaactgtgtaacttattgctacttgagttactatccatgttataacatcataaaataatttcagttgggaaggttcaatgaaataatgtctaaagttatttctcatccttctgctaatctttatttaactcagtttttatctctccttcagaaaattcttttgagccaaagagctgtctgaatattccaattatcaagaaacatcttgaaacttgttgacatctctatttgttgaattctcaaattggaaattaagtcccagcgagctgctccattttcgtcataccctctgaaann

SEQ ID NO: 20212 - DNA, 1745 bp, Homo sapiens
  misc_feature 1, 2, 3, 1741, 1742, 1743, 1744, 1745: n = A,T,C or G
nnncagtatccaggagaggccgtgccgtgtcacttcttggcacatttcagtccgtttcctcttggttaaaactgcctctttagatgtggatgccttaatgctgtaacacatttgaaaacattggcaatacttaagttgctgccatgattacagatggaattattggctaccaaagagacgcaattgatgatgagaagcatgattcttgcttccatataaccaaagttaatcttaattgcaatttgactccgtttccttggtagggatagactttcttcagattccaagtgctctcttaaatggcaaattaagttaaagaatactactgctccattcccctcacttattctccagttaattgcttgtcagttccatttcaagaaagcagtgatgttccaggtttgattcagttttcctgtgcacactattgccaaatttttttttagcaaagattctgcactggaacgtagacagttggaaacagtactacctacctagaggttatgtgttttctctttctccccgctttcacctctttctttcccaattcaaaacagccaagtgagccctgttctggtattttgaatcattagagaaaagaaagggagtggctgttttgagttgtcctttctttgcagaaaggagaaaatgtgattgtgttttttttttaccagcctacttctaagtgtcactgcctggtttttctctttttcaaggattagaactaagaggacacaccagcatcggagtgtattaagcccctgaaacacatggtagctagggactgaacacaggaaccgtatgacagcagcacaaacccccaaaggatgttcctgccttgtgggcccctgagccccttgggagactgagaatcatgaccagattcatccagaactgctgcagtgttaagtgaaaatcctctgtagttgttctgcagaggaaccttccttccattagaaaatttctgctcaatacagaatggtccacatcacccaaagtgcactgttggagatgctgtgaaattaaaacctctttgtacctgagacatctagattcacctcaggaggcctgaaggaaatgtgtaacttgtgggaaagaactagacaaccatttaggaattctctagatatactcagcctaacccagtggcttaacacaaggagattggctttgatctttttttcttgtggcatcttccagcaagttagaagtctcatgggataagactgcagttcccctggttcaatagctggaacagtgattttaaatgtccctttttctggatcccttgtaaacatgaaatcattccatggatggctgccttataattttgtctctttccactttaattgtgaatggttaaaaaaatgctgttttctgatattaaatttttattagtgcataccttaaaaaaaaggggcggccaatgaccaccccgcagtcgaggagacaacacacagaaaaagaaaacaaacgggaaggcaataaaaataagaaaaggagaaggatgagaacacagggagcaccacacaaacgactgacacacgacaatacaaagcaccacgccatacacagcaggacagcggacagagctaccgtggactcgtaagcaagacacaacattaggctctaacggaaacagacacacttgaatctgaatatattagaaaggcatcagcaacaaagaatcgtgagaaaagtcaaccatgcaaactacgaccagaaccaataaatatctgannnnn

SEQ ID NO: 20213 - DNA, 3359 bp, Homo sapiens
ttttttttttttttttttttttttaaaaaaaccaaaccaggaccagaatgggtttattccaagaacagaagtaatgctcaaaactaggaggttttgaaataatgcatactaatttatcaatgttagctattatataattcattaaatcccaaatttatttttgttaatataattcattaaaatagaaactgttaatataattcctttcgaagactagaggagaaaagcagataatctccaaagatgccaaaaaagccgttgataatattcaattctcactttaataaaaattctagaaacaaagatataaaagtccatgttatatctccttcagtctacttgtcgggttcatcatccattattaccccacatgaaagctaacttctttttccttgctcctccatttgctagctgtgtagcctttgacaagttacttaaccactctgtgctgatttcctatgtgtagtaaaataagagtacctaccttatgttgtaatgatcaagtcctcaatacattattcttaatcactttttaattgcaagaatttggtcattaaacatccctttgactggattgcgagcaccttgacagcagggactaacagtggaactttctggagacttaaggaatgtctgttgaatcctgatgcaagctttctcaccttcctgtgttctctcattgcttcctcatcctgtccagccgtccgtccacccgtcgcaagcctaaccccagtcaataaccactgtttacaacactttctttgtacccttcttatagtgcttattacattgttttgaatactaaatgaatatatagtgcgtcgttgtgtttaacatttaggacataaccactcataatgttacagttaaaaaaatagttttgtgcattcctctagggccgaactgtgccgtacttctggtttcactgtacagtgtctacaaagcacagtgtcaaagacagagctcgggatgagaactgggctaaggcgcgccccgaactccccaaaccctattattcagggcccggagaggtgcgggctccgaaggtgtggagagcgaaacacgcagagcagtgattccactcatcagtcacacagtaagacgggacagccccatctcgcagtttttcattattcaacacagagcccaacgcgcacgcaacagatccgcgcgcagggctgtttggaggcgcttggggcgcacaatctggggcaggcggaaccttagtcctcagcctcgcgtttcccgcgactccgctctcaccgctacactaccacacaaacggcctccttcccccacccccgggggcccatcccggtggcgggctccggagctcgggactgctaatttcagcgaaacgattaaaagacgcccctacagctgacggcactttctctcctccggcagggaaggacgtccagcgtagcgtcgcccgcgcttccccgccggcgcagagcaggcctcacagaatcgcacgccgctggcacgcacgccgccccgcccccacggcccagcgccagccgcgccccgcgctcgcacgcatcccggcctcactgcccctcgactcctgttccgttggaggggcctgaggcgagcctgagcgcgctgttggccggagggaagccggaggagaccgggtcgactgggcagagcggcagagggtcgaggagcctgctctgcacgcccagggagtagaagtgggcagggagcagggtcacgtgagggagcgcgccgcgactgagcttgggtccgactggagctcaggctcgcgacccagactggtgggccaggcctccaagccggccttacacccaatccaaggaggacagaccggacacagagggacggagcgagcaaggagacatggcttcatcattcctgcccgcgggggccatcaccggcgacagcggtggagagctgagctcaggggacgactccggggaggtggagttcccccatagccctgagatcgaggagaccagttgcctggccgagctgtttgagaaggctgccgcgcacctgcaaggcctgattcaggtggccagcagggagcagctcttgtacctgtatgccaggtacaaacaggtcaaagttggaaattgtaatactcctaaaccaagcttctttgattttgaaggaaagcaaaaatgggaagcttggaaagcacttggtgattcaagccccagccaagcaatgcaggaatatatcgcagtagttaaaaaactagatccaggttggaatcctcagataccagagaagaaaggaaaagaagcaaatacaggttttggtgggccagttattagttctctatatcatgaagaaaccatcagggaagaagacaaaaatatatttgattactgcagggaaaacaacattgaccatataaccaaagccatcaaatcgaaaaatgtggatgtgaatgtgaaagatgaagagggtagggctctacttcactgggcctgtgatcgaggacataaggaactagtcacagtgttgctgcaacatagagctgacattaactgtcaggacaatgaaggccaaacagctctacattatgcctctgcctgtgagtttctggatattgtagagctgctgctccagtctggtgctgaccccactctccgagaccaggatggctgcctgccagaggaggtgacaggctgcaaaacagtttctttggtgctgcagcggcacacaactggcaaggcttaatcaaaagactggaaaactgcagtctgtaatagcataaggcttccattatgaaagaaaactacaaaaataatacttcttttccacccgtctttggtatgtattggctaataaaatcagttctgtggaactgggaaaaaaaaaaaaaaaaaaaaaaaaaaaaaaacccgggaaaattttctttttttccccgggggaaaaaaccggggagaaggggggggggggtttatacacccggggggggggggcggggtggggaaaacccgcgccccttttttctctccaaagaggccgaagtgtgggggggccatggggggcccggaggtttgtgtccgttgggaagagggcggcacaccctgaggggaagagacgcccgtctggtcttgcggttgggcgagggcgcccccggttcatcggcgctggtttcggtgacacggcgtcccagttgaagtccgacgggtgccagcggggaccacataagacggtgttcccgggtaaatgagagggtgccaagctctgtagacccgcggggaccagtcccgggtggattggccacggcggctccccgtgtgtatttcgaccgtgtgtcccacaaaagggtctcgtggtacaccgagggacgagcgctggcgcacccaccggtgctgcta

SEQ ID NO: 20214 - DNA, 4567 bp, Homo sapiens
ccgatagaggctgggggtggggggggaggtcaagcgtagcctcttctcctttaccaagatggcggcttgtccctgtttcgccacagttcctaccttatgagctcggttttcttatgcttataagagtggaacagcaaaagctggcaggctgacagaggcggcctcaggacggaccttctggctactgaccgttttgctgtggttttcccggattgtgtgtaggtgtgagatcaaccatgagttccgttgcagttttgacccaagagagttttgctgaacaccgaagtgggctggttccgcaacaaatcaaagttgccactctaaattcagaagaggagagcgaccctccaacctacaaggatgccttccctccacttcctgagaaagctgcttgcctggaaagtgcccaggaacccgctggagcctgggggaacaagatccgacccatcaaggcttctgtcatcactcaggtgttccatgtacccctggaggagagaaaatacaaggatatgaaccagtttggagaaggtgaacaagcaaaaatctgccttgagatcatgcagagaactggtgctcacttggagctgtctttggccaaagaccaaggcctctccatcatggtgtcaggaaagctggatgctgtcatgaaagctcggaaggacattgttgctagactgcagactcaggcctcagcaactgttgccattcccaaagaacaccatcgctttgttattggcaaaaatggagagaaactgcaagacttggagctaaaaactgcaaccaaaatccagatcccacgcccagatgaccccagcaatcagatcaagatcactggcaccaaagagggcatcgagaaagctcgccatgaagtcttactcatctctgccgagcaggacaaacgtgctgtggagaggctagaagtagaaaaggcattccaccccttcatcgctgggccgtataatagactggttggcgagatcatgcaggagacaggcacgcgcatcaacatccccccacccagcgtgaaccggacagagattgtcttcactggagagaaggaacagttggctcaggctgtggctcgcatcaagaagatttatgaggagaagaaaaagaagactacaaccattgcagtggaagtgaagaaatcccaacacaagtatgtcattgggcccaagggcaattcattgcaggagatccttgagagaactggagtttccgttgagatcccaccctcagacagcatctctgagactgtaatacttcgaggcgaacctgaaaagttaggtcaggcgttgactgaagtctatgccaaggccaatagcttcaccgtctcctctgtcgccgccccttcctggcttcaccgtttcatcattggcaagaaagggcagaacctggccaaaatcactcagcagatgccaaaggttcacatcgagttcacagagggcgaagacaagatcaccctggagggccctacagaggatgtcaatgtggcccaggaacagatagaaggcatggtcaaagatttgattaaccggatggactatgtggagatcaacatcgaccacaagttccacaggcacctcattgggaagagcggtgccaacataaacagaatcaaagaccagtacaaggtgtccgtgcgcatccctcctgacagtgagaagagcaatttgatccgcatcgagggggacccacagggcgtgcagcaggccaagcgagagctgctggagcttgcatctcgcatggaaaatgagcgtaccaaggatctaatcattgagcaaagatttcatcgcacaatcattgggcagaagggtgaacggatccgtgaaattcgtgacaaattcccagaggtcatcattaactttccagagcccagcacaaaaaaagtgacattgtccagctcagaggacctaagaatgaggtggaaaaatgcacaaaatacatgcagaagatggtggcagatctggtggaaaatagctattcaatttctgttccgatcttcaaacagtttcacaagaatatcattgggaaaggaggcgcaaacattaaaaagattcgtgaagaaagcaacaccaaaatcgaccttccagcagagaatagcaattcagagaccattatcatcacaggcaagcgagccaactgcgaagctgcccggagcaggattctgtctattcagaaagacctggccaacatagccgaggtagaggtctccatccctgccaagctgcacaactccctcattggcaccaagggccgtctgatccgctccatcatggaggagtgcggcggggtccacattcactttcccgtggaaggttcaggaagcgacaccgttgttatcaggggcccttcctcggatgtggagaaggccaagaagcagctcctgcatctggcggaggagaagcaaaccaagagtttcactgttgacatccgcgccaagccagaataccacaaattcctcatcggcaaggggggcggcaaaattcgcaaggtgcgcgacagcactggagcacgtgtcatcttccctgcggctgaggacaaggaccaggacctgatcaccatcattggaaaggaggacgccgtccgagaggcacagaaggagctggaggccttgatccaaaacctggataatgtggtggaagactccatgctggtggaccccaagcaccaccgccacttcgtcatccgcagaggccaggtcttgcgggagattgctgaagagtatggcggggtgatggtcagcttcccacgctctggcacacagagcgacaaagtcaccctcaagggcgccaaggactgtgtggaggcagccaagaaacgcattcaggagatcattgaggacctggaagctcaggtgacattagaatgtgctataccccagaaattccatcgatctgtcatgggccccaaaggttccagaatccagcagattactcgggatttcagtgttcaaattaaattcccagacagagaggagaacgcagttcacagtacagagccagttgtccaggagaatggggacgaagctggggaggggagagaggctaaagattgtgaccccggctctccaaggaggtgtgacatcatcatcatctctggccggaaagaaaagtgtgaggctgccaaggaagctctggaggcattggttcctgtcaccattgaagtagaggtgccctttgaccttcaccgttacgttattgggcagaaaggaagtgggatccgcaagatgatggatgagtttgaggtgaacatacatgtcccggcacctgagctgcagtctgacatcatcgccatcacgggcctcgctgcaaatttggaccgggccaaggctggactgctggagcgtgtgaaggagctacaggccgagcaggaggaccgggctttaaggagttttaagctgagtgtcactgtagaccccaaataccatcccaagattatcgggagaaagggggcagtaattacccaaatccggttggagcatgacgtgaacatccagtttcctgataaggacgatgggaaccagccccaggaccaaattaccatcacagggtacgaaaagaacacagaagctgccagggatgctatactgagaattgtgggtgaacttgagcagatggtttctgaggacgtcccgctggaccaccgcgttcacgcccgcatcattggtgcccgcggcaaagccattcgcaaaatcatggacgaattcaaggtggacattcgcttcccacagagcggagccccagaccccaactgcgtcactgtgacggggctcccagagaatgtggaggaagccatcgaccacatcctcaatctggaggaggaatacctagctgacgtggtggacagtgaggcgctgcaggtatacatgaaacccccagcacacgaagaggccaaggcaccttccagaggctttgtggtgcgggacgcaccctggaccgccagcagcagtgagaaggctcctgacatgagcagctctgaggaatttcccagctttggggctcaggtggctcccaagaccctcccttggggccccaaacgataatgatcaaaaagaacagaaccctctccagcctgctgacccaaacccaaccacacaatggtttgtctcaatctgacccagcggctggaccctccgtaaattgttgacgctcttcccccttcccgaggtcccgcagggagcctagcgcctggctgtgtgtgcggccgctcctccaggcctggccgtgcccgctcaggacctgctccactgtttaacactaaaccaaggtcatgagcattcgtgctaagataacagactccagctcctggtccacccggcatgtcagtcagcactctgggccttatcgagctcgataaggccaagggtatggaaagctttcacaatgcatgccgagtgtgaagtgacacccccagcagatggggtttatcatctttacttagtcacacaacatcaaggactggttagttccagggaagggctccatttcattacctgggtcagttctcttcccccgcatgctccacaatgcagtagaaccaaacacacattcatttggcccttatc

SEQ ID NO: 20215 - DNA, 2414 bp, Homo sapiens
  misc_feature 2409, 2410, 2411, 2412, 2413, 2414: n = A,T,C or G
tcgacccgctccggacgggaccgcgagcacaggccgctccgcgggcgcttcggatcctcgcgggaccccaccctctcccagcctgcccagcccgctgcagccgccagcgcgccccgtcggcagctctccatctgcacgtctctccgtgaaccccgtgagcggtgtgcagccaccatgttcagctggctgaagcggggcggggcacggggccagcagcccgaggccatccgcacggtgacctcggccctcaaggagctgtaccgcacgaagctgctgccgctggaggagcactaccgctttggggccttccactcgccggccctggaggacgcagacttcgacggcaagcccatggtgctggtggccggccagtacagcacgggcaagaccagcttcatccagtacctgctggagcaggaggtgcccggctcccgcgtggggcctgagcccaccaccgactgctttgtggccgtcatgcacggggacactgagggcaccgtgcccggcaacgccctcgtcgtggacccggacaagcccttccgcaaactcaaccctttcggaaacaccttcctcaacaggttcatgtgtgcccagctccctaatcaggtcctggagagcatcagcatcatcgacaccccgggtatcctgtcgggtgccaagcagagagtgagccgcggctacgacttcccggccgtgctgcgctggttcgcggagcgcgtggacctcatcatcctgctctttgatgcgcacaagctggagatctcggacgagttctcagaggccatcggcgcgttgcggggccatgaggacaagatccgcgtggtgctcaacaaggccgacatggtggagacgcagcagctgatgcgcgtctacggcgcgctcatgtgggcgctgggcaaggtggtgggcacgcccgaggtgctgcgcgtctacatcggctccttctggtcccagcccctcctcgtgcccgacaaccggcgcctcttcgagctggaggagcaggacctcttccgcgacatccagggcctgccccggcacgcagccttgcgcaagctcaacgacctggtgaagagggcccggctggtgcgagttcacgcttacatcatcagctacctgaagaaggagatgccctctgtgtttgggaaggagaacaagaagaagcagctgatcctcaaactgcccgtcatctttgcgaagattcagctggaacatcacatctcccctggggactttcctgattgccagaaaatgcaggagctgctgatggcgcacgacttcaccaagtttcactcgctgaagccgaagctgctggaggcactggacgagatgctgacgcacgacatcgccaagctcatgcccctgctgcggcaggaggagctggagagcaccgaggtgggcgtgcaggggggcgcttttgagggcacccacatgggcccgtttgtggagcggggacctgacgaggccatggaggacggcgaggagggctcggacgacgaggccgagtgggtggtgaccaaggacaagtccaaatacgacgagatcttctacaacctggcgcctgccgacggcaagctgagcggctccaaggccaagacctggatggtggggaccaagctccccaactcagtgctggggcgcatctggaagctcagcgatgtggaccgcgacggcatgctggatgatgaggagttcgcgctggccagccacctcatcgaggccaagctggaaggccacgggctgcccgccaacctgccccgtcgcctggtgccaccctccaagcgacgccacaagggctccgccgagtgagccgggcccccctcccatggccctgctgtggctccccagctccagtcggctgcacgcacacccctgctccggctcacacacgccctgcctgccctccctgcccagctgtaaggaccgggggtctccctcctcactaccgccagacaccccggtggaagcatttagaggggaccacgggagggacaaggcttctctgtccgcccttcacacctccagcctcacgttcacttaggcacatcacacacacactggcacacgcaggcatccatccatccgtcattcattcaaatatttattgagcacctactatgtgcccagccctgttctaggcactgggcattaccatagagaacaaaatagacaaatacatctgccctcatggaaggtgacgttcccaggagagggcacctacacagtcacgcaaacacacactaattcctggcagggcccccagcccctcccctggctgagcagccctgtggctgaaatgactagcagataaacagaccctttggtcggtttctctgccagcagaaacctaacgtctcactctccgtcggcccgggtgctacggggaacttgtctccaagggcctaccttcgnnnnnn

SEQ ID NO: 20216 - DNA, 2269 bp, Homo sapiens
  misc_feature 1, 2, 2268, 2269: n = A,T,C or G
nnagtcgaccacgcgtccgcctggctaacatggccgaaaggtcgtattctccgggggaggacggaggcccggagaggagggggtggagtgcctggttttccagtcaggcggccggagggcagccctcaagaacggccctgaccgcccgcggggtgaggggccctttctgggcaggacccgccccttggtcccgcagagccttggtacttggacctgaaccttgctccgagagggagtcctcgcggacgtcagccaagattccagaatgactactatcttgacttacccctttaaaaatcttcccactgcatcaaaatgggccctcagattttccataagacctctgagctgttcctcccagctacgagctgccccagctgtccagaccaaaacgaagaagacgttagccaaacccaatataaggaatgttgtggtggtggatggtgttcgcactccatttttgctgtctggcacttcatataaagacctgatgccacatgatttggctagagcagcgcttacgggtttgttgcatcggaccagtgtccctaaggaagtagttgattatatcatctttggtacagttattcaggaagtgaaaacaagcaatgtggctagagaggctgcccttggagctggcttctctgacaagactcctgctcacactgtcaccatggcttgtatctctgccaaccaagccatgaccacaggtgttggcttgattgcttctggccagtgtgatgtgatcgtggcaggtggtgttgagttgatgtccgatgtccctattcgtcactcaaggaaaatgagaaaactgatgcttgatctcaataaggccaaatctatgggccagcgactgtctttaatctctaaattccgatttaatttcctagcacctgagctccctgcggtttctgagttctccaccagtgagaccatgggccactctgcagaccgactggccgctgcctttgctgtttctcggctggaacaggatgaatatgcactgcgctctcacagtctagccaagaaggcacaggatgaaggactcctttctgatgtggtacccttcaaagtaccaggaaaagatacagttaccaaagataatggcatccgtccttcctcactggagcagatggccaaactaaaacctgcattcatcaagccctacggcacagtgacagctgcaaattcttctttcttgactgatggtgcatctgcaatgttaatcatggcggaggaaaaggctctggccatgggttataagccgaaggcatatttgagggattttatgtatgtgtctcaggatccaaaagatcaactattacttggaccaacatatgctactccaaaagttctagaaaaggcaggattgaccatgaatgatattgatgcttttgaatttcatgaagctttctcgggtcagattttggcaaattttaaagccatggattctgattggtttgcagaaaactacatgggtagaaaaaccaaggttggattgcctcctttggagaagtttaataactggggtggatctctgtccctgggacacccatttggagccactggctgcaggttggtcatggctgctgccaacagattacggaaagaaggaggccagtatggcttagtggctgcgtgtgcagctggagggcagggccatgctatgatagtggaagcttatccaaaataatagatccagaagaagtgacctgaagtttctgtgcaacactcacactaggcaatgccatttcaatgcattactaaatgacatttgtagttcctagctcctcttaggaaaacagttcttgtggccttctattaaatactttgcacttaagccttgccagtgttctgagcttttcaataatcagtttactgctctttcagggatttctaagccaccagaatctcacatgagatgtgtgggtggttgtttttggtctctgttgtcactaaagactaaatgagggtttgcagttgggaaagaggtcaactgagatttggaaatcatctttgtaatatttgcaaattatacttgttcttatctgtgtcctaaagatgtgttctctataaaatacaaaccaacgtgcctaattaattatggaaaaataattcagaatctaaacaccactgaaaacttataaaaaatgtttagatacataaatatggtggtcagcgttaataaagtggagaaatattggaaaaaaaaaaaagaacaaactcgagtttttttttttttttttggtatctgttcaatgaaggtcnn

SEQ ID NO: 20217 - DNA, 438 bp, Homo sapiens
  misc_feature 1, 2, 437, 438: n = A,T,C or G
nncaccacgcgtccgggggacatggtggtgagcaggacagaattcctgtcctcatgagtcttacattctagaaggaaggagcagataaaatctaaataaggttatgagattgtgacgaagcgtccgattacacctcaacaagaaggcaactgacaaacagccttatagcaagctcccaggtgtctctcttctgaaaccactgaaaggggtagatcctaacttaatcaacaacctggaaacattctttgaattggattatcccaaacctttatttttctcggtagcaccaatgaaaagaatagagaagacacagatgtgatagccttaatgcagcacttattaatatgaagtgctcctttgtgtacaagatcatgatgatccagccattgatgtatgtaagaagcttcttggaaaatatccaaatgttgatgctagann

SEQ ID NO: 20218 - DNA, 1301 bp, Homo sapiens
  misc_feature 1, 2, 3, 4, 5, 6, 7, 8, 9, 1291, 1292, 1293, 1294, 1295,1296, 1297, 1298, 1299, 1300, 1301: n = A,T,C or G
nnnnnnnnnctggtttaattccattcaacgccaccctcccccatagcacctggggggccgcagaacacccgcccgagtctgtaaaaagtcacagtttgaagagaatgagaggggcagtgtgggcctgcgtgggacgcctacgcagcggactgctcctcaggcttgtttttggcggcgtgttgttgtgttgtggatattgtttgttggtcgttgtcagatttcgattgtgctggtccatggttacggtcagccattgtgcttcttctgctcctctggcagcccctcagtgaccccatcctcttcctcttcatcgtcctcctcctccccacacacatccaggctgaagtgcagccgggctagcttctcctgcatctcccgaacgtgctccagctgctcaaaggagcattccttccctggaacgaagcccctgtctgaaccctgggaaagagtcctggaaccctggaaccctggaaccatggtcccagccatgccccatggactgggccctacagccctatccacacacccgctgaaaccagcccccaggactcaccgaaggcctgcagccggccagagtggaaatcattgagcaggttcaggagtcccccctccatctcatagacatcagtcacctcggtcaggaaggagtgctgcaggggcgtgcctgcagagccgcttccacctccagccaggactgggcggcacttctctttgcctactctgggtggggtggacatgaccatgatcacagggtagggggcagtcaggcacctcccgatcttttgtgccatctgcctatgcaccagtttatctgtctatctgcactaactcatctgcccatctacttactagcataaatgggtaactttatggttccccttgggcactgggaaggggtgaggaggcgtgaagaggtcaaaaagaagtcttttctgctaataacacagccagagcagtgcctgaaagggggtccctgggttcctgtctgagtgcctcactcatttgttttatgaccctgaatgagtcacttatcctccctagtcttcagcgtatatagagacagctactcccttattgccaccagggctgtcttacctcctcccaaaatatctttctgcccctcttctttttttttgttttttgagacagagtctcgctctgttgcccaggctggagtgcagtggtgtgatctcggctcactgcaacctcgcctcctgggttcaagtgattctcttgcctcagcctcccaagttgctggcattatgggcgcctgccactatgccctgctaannnnnnnnnnn

SEQ ID NO: 20219 - DNA, 1112 bp, Homo sapiens
ataggggagtcgacccacgcgtccggcgcggttctcgtctcctcccggccggcggagcgagtggaggctgcagcccagctcgtctcggcgcccgcgtcgccgtcgcgaagccccccgccccgcttccgccgcgtcggaatgagctcccggaaagtgctggccattcaggcccgaaagcggaggccgaaaagagagaaacatccgaaaaaaaatcaagcagaagattgagctgctgatgtcagttaactctgagaagtcgtcctcttcagaaaggccggagcctcaacagaaagctcctttagttcctcctcctccaccgccaccaccaccaccaccgccacctttgccagaccccacacccccggagccagaggaggagatcctgggatcagatgatgaggagcaagaggaccctgcggactactgcaaaggtggatatcatccagtgaaaattggagacctcttcaatggccggtatcatgttattagaaagcttggatgggggcacttctctactgtctggctgtgctgggatatgcaggggaaaagctcgataaaactaagcagatacaatggctattatgaatttacagtttgagatttcagattggtgataaagaggcaagagctgtagctggttttttatattttgaactgtgctgagtagttcttaggaattagattagtcctgaaatgttatgtcggctgagaattttggtttctaggtgacagtactgcagtaggaacaggactggctctccctttagaacaaaaggttttcagtgggaattcgtagtggcttctttggtggtagtggtgtgagggggtgccagttatcagattctttctctctactcccagattaaaatgacagtgtaaaggagaaaatggagagcctctacaaaaaggataaggaactacagaactacagggaacagatggcttaaagagatggagaagagaagctatcatgtttgttttttataacaccacctattagtggaatgatactcccgtagaaggaactgtatcagagatacagtgcgagactgatcccaagtatctacttgtacatactgcatacgtgacagcaagtgatatgaatgagatcc

SEQ ID NO: 20220 - DNA, 2281 bp, Homo sapiens
  misc_feature 1, 2216, 2281: n = A,T,C or G
nagtcgacccagcgtccgcatattatgatctaacatgaaagacagctgggcgcggtggctcacgcctgtaattccagcactttgggaggccgaggtgagtggatcaccgctggtcaggagtttgagactagcctggccaacatggtgaaaccccatctctactaaaaatacaaaaattagctgggcgtgatggtaagcgcttgtaatcccagctacttgggcggctgagacaggagaatcacttgaacctgggaggcggaggttgcagtgagccgagattgtgccattgcattctagcctgggtgacaagagtgaaactctgtctcaaaaaaaaaaaaataataataaaataaaataaataaataaataaaaagaagataaaaataaataaataaaatggaagacaatccaatgggttaaaaataaaatgtaaactagctttcatttttacttttcataatcacataaaggaacagaaaatgatggtaacaaaatctttctatatggctcttatgtcttataccactcatttgtatttggaaagtatatctttgatgggtttaacatgtggttaaatacaatttctcctgtttcgcagaagtagaagagttgacacatttcactcattttagtgttacaggataatgagacaaacttatttttataaatctctcaaggttgaaatcaacttatattgcaaattctaatacagtagtttctcattgcaccacagaaacagttaaaggattgtgaatagaagatttcaattatcacatattacaagtcatcagtgtacccttgagggtttttaaaaaatcaaaacagagaacgaagtgttcttgtccaaagttgttatgcataagtttcatagcagtttacttccttttcttgaatacagtttttaaaaccaagagtgagctttcagttttccataaaaatataagccgtactactttgacattgaaatcatcagtgcagccatcacttcttagaatttatttaaacttcttctcccaacagttttattttcttttagctgctaattattttcgaaattcatgaatgttttacctccttttactattctgaaagttatttcaagaagtggccccaaagcaggagaactgagaggggcaaattggcctggtttaattcacagcctgaagaattggcaacctaaagttataagttagatgtattttgcttttcaagccatcttctgagccttttttaggctgaaatgatttgtttatttcccaaattattgctagctacttgattttttatggctacctaacatccacatttggtagatacttttcctctctgcatgcatcccaaagaagaatttgctatttgtggaagaagagaataagggtatcagaatgaaggaaattacagtgactacactgtttatgactccattttgtgaattcttaaatatgctatggatttttttttagaaaaaataatgcaaaaattgggatattacagaatcaccataaagatgatcaacaagtaataagtcttttcatggagttcatttttcttttaaattcatgatttggccacaaaaatatatatataagtgtctgatatatgataacagcccagtttctcggccactcatttgcattatcttaaatcacaaataattacttaatttgctggagtgtgtgctttgcaacttttataccagagtaaaatttgtatttaaaacaaaaaataagaatgcccatcactaggagaaacactcctcacagaacacacacacacacacacacacacacaatttaaaaactgagtaaatttaaatgtatgaaagtaccccacaaattgatttcaacaaataaatttcatttctctagctacttatgtctggccttattttgagcgttacaattttattgccttcatttgcctatttagactgatgtagtttgatatgatgaagttgtgaataaaagccttgtgttcattatttatatatactacctggtatgctatggactgtgtctgctgtagtgctattccctaatgagcaactaagagaagacacaacaataaaccatggaagtgttgggaggccatggaaatgatttagaggtataaaatattcccaagtttttattataaatttttattcataggttaaaacatataagcataagtgattgtaccgctgtgactcccttttctaggagagaaaatagctntatttgaaaactccaaaagctacttaatcttaccagaggtttttaataggggaactgggtttacn

SEQ ID NO: 20221 - DNA, 2446 bp, Homo sapiens
  misc_feature 2418, 2419, 2420, 2421, 2422, 2423, 2424, 2425, 2426, 2427,2428, 2429, 2430, 2431, 2432, 2433, 2434, 2435, 2436, 2437,2438, 2439, 2440, 2441, 2442, 2443, 2444, 2445, 2446: n = A,T,C or G
cacgcgtccggcgtgagcgccgcccgggtgtccccgcggcgcaggaggcggtggagcgcagagcgggcgagcgcggtaagaaggtgttttaccctgtggtgttcagtctttacaatgcctgccattgtttatgcacaaccaccaagtgccaccacctgtggaattccacctggttcacaaaaaggattctggcttttggcgagattttggctttggaatgacttgtcagtatcgttcagatttcctgaccattggtggatttgacatggaagtgaaaggttggggtggagaagatgttcatctttatcgaaaatacttacatggtgacctcattgtgattcggactccggttcctggtcttttccacctctggcatgaaaagcgctgtgctgatgagctgacccccgagcagtaccgcatgtgcatccagtctaaagccatgaatgaggcctctcactcccacctgggaatgctggtcttcagggaggaaatagagacgcatcttcataaacaggcatacaggacaaacagtgaagctgttggttgaaatcataattaatgcgttactgtatgaaccacaaaacagcactatttatttagccttacttctacttccagatgcagtgcctcttttggagaagacatgtttatttttcatgttctttctgacattactttagcaattcaacttgatgtgagaagaaaaaacaaatgtttcaacacaaaatctctgttttgtgagaatactgcactatggaataattgacaaattgaaatctcatatttgtcccaaaagttgttttgagttagttctacctggtgcccatgttctgattgtgtgtgggattgcatggtgtcctgattgcatctaggtggagcggatggaatgtgctgggccactgttgggtggagagcagcacattcttacagaggagatggagcgttatgagcatagtatgtggataggtatcttcacctgcccgcccctgagtcagcctccttgacttgatagcttgaagaatccttttccactgaaatagaggataattaattgacacatctgaaatccccaatcaatcaatcaagagaaaggtagaactaaaaactccttaacttactgttgcttacacccctgaaagtctgtttttaagcaaatgggtaatagtagaaaataggttagaatctatggcttgattaaaaatatgttattacattatcatgttcaggattaggattagtagtcagttgctgtaaactattttgaacaaacagaaaagaacacggaaacatttttaacagagcatttaattatgttggaatacaggatcctagctctgtctgggaacattagtttatgtgagccagctctatcagggtcttcccatggtggttcagaatagatgagcatagcatggttttgtttgtttttgctttcaattttctaatttggcatggatccatatgtatttactatcctttttctaatatattaatatatgctacatttgtatttgcattactataatactttgagttgaaaaagagtttcattgtggagagaaaaagcaaatggtatgccacaagatcactctgatttgagaaaagggaggaggggaagatagtctgaatggaaatctgaaatacggaatgttttagagaaatatgtcacttgcatatagaatgttttaattgaggtataaattaatgagacaaagtgaaaaagaaattatattcagataggactgcactacattatttgtcacacatggatctgttaccatcaggtcaattcctagtatgcataaattttttaacccttttaaaagagacctatgttgaaaacccctgaaaattcactgaagaaaaatcattactctttttctcagtaaatcatatcatctgaaatattacaaatttcaaatttctaggtgctatattaattcaatattacaataactcttacctaattattcttacaagttttaagttgtggtagtttagtgatttttttaaaagatgtgtgaaatgttctctgcaaaataattcaggccactgtctccttttatatattattataattatttattatgaagaccagtgaattacgatatttaaagtgagagaacttaattatttgcaaaggtaagttacagcttgttttttgagagaatcaaatgagtttacttttgttcctgttgtttttaactagctttaagtttaaagatggaagctaagcaatggaaatgctatacgtttttgacatttattaaatggtaccaataaagtattttattaccaaaagttaaaaaaaaaaaaaaaaaaaaaaaaaaaaaaaaaaaaaaaaaaaaaaaaaaaaaaaaaaaaaaaaaaaaaaaaaaaaaaaaaaaaaaaaaaaaaaaaaaaaaaaaaaaaaaaaannnnnnnnnnnnnnnnnnnnnnnnnnnnn

SEQ ID NO: 20222 - DNA, 1118 bp, Homo sapiens
  misc_feature 1113, 1114, 1115, 1116, 1117, 1118: n = A,T,C or G
gcgcagcgctccactcggccggcagcggagccgcagccaccagccgcccgcgccctccagccccgtccgggagtccccggcccgctgcggtgccgtgagtacctccaaccccctgcgccccggagggaggccgaggggcttagccaccagggctcggaagtgggggccgaatccggtgcgagacccaaggagaggggagcagagccggagttggggagactggttgctgaaaagccaggagtcaaaatgactgagcgctttgactgccaccattgcaacgaatctctctttggcaagaagtacatcctgcgggaggagagcccctactgcgtggtgtgctttgagaccctgttcgccaacacctgcgaggagtgtgggaagcccatcggctgtgactgcaaggacttgtcttacaaggaccggcactggcatgaagcctgtttccactgctcgcagtgcagaaactcactggtggacaagccctttgctgccaaggaggaccagctgctctgtacagactgctattccaacgagtactcatccaagtgccaggaatgcaagaagaccatcatgccaggtacccgcaagatggagtacaagggcagcagctggcatgagacctgcttcatctgccaccgctgccagcagccaattggaaccaagagtttcatccccaaagacaatcagaatttctgtgtgccctgctatgagaaacaacatgccatgcagtgcgttcagtgcaaaaagcccatcaccacgggaggggtcacttaccgggagcagccctggcacaaggagtgcttcgtgtgcaccgctgcaggaagcagctgtctgggcagcgcttcacagctcgcgatgactttgcctactgcctgaactggttctgtgacttgtatgccaagaagtgtgtgggtgaccaacccatcagggacttggtggcacaatacattcctttgaggaaggggggtacgatggttcgtgaaatgccctcccggggggggggtctccaaaaggggtctcggccgtgggggactcttcccgattgctggcctcccttgtttctccgacgcgttccccggattgtggacctgccgtgtgcaccccggttgccannnnnn

SEQ ID NO: 20223 - DNA, 2305 bp, Homo sapiens
cgaggctggtgggcggaccgtgatcgaccaccgagtgcgtcgatgcggggctcggacccgacgggcggggggccaacggcgggcgggggcgagtcgtgtggttgtgcgcgccgcgggcggagcgggggctcggtgccacgaggagcgagaggcggcaggcggggcgtgttgtatgtcgagccggttggaggaactggggcgagagtgagagacggatcgtgtgggcccccggagcaggcggcggtgagtagaagcgggggcgtgtccgccggaagggtgctgccgacgatgcgtgagacaagcaggcgcgggcgtgagccatgagcgcgggactcgacgacgccgacgcaacggaacggaaagcgagttgcgggggggataaacatggagtcacagctgcggtgagccgtgaggacgtgtcgggtggatggagggtgggcgggggcggcagagcgacgacgtggtggcaccgcgggcggtgtggcgcgcacggaggggggaagcagggggagcgaggacgagccgggggcgcgaagcggggcggacggcagggggtgcggtggcgcgctggtggggggtggcaagggggtcctggagtacgggaaaggaggggagaggccaggggaggggggggggcggggagtgggccgggtcggggaggtcgcggaggcgcgaagtcgtgcgccgcgtacaaggggcggagcagggggtgagtggggcgctggcgccggtgtgccgcgtgttggtgcgggaaggggagggcccgctggggtgtggggtgaggcgggggggagcgtaagggggacggcgaggggctcgggggaaagacggacgggggccgggcgaggaacgacgagggcgtgaggggaggcgcaagggggggagcttcgtagcgtgcgcacggtgggtgccgccgtgctgcgagcgcgcgcgaaggccgaggcatgtgggggggcgtgcagccaaggggctctggggacggggagagtgcgcttgagaggctcgagcagggcagccgcgccgtgcgcgcgcccgcggaggagcggatgccgcacgagggcgtggtggggacggcggcgggcgtactagcctgcgcggcatagcgtgccaggcgtgccggccggcatggccgctgccgccgccattggacaaacctcaccagtacctggtgggtgcgggggtccccctcagcaggtgggctgtggctggggggcgtctcccgggacagggggggcggccccccccagatgggtctgcatgtggccggccagctgggcaggggtcttgcagtgcacgctgcacagcttgcacaggatgcggtcagcccgcggggcctggagcccgtggtccttcaccgcgtggatgcgcaggtatgctgccgtggtgaagcctttgttgcagagctcacagacatggtgaggaccctggctgtgcaccttcatgtggtccgaaatataagccgagctcagcatcttgccacacacgtgacatggcactttctcctcgtgtcgtactgtgtgcgcccgcagccgatccttcgtggcgaaagctgcctcacatttctcacatttgaagggccgttctgttgagtgcacttgtctgacgtgactgttgaggtgatccggccgggagaagctcttgccacagtgggagcagttgtagggcttgtgcacagcgccgtcatgtgagcgcacgtggtagctcatgcggtccttgcgcttgaagcgctgctggcacaccgggcactggtagggcttctcgtccgagtgcgacagcttgtgtcggttcaggtggtagacgtcgcggaaggccttgccacacatctcgcaggcatggttcttccggatgcgcttccccgaggcggtcgtggtcaccacgccaccggcggccactgcggcagcgccgccgccggcacccgcctctccccctcccccgccggctccgctcagctggggcacgctcaggaggctcaggggcaccatggtcggcatcttcatagcacccgaggggacccggccggccttggctcccgtgtggatggcttcgtgcctccggagattgtagccgttcttgaactccttggcgcacagagcgcagatgtagggccccttgctctttgtcttcttctccaaggcagacgcgaccggggccacggcgaccgtcgaggttggggctacgacggcggtggccgccgccgcggcgatagtggcggcggaggcggggggcgcggcctcggccgcgggcgccgacactggcgggggtggcggagggggcgccggaggctgcttcagcccacgcgtccgcg

SEQ ID NO: 20224 - DNA, 1922 bp, Homo sapiens
cacgcgtccgctcgccgccgggcgccatgggagcttcggacccggaagtggcgccctgggctcgcggcggtgccgcggggatggcgggagccggagctggagccggagctcgcggcggagcggcggcgggggtcgaggctcgagctcgcgatccaccgcccgcgcaccgcgcacatcctcgccaccctcggcctgcggctcagccctcggcccgcaggatggatggcgggtcagggggcctggggtctggggacaacgccccgaccactgaggctcttttcgtggcactgggcgcgggcgtgacggcgctcagccatcccctgctctacgtgaagctgctcatccaggtgggtcatgagccgatgccccccacccttgggaccaatgtgctggggaggaaggtcctctatctgccgagcttcttcacctacgccaagtacatcgtgcaagtggatggtaagatagggctgttccgaggcctgagtccccggctgatgtccaacgccctctctactgtgactcggggtagcatgaagaaggttttccctccagatgagattgagcaggtttccaacaaggatgatatgaagacttccctgaagaaagttgtgaaggagacctcctacgagatgatgatgcagtgtgtgtcccgcatgttggcccaccccctgcatgtcatctcaatgcgctgcatggtccagtttgtgggacgggaggccaagtacagtggtgtgctgagctccattgggaagattttcaaagaggaagggctgctgggattcttcgttggattaatccctcacctcctgggcgatgtggttttcttgtggggctgtaacctgctggcccacttcatcaatgcctacctggtggatgacagcttcagccaggccctggccatccggagctataccaagttcgtgatggggattgcagtgagcatgctgacctaccccttcctgctagttggcgacctcatggctgtgaacaactgcgggctgcaagctgggctccccccttactccccagtgttcaaatcctggattcactgctggaagtacctgagtgtgcagggccagctcttccgaggctccagcctgcttttccgccgggtgtcatcaggatcatgctttgccctggagtaacctgaatcatctaaaaaacacggtctcaacctggccaccgtgggtgaggcctgaccaccttgggacacctgcaagacgactccaacccaacaacaaccagatgtgctccagcccagccgggcttcagttccatatttgccatgtgtctgtccagatgtggggttgagcgggggtggggctgcacccagtggattgggtcacccggcagacctagggaaggtgaggcgaggtggggagttggcagaatccccatacctcgcagatttgctgagtctgtcttgtgcagagggccagagaatggcttatgggggcccaggttggatggggaaaggctaatggggtcagaccccaccccgtctacccctccagtcagcccagcgcccatcctgcagctcagctgggagcatcattctcctgctttgtacatagggtgtggtcccctggcacgtggccaccatcatgtctaggcctatgctaggaggcaaatggccaggctctgcctgtgtttttctcaacactacttttctgatatgagggcagcacctgcctctgaatgggaaatcatgcaactactcagaatgtgtcctcctcatctaatgctcatctgtttaatggtgatgcctcgcgtacaggatctggttacctgtgcagttgtgaatacccagaggttgggcagatcagtgtctctagtcctacccagttttaaagttcatggtaagatttgacctcatctcccgcaaataaatgtattggtgatttggaaaaaaaaaaaaaaaa

SEQ ID NO: 20225 - DNA, 999 bp, Homo sapiens
  misc_feature 935: n = A,T,C or G
agggagtcgcccacgcgtccggttttcccaactgcagctttttaatggttaaccttcatctaattttttttctcccactggtttatagatcctctgacttgtgtgtgtttatagcttttgtttcgcggggttgtggtgaggaaggggtgatggcatgcggagttctttatcttcagtgagaatgtccctgcccgcctgagagccagcttccgcgttggaggcacgtgttcagagagctgctgagcgccaccctctacccggctgacagacaacacagacctgtgccgaaggctaatttgtggcttttacgaccctaccccaccccctgttttcaggggtttagactacatttgaaatccaaacttggagtatataacttcttattgagcccaactgctttttttttttttttttgcttctctgccccttttccatttcttttgtatttgttttctgtgagagcactgaaatggcggccctggaatctacaatttggctctccactgagcaccttatcttgccaccttagccttaagaatgaatatgaagaggatggggacaaggaaaggatcagatacctgctccagtagttgtgaggccactgtgtctcaggggactccaggaagagcagaagagggatcccacgaagttatttttatgcagctggggccaggagggtcagagtggtgccaggtgcaagttaggctaaagaagccaccactattcctctctcttgcccattgtggcgggcaaaggcattggtcaccaagagtcttgcagggggacccacagatatgccatgtccttcacacgtgcttgggctccttaacctgaaggcaaattgctacttgcaagactgactgacttcaaggaatcagaaattacctagaagcaccatgtattttctatgaccttttcagtccttcaggtcattntaaggtccactgcagggggttagtgagacagggtatcccttgtggtatgtttcgctttcctata

SEQ ID NO: 20226 - DNA, 1831 bp, Homo sapiens
  misc_feature 1, 2, 3, 4, 5, 6, 7, 8, 1309, 1313, 1806, 1826, 1827, 1828,1829, 1830, 1831: n = A,T,C or G
nnnnnnnncagcctgtacaactatgcctccagccgccgagaggcctatctcctgctccagctgttcaagacagcactccaggaggaaatcaagtaggctctccagacacaaaggaatggggagagaatgggttaagagatccccctgttggctccttcacaaggtgacaacttgttgaggcctaagggtagaaatggaatcagaagacctcttttctctacctcctgtggagaaaccgtaaaacatctgggacagcacagtgggaggatatgggctgacatgctaacacaaaggatgagagagatatcaagacattccttaagagcggggacaccagggcaggctttgagagccaaaatctcaaaaaggaaaagcaacggtatgtcctacacagaggcagaagactggtttcaatgacctcttaaaccacaggtcaaaggtggagcagccccaggacgtggtgacaggcaacccaacagtggtgaggctggtggtgagattctaccgtaatgggcggggacagagtgccctgcaggagattctgggcaaggttatccaggatgtgctagaagacaaagtgctcagcgtccacacagaccctgtccacctctataagaactggatcaaccagactgaggcccagacagggcagcgcagccatctcccatatgatgtcaccccggagcaggccttgagccaccccgaggtccagagacgactggacatcgccctacgcaacctcctcgccatgactgataagttccttttagccatcacctcatctgtggaccaaattccgtatgggatgcgatatgtggccaaagtcctgaaggcaactctggcagagaaattccctgacgccacagacagcgaggtctataaggtggtcgggaacctcctgtactaccgcttcctgaacccagctgtggtggctcctgacgccttcgacattgtggccatggcagctggtggagccctggctgccccccagcgccatgccctgggggctgtggctcagctcctacagcacgctgcggctggcaaggccttctctgggcagagccagcacctacgggtcctgaatgactatctggaggaaacacacctcaagttcaggaagttcatccatagagcctgccaggtgccagagccagaggagcgttttgcagtggacgagtactcagacatggtggctgtggccaaacccatggtgtacatcaccgggggggagctggtcaacacgcacaggctgttgctggagcaccaggactgcattgcccctgatcaccaagaccccctgcatgagctnctgnaggatctggggagctgcccaccatccctgaccttattggtgagagcatcgctgcagatgggcacacggacctgagcaagctagaagtgtccctgacgctgaccaacaagtttgaaggagatcctgtccctctcggcttccagagagcaagaagcagcccacaagcagctgatgagccgacgccaggcctgtacagcccagacaccggagccactgcgacgacaccgctcgctgacagctcactccctcctgccactggcagagaagcagcggcgcgtccagcggttcctgcgccgacttgaagccctggggttggtcagcgccagaaatggctaccaggggctagtggacgagctggccaaggacatccacatcctgctcaggcgcaggcacaggcggaaggcagagctggtgaagctgcaggccacattacagggcctgagcactaagaccaccttctatgaggagcagggtgactactacagccagtacanccgggcctgctggaccaccnnnnnn

SEQ ID NO: 20227 - DNA, 5920 bp, Homo sapiens
  misc_feature 1: n = A,T,C or G
naatcccacagagtattgatgaggaaactgaagtttggagcgatcacatcattttcccaaggtaacacaagtggcaagacagccgggaacccctaccccatccccttattcagcacatgaaataaacaaggggcatccaaatcttgcggcaacgcccccgggacatgcatcgtcccctggactctctcaaaccccttatccctctggacagaatgcaggtccaaccacgctggtataccctcaaacccctcagacaatgaattcacaacctcaaacccgttctccgtttttccagaggcctcaaatacagcctcctagagctaccatcccgaacagcagtccttccattcgtcctggtgcacagacacccactgcagtgtaccaggctaatcagcacatcatgatggttaaccatctgcccatgccgtacccagtgccccaggggcctcagtactgtataccacagtaccgtcatagtggccctccttatgttgggcccccccaacaatatccagttcaaccaccggggccaggtcctttttatcctggaccaggacctggggacttccccaatgcttatggaacgcctttttacccaagtcagccggtgtatcagtcagcacctatcatagtgcctacgcagcaacagccgcctccagccaagagagagaaaaaaactataagaattcgggatccaaaccagggaggtaaagacataacagaggagattatgtctggaggtggcagcagaaatcctactccacccataggaagacccacgtccacacctactcctcctcagctgcccagccaggtccccgagcacagccctgtggtttatgggactgtggagagcgctcatcttgctgccagcacccctgtcactgcagctagcgaccagaagcaagaggagaagccaaaaccagatccagtgttaaagtctccttccccagtccttaggctagtcctcagtggagagaagaaagaacaagaaggccagacatctgaaactactgcaatagtatccatagcagagcttcctctgcctccatcacctaccactgtttcttctgttgctcgaagtacaattgcagcccccacctcttctgctcttagtagccaaccaatattcaccactgctatagatgacagatgtgaactctcatccccaagagaagacacaattcctatacccagcctcacatcttgcacagaaacatcagaccctttaccaacaaatgaaaatgatgatgatatatgcaagaaaccctgtagtgtagcacctaatgatattccactggtttctagtactaacctaattaatgaaataaatggagttagcgaaaaattatcagccacggagagcattgtggaaatagtaaaacaggaagtattgccattgactcttgaattggagattctcgaaaatcccccagaagaaatgaaactggagtgtatcccagctcccatcaccccttccacagttccttcctttcctccaactcctccaactcctccagcttctcctcctcacactccagtcattgttcctgctgctgccactactgttagttctccgagtgctgccatcacagtccagagagtcctagaggaggacgagagcataagaacttgccttagtgaagatgcaaaagagattcagaacaaaatagaggtagaagcagatgggcaaacagaagagattttggattctcaaaacttaaattcaagaaggagccctgtcccagctcaaatagctataactgtaccaaagacatggaagaaaccaaaagatcggacccgaaccactgaagagatgttagaggcagaattggagcttaaagctgaagaggagctttccattgacaaagtacttgaatctgaacaagataaaatgagccaggggtttcatcctgaaagagacccctctgacctaaaaaaagtgaaagctgtggaagaaaatggagaagaagctgagccagtacgtaatggtgctgagagtgtttctgagggtgaaggaatagatgctaattcaggctccacagatagttctggtgatggggttacatttccatttaaaccagaatcctggaagcctactgatactgaaggtaagaagcagtatgacagggagtttctgctggacttccagttcatgcctgcctgtatacaaaaaccagagggcctgcctcctatcagtgatgtggttcttgacaagatcaaccaacccaaattgccaatgcgaactctggatcctcgaattttgcctcgaggaccagactttacaccagcctttgctgattttggaaggcagacacctggtggaagaggcgtacctttgttgaatgttgggtcacgaagatctcaacctggccaaagaagagaacccagaaagatcatcacagtttctgtaaaagaagatgtacacctgaaaaaggcagaaaatgcctggaagccaagccaaaaacgagacagccaagccgatgatcccgaaaacattaaaacccaggagctttttagaaaagttcgaagtatcttaaataaattgacaccacagatgttcaatcaactgatgaagcaagtgtcaggacttactgttgacacagaggagcggctgaaaggagttattgacctggtctttgagaaggctattgatgaacccagtttctctgtggcttacgcaaacatgtgtcgatgtctagtaacgctgaaagtacccatggcagacaagcctggtaacacagtgaatttccggaagctgctactgaaccgttgccagaaggagtttgaaaaagataaagcagatgatgatgtctttgagaagaagcagaaagaacttgaggctgccagtgctccagaggagaggacaaggcttcatgatgaactggaagaagccaaggacaaagcccggcggagatccattggcaacatcaagtttattggagaactctttaaactcaaaatgctgactgaagccatcatgcatgactgtgtggtgaagctgctaaagaaccatgatgaagaatccctggagtgcctgtgtcgcctgctcaccaccattggcaaagacttggactttgaaaaagcaaagccacgtatggaccagtactttaatcagatggagaaaattgtgaaagaaagaaaaacctcatctaggattcggttcatgcttcaagatgttatagacctaaggctgtgcaattgggtatctcgaagagcagatcaagggcctaaaactatcgaacagattcacaaagaggctaaaatagaagaacaagaagagcaaaggaaggtccagcaactcatgaccaaagagaagagaagaccaggtgtccagagagtggacgaaggtgggtggaacactgtacaaggggccaagaacagtcgggtactggacccctcaaaattcctaaaaatcactaagcctacaattgatgaaaaaattcagctggtacctaaagcacagctaggcagctggggaaaaggcagcagtggtggagcaaaggcaagtgagactgatgccttacggtcaagtgcttccagtttaaacagattctctgccctgcaacctccagcaccctcagggtccacgccatccacgcctgtagagtttgattcccgaaggaccttaactagtcgtggaagtatgggcagggagaagaatgacaagccccttccatctgcaacagctcggccaaatactttcatgaggggtggcagcagtaaagacctgctagacaatcagtctcaagaagagcagcggagagagatgctggagaccgtgaagcagctcacaggaggtgtggatgtggagaggaacagcactgaggctgagcgaaataaaacaagggagtcagcaaaaccagaaatttcagcaatgtcagctcatgacaaggctgcattatcagaagaggaactggagaggaagtcgaaatctatcattgatgaatttctacacattaatgattttaaggaagccatgcagtgtgtggaagagctgaatgcccagggcctactacatgtttttgtgagagtgggagtggagtccaccctggaaaggagccagatcaccagggatcacatgggccaactactctatcagctggtacagtcagaaaaactcagcaaacaggactttttcaaaggtttttcagaaactttggaattggcagatgacatggccattgatattccccatatttggttgtaccttgctgaactggtgacccccatgttaaaagaaggtggaatctccatgagagaacttaccatagaatttagcaaacctttacttcctgttggaagagctggggtcttgctatctgaaatattgcacctactatgcaaacaaatgagccataagaaagtgggagccttatggagggaggctgacctcagctggaaggactttttaccagaaggagaagatgtacataattttcttttggagcagaagttggacttcatagagtctgacagtccctgttcctctgaagcactttcaaagaaagaactgtctgccgaagagctgtataagcgactcgagaaactcattattgaggacaaagcgaatgatgaacagatctttgactgggtagaggctaatctagacgaaatccagatgagttcacctacattccttagagctttaatgactgctgtttgtaaagcagctattatagccgactcttctaccttcagagtggacactgctgttatcaagcagagagtgccgatcttactcaagtacctagactcagatacagagaaggaactgcaagcactttatgcactacaagcatcgatagtaaaacttgatcaacctgccaatttgctgcggatgttttttgattgtctatatgacgaggaggtgatctccgaggatgccttctacaaatgggagagcagcaaggaccctgcagagcagaatgggaagggcgtggctctgaaatctgtcacggcattcttcacgtggctgcgggaagcagaagaggagtctgaggataactaaaacttcaaatacacaaaatgaaacaaaagaaacaatttaagtatttttttaaaaagtttcacgtcttcgccaatcacagtgcagcaaggccaattctcgcagaaacccccacgtgtgcacgagtgggagaggggaaagagaaaaaaaggtgatcatggaggaaaaaggtactggataaaagtaaacttcaaaccttagggcgggagcactaaaaccaaaatacatgtattatttatagaaaatattttctgttttaatcttttctttttaaacaaggactcatacttaaaaaaatgtttagcaaaaaaaaaaaaagttgagaacttttaatttattttaaggactgcaaatgccagtgtaattttttaatttgcagtttctgtaaacaacttgtataatagaaaagcagagaaataaatttccctccccttcaagatgcacctcatgtttgttttaaggtatagcatttagtccagatttgagaaagtttggggtgaacaaggtaagaaagatttttttttttttggcatcaaatctttctgcctgcctctcagcttgcttcagaaaatttaaaaaatcacaatagtaatcaaaacatacataacattgaaacagaaggaaatgctgtggaccacagaactccaagaattgtttaaaaaaaaaaaagtgctaccctgagaaaagtactcttaatactcttgaaatctttagagcaactttaaggcttgtaaatacatagaacaaatatttaaaaaaacaaaaagaaattgactcagtactatttcttttcactttgaaaatataaagaacaaaataaagacaaacattgcaagtttaacaccaaacacaacacaccacacaccaacaaaaaaaaaaaaaaaaaaaaaaaaaaaaaaaaaaaaaaaaaaa

SEQ ID NO: 20228 - DNA, 451 bp, Homo sapiens
  misc_feature 196, 197, 198, 199, 200, 201, 202, 203, 204, 205, 206, 207,208, 209, 210, 211, 212, 213, 214, 215, 216, 217, 218, 219,220, 221, 222, 223, 224, 225, 226, 227, 228, 229, 230, 231,232, 233, 234, 235, 236, 237, 238, 239, 240, 241, 242: n = A,T,C or G
  misc_feature 243, 244, 245, 246, 247, 248, 249, 250, 251, 252, 253, 254,255, 256, 257, 258, 259, 260, 261, 262, 263, 264, 265, 266,267, 268, 269, 270, 271, 272, 273, 274, 275, 276, 446, 447,448, 449, 450, 451: n = A,T,C or G
cgacccacgcgtccgcgttgaacagctttaagaacaatgtgaatgaaatcttagcaacttggttagtaatctgaaaagtctattaatgtatacttgaaattctgtttgtataaaaatgcattttcccctttattttaacactgtgtaaaagaacattatgcatgtgagtggtttgagaattaaatggtttaatacnnnnnnnnnnnnnnnnnnnnnnnnnnnnnnnnnnnnnnnnnnnnnnnnnnnnnnnnnnnnnnnnnnnnnnnnnnnnnnnnngggggggcctttaattttttttaaaaaaaaaacttccaaaccttcccctggaccttaaaaaaaaaaagaaggccattggggggggaaacctggtttttggccctttaaaggggtccaaaaaaaggaattgccttccaaatttccaaaaaaaagcctttttttcaccggannnnnn

SEQ ID NO: 20229 - DNA, 486 bp, Homo sapiens
  misc_feature 1, 2, 3, 4, 5, 6, 7, 8, 9: n = A,T,C or G
nnnnnnnnnctctaaggtttaatttatatttatgttttttgtatattcaccacccaaacacacagtcttctacttagtccggtctgtattaggtttcgtctgtttttgttctgccttggtttgctgtagcactttctgccgtgagcgtaactcacttccttgtaggagtttcctgaggctgccgtaacaatcgccacaaacctggtgacttaaataacaaatatttattttctcgtagctctggaagccggaagtccaaaaccaataacttggcagggctgtgctccctctgggagatctcggggagcctccttgctacatgttccgcttctggggactttctggtggtgtttccctggagggccaaggcctccgggcggcccgtgcattcggtgaacacctccaaagagctctgagtcacaaagccttgggaaactttattttattctttctaggacattatcagtagtcccgaggagacatcaa

SEQ ID NO: 20230 - DNA, 1528 bp, Homo sapiens
  misc_feature 1, 32, 1527, 1528: n = A,T,C or G
nagttctagatcgcgcgcgggtcgtggtcggngaaggggccgtccaggccgttgcaggcgcgcgtgccggggccggggtcgggggtccaggcttgcagggggcggggtccgggacggctggggcggagctggaccgttgagggccacggcggggcgtctccgggccgagcggggctgctgcgcccgagcggttgggggcgcggagggctggaaatcccggatcacgcgcccccgggcgccgccccgcccccgcaccttggcctagcgcggtggcgtcacagtcgcgcagtcctgactacggcctccgggccctttgtccccgctagcggcgctcggggtgggggagccaggaggggcgggagacgggcgggtatgggccggcgggcgcaggctcccccgggcgccgaggcagcggtgccagagccggggcaggcggcggccgcgagcccctcggcggcggaaggccccagcgtgcaggcgcaggagggcgcggcgccggcggaagaagccctgtccccgcagcttgcgaccggagatccacgaatgtcccaagtcccaggacccgtgcgcgtcccgggacgactggcgctgtgcgcgctccatgcacgagttttccgccaaggacatcgacgggcacatggttaacctggacaagtaccggggcttcgtgtgcatcgtcaccaacgtggcctcccagtgaggcaagaccgaagtaaactacactcagctcgtcgacctgcacgcccgatacgctgagtgtggtttgcggatcctggccttcccgtgtaaccagttcgggaagcaggagccaggagtaacgaagagatcaaagagttcgccgcgggctacaacgtcaaattcgatatgttcagcaagatctgcgtgaacggggacgacgcccacccgctgtggaagtggatgaagatccaacccaagggcaagggcatcctgggaaatgccatcaagtggaacttcaccaagttcctcatcgacaagaacggctgcgtggtgaagcgctacggacccatggaggagcccctggtgatagagaaggacctgccccactatttctagctccacaagtgtgtggccccgcccgagccctgccacgccctggagccttccacggcactcatgacggctgcctgcaaacctgctggtggggcagaccgaaaatccagcgtgcaccccgcggaggaaggtcccaggctgcggggcttgggtccggggcccccacccctggttacctgggtgggcatataacgcgggaccgccagaactaaaaaacaccgtgcgccacattgtggccgaaacacacacacagaacacaaggggggcgcctcacaatatacccggggcccccgttcagctgacccctttgcacaagggacctagcagcactttaaaacccggacggcgtgcgtaccacgacggaaagtctcggtctgcaggaacctctggggcaacggaccacgctagtcgggaaatactataggactttggccgtgttgaacaccaaaaccatann

SEQ ID NO: 20231 - DNA, 1556 bp, Homo sapiens
  misc_feature 1551, 1552, 1553, 1554, 1555, 1556: n = A,T,C or G
cggtcggcgggcggaggggagggcttggcggccgggaggctttcggcgcccgggccggcagggtccgcccgggcgcggcagggtccgcccggcggcgggaggagggagcggcgcaaacatagagcggcgcctgggcgggcgcagcgcggtcaccgtcctgggacccgcgccggtgccctacggctccgcgggcggcccacggcgagatttcatgtgttctttgtatacaagcgacgtcccagattataattctctgctgagatttgagttggatttgaggatttggagaatccctgcggctttgtaacttcagaggtgtaattagctgaaaacatcatcgttttgaagagttctgcgttttgccagtcacctctcaactgtgtgccaaagaaggactccatgaaagatgacagaagaagttattgtgatagccaagtgggactacaccgcccagcaggaccaggagctggacatcaagaagaacgagcggctgtggttgctggacgactccaagacgtggtggcgggtgaggaacgcggccaacaggacgggctatgtaccgtccaactacgtggagcggaagaacagcctgaagaagggctccctcgtgaagaacctgaaggacacactagcccagcgacttctccgtgtcccttaaagcgtcagggaagaacaaacacttcaaggtgcagctcgtggacaatgtctactgcattgggcagcggcgcttccacaccatggacgagctggtggaacactacaaaaaggcgcccatcttcaccagcgagcacggggagaagctctacctcgtcagggccctgcagtgacggcgccccggccccacactcgcctcccgggccccacggtggagctgcccgcccggccttgtggcagaggctcctcccgcggggacggccccgacggcttctctgcgagtctctctttatgttcaggtcgcttggtcggttcgtctcccatttgccatccaggcctcacacccacactcgagcccacccggccggccagctttagaggaggggaggagcagggcgagttcacattattccttttccatcggaagtggcgctcgtgcattcaactcgttcccgctcatggaacccctctttaaaaagacgcagggcacctgtgagcgcaggagcgagcctaaggccacccagcggcagcgcccgtgtcctgggcactcagcgtgctgggcagagcaggtgcgatggccccagtcctagcagccctcgcccatgtcctgtgcccttacatggctcccggactgtgcagggagccgatacgtttgctgatagcaatactggaaccaccgggtgcgatggcagtgaggagactgcccagtgcctttggggctgtgcttgcaataaagaaagaatttcctggaaaggcagtctgcaaaagagggaaccggtgactcagaaagacagatgttttggtaatttaccccaaatgtgccatccacatagtgctttttcctcttgcccttcggcttgtttgatccccacttgtttttctcccgatgttttgccnnnnnn

SEQ ID NO: 20232 - DNA, 1783 bp, Homo sapiens
  misc_feature 1180: n = A,T,C or G
cacgcgtccgcatgtgcggtgattacagcttgagtatgagggggaactccgaaccatgtctagattgtgatctctttatcctgtttcccttccctttatatccacaggacgtggtgggtcctctggtgcgaaattccggatttccttgggtcttccggtaggagctgtaatcaattgtgctgacaacacaggtgaggtctttgcacgttgctatactcccccttttaaaagcactcaatgggcctgtggctaatgacctattgagccgtcaagaaaggggagagtgaaaacatcgcttttgggtgaagtggcaacatgtgttgtttgcttcaatcggtggtgtgacaaggcgttcttgcggactaactgcttgggcagtgagtggagggaggggctttggaagtgtttgggaaatgttatactgatggaacggcctgatggccctcaacattttttatttttatttacattcttttggaggagccaaaaacctgtatatcatctccgtgaaggggatcaagggacggctgaacagacttcccgctgctggtgtgggtgacatggtgatggccacagtcaagaaaggcaaaccagagctcagaaaaaaggtacatccagcagtggtcattcgacaacgaaagtcataccgtagaaaagatggcgtgtttctttattttgaagataatgcaggagtcatagtgaacaataaaggcgagatgaaaggtttttattttattttattttatttttttaatgaaaggttctgccattacaggaccagtagcaaaggagtgtgcagacttgtggccccggattgcatccaatgctggcagcattgcatgattctccagtatatttgtaaaaaataaaaaaaaactaaactcgaaaaaaaaaaaaaacaaacaaaaaaaacacgaaaaccttgttcgggaccgccgagcgcaccaaggaaaaagcgtgtttgagaaacacatcgtggttggggaggcgagggccaccgcgagaagtaagatgcaccaacgtgggcccatcgagtgtggacgtccaagaagacagacgccgtgggaccaatgcacaactggtgggttgcgtgttctccgcccagatagaaagagagccccgtggggatacccgccacagggcttgtagaaaacaaaactaccagacagagaggggctgntaccgtgcaggcacaaaatacagtgggagagcatcaataaaacaaaggggcgggaccacacaggagcgaccgtcgaataatacaaaaactaaacgacccagccgaaaggtgggggaataactgatcccagtagcgaagacaatgacaagcaagtagaaatagtcaagacatatgatcgaaagaacagcaacaaatcagatacgaacaagccagaccatgagagatcaaacgatcaagaagcaacagacagacacaaaagaatagaaagagacaagcgagacgacgaaagacgcaagaaacggaagagacagagaagcagagaagagagaagagaaggaggagagagagacgagacaggacaacaaaaggagagagaaagacaaaggagcaaggcaagggatactataacagccagatcagagaaacgacgagcaaagaacgcagaaacagaacgagcataagagaaagaagcggagcaagagacagagcaagagcaggagcaagacacaggacaccaaagaagaaagatgaacaaggagagaagaaagacaagaaaaaaagagagagacgaaagaatagaagaagacgaagagcagagcaaga

SEQ ID NO: 20233 - DNA, 458 bp, Homo sapiens
  misc_feature 1, 2, 432, 434, 435, 436, 437, 438, 439, 440, 441, 442, 443,444, 445, 446, 447, 448, 449, 450, 451, 452, 453, 454, 455,456, 457, 458: n = A,T,C or G
nncgaattggagctcaccgcggtggcggccgaggtacactgggctctcaacgtggtgtggaaggtagcctgttacagtgctggattcataaaagggcctttatggtttgtgaaagaatatctgtgtgcttagggaggaaactttttgatctgcagaaaagccagaagacatctaggacatccataaaaattcatcagagagcattttactactgagctgcaaagggaaaaacttaaaatggatatgaaaagtgaagaaagtgatcataggagaaaaccatttcagatgacaagagcacctcaaaggcagcagcctcaaggagcagccatggccccagacttgtcgcacggatgcagaaaacttaatggaggaggctgaggtcagaatgggaagagtttttaaaaaataaaaaggggagctaatatgtgaggnannnnnnnnnnnnnnnnnnnnnnnnn

SEQ ID NO: 20234 - DNA, 1627 bp, Homo sapiens
agtcgagcccacgcgtccggccaaagaagaaaaccttagtatgcatcagatgctggatcagactttactggagttaaacaacatgtgaaaacctccttagctgcgaccacattctttcattttgttttgttttgttttgttttgtttttaaacacctgcttaccccttaaatgcaatttatttacttttaccactgtcacagaaacatccacaagataccagctaggtcagggggtggggaaaacacatacaaaaaggcaagcccatgtcagggcgatcctggttcaaatgtgccatttcccgggttgatgctgccacactttgtagagagtttagcaacacagtgtgcttagtcagcgtaggaatcctcactaaagcaggagaagttccattcaaagtgccaatgatagagtcaacaggaaggttaatgttggaaacacaatcaggtgtggattggtgctactttgaacaaaaggtccccctgtggtcttttgttcaacattgtacaatgtagaactctgtccaacactaatttattttgtcttgagttttactacaagatgagactatggatcccgcatgcctgaattcactaaagccaagggtctgtaagccacgctgctcttctgagacttccattcctttctgattggcacacgtgcagctcatgacaatctgtaggataacaatcagtgtggatttccactcttttcagtccttcatgttaaagatttagacaccacatacaatgtttacatatagttaaaactctcaagaaaacgtcctttaccagttgtatgtggtgtctaaatctttaacatgaaggactgaaaagagtggaaatccacactgattgttatcctacagattgtcatgagctgcacgtgtgccaatcagaaaggaatggaagtctcggaagagcagcgtggcttacagacccttggctttagtgaattcaggcatgcgggatccatagtctcatcttgtagtaaaactcaagacaaaataaattagtgttggacagagttctacattgtacaatgttgaacaaaagaccacagggggaccttttgttcaaagtagcaccaatccacacctgattgtgtttccaacattaaccttcctgttgactctatcattggcactttgaatggaacttcttctgctttagtgaggattcctacgctgactaagcacactgtgttgctaaactctctacaaagtgtggcagcatcaacccgggaaatggcacatttgaaccaggatcgccctgacatgggcttgcctttttgtatgtgttttccccaccccctgacctagctggtatcttgtggatgtttctgtgacagtggtaaaagtaaataaattgcatttaaggggtaagcaggtgtttaaaaacaaaacaaaacaaaacgaaagaatgtggtcgcagctaaggaggttttcacatgttgtttaactccagtaaagtctgatccagcatctgatgcatactaaggttttcttctttggcatgagccactttctctgtggtgagattagaaaattaagtcatgaatagctgtgctttggacacaatggtggtttgtacattaggcaggcaaacatcaatcacaaaccggacgcg

SEQ ID NO: 20235 - DNA, 1648 bp, Homo sapiens
  misc_feature 1, 2, 1648: n = A,T,C or G
nnagaagagaggaccgtgggggcgttcgcgtggctcccagcccgggaccccacccccgctggacagtgggggaaactgaggcctgagcggagtgaccaccccggctatggccagccagcctccagggagcgcgagtgctgctgacaggggccaacgctggtgttggtgaggagctggcctatcactacgcgcgtctgggctcccacctggtgctcactgcccacactgaggctctcctgcagaagggtcggcccgaaataggcggagttgggattcgaactcatttcacaggcagagggaggagagcagccatagccacctccactggttccgactccagctcccgggctcgcaggagtaaacgcgcatgctcagggagctcggtcgcgcatgctcagcgcaacggcggggaagactccagccgccagggggagcgcgtgccgttcttgcctctctggcctgcgcctcctgagccgagtagtagtatcccggagttccgcgcggcgccagcccttccgccacggccgtctctggagagcagcagccatggccctacgctaccctatggccgtgggcctcaacaagggccacaaagtgaccaagaacgtgagcaagcccaggcacagccgacgccgcgggcgtctgaccaaacacaccaagttcgtgcgggacatgattcgggaggtgtgtggctttgccccgtacgagcggcgcgccatggagttactgaaggtctccaaggacaaacgggccctcaaatttatcaagaaaagggtggggacgcacatccgcgccaagaggaagcgggaggagctgagcaacgtactggccgccatgaggaaagctgctgccaagaaagactgagcccctcccctgccctctccctgaaataaagaacagcttgacagaagccctggctctcctgctgtccgtgggtgggtgtgggtgtgtcgggggcccgcagtcccctgtctggtgcccgctctgagccacaccctctccgggtgctgcctggtcgtgaatcaaaagccgtggcccgcccacccttcccggggcagcaggtgaggaagccgccgtactgcaaatgactttaatcattaaatagcttctactgccaaagcaaacacaccacaccacacaacaacaaccacacacacccaccgagacagaggaaaccaaacacacgagtgtcgacgacaacaacgggcactacgcaatggcacctctgtcacacaacacaggtacactggaaacaacactattcgtgtcaacacaaaggcgagacaacacagagacaagcactcacagtacagagaagcaaatacatgcacctacaaccccggagaaaccggcataagcgaggcacaaacagagagagagcgagacccaacgcaaaagaccagacagggacgaaacgagatcgacaaaacaagtcgtcgcgagcaacagcaacaacacacagacaccagaacacacactacgagcaagacaaccccccgtgaccgacagtagaactacagaaaataagaacctcacagtaacagcaaactaacggagccaaagcaaattcttacacctagcaagtcaagcagcgactaagcctagaagaacgaccagacagcacccagagacgaaacagcacacagan

SEQ ID NO: 20236 - DNA, 2449 bp, Homo sapiens
  misc_feature 1, 2447, 2448, 2449: n = A,T,C or G
naccacccgtccgattaattggggcttaaaatcttgttaaatttacttaagaaaaattaataaatccaattatttactttaaagctgcagaagaaagatcagcaactggagcctaaaaaaagtaccagccctaaaaaagctgcggagcccactgtggatcttttaggacttgatggccctgctgtggcaccagtgaccaacgggaacacaacggtgccacccctgaacgatgatctggacatctttggaccgatgatttctaatcccttacctgcaactgtcatgcccccagctcaggggacaccctctgcaccagcagctgcaaccctgtctacagtaacatctggggatctagatttattcactgagcaaactacaaaatcagaagaagtggcaaagaaacaactttccaaagactccatcttatctctgtatggcacagggaaccattcaacagcaaagtactcctggtgtatttatgggacccacaaatataccatttacctcacaagcaccagctgcatttcagggctttccatcgatgggcgtgcctgtgcctgcagctcctggccttataggaaatgtgatgggacagagtccaagcatgatggtgggcatgcccatgcccaatgggtttatgggaaatgcacaaactggtgtgatgccacttcctcagaacgttgttggcccccaaggaggaatggtgggacaaatgggtgcaccccagagtaagtttggcctgccgcaagctcagcagccccagtggagcctctcacagatgaatcagcagatggctggcatgagtatcagtagtgcaacccctactgcaggttttggccagccctccagcacaacagcaggatggtctggaagctcatcaggtcagactctcagcacacaactgtggaaatgaaaactgcaatacaagtttcatccagaactaccacctgacattccttgctgaaacgcatctagttcccctgtttattcatatgcatattttttttctttttacccatttgttcatattaagaatgatctgattgaccgtgttggtctgtactgattcaatttgatgtggtgaaaagcaggttgataaatcattttatgtcaagggcagctttgctcatatttcccatgatttcatgtactgcattatttgagaagctgctcaacttgcaaaatcagttttcctctcaataaaattatagctctaatgtttgcatataagggaagtagttatcatgttagtaatacctctaatagtataaaccccaccccaaaattagccagtaatcctgtaggaaggtactgtatgatcaaatgtttaatcatataaatagaatgtaaatgtctcactgagcactgttttctagtgtatcaaaatgctcttatttcatcattcacttcactgtgctgttgttatgatgtgcttaacagggaacgtgattagtgaaaggaagataaacgtggatgttactccaaaacttcgtttaatgaatgcttaaagaattcaaattttatctgcctctcttgtaatttggatctcttcttaatgtacatagtgctaacatgaagacctttttctgcactatatgcaaacagggtaactaactaaaacaaagccactttcaatcttcaatccttgaaggtatatctaggtttatgacagtaattgtgtttacattttatggtgcctagtattgacaaaatgttatttccctacattaaacatgactccatagaccttttcatttgtgggtttttatttcctatgatgtatactgccactaaccttccaaaaattacttagtattgcaaagtcaggaatcatcaggaacgtttagctgacaaaatacttgtctgttttaaaaacctgttcaagtctaccaacctgttcaagtctaccaattataagggcaaattggagaaaaagaaaaaatatatactcaagagtggtatcttgcagtatcggcactgtacaaaaaaatcttccaatttagttgttgtagagaaaacatgcagaacaaatgaagacaaaacatacattttgtaccaaccatccaattagcttatgttaactgacaagctccatttaaacagatgtccatcagatgacaagaaaggctgctgtactgaagtaaaacaaacaatacctgaatgctctgtagcctaaactccaaacatcctcttccatatggatccactggctggacaaactgcccagttgctgcttcaatttatctccaatttcctggtccggggactggcgcgcgggaaaaacccttctgccggttcccggacactggggggaaacggggcgccctttttccagtgcgggcccaatataactagaatatgtgccacagtgttgaaaaaacccggaacaacgggggatactgagacaaaaaacagattagcgcccgcgcgtcgtttaaggcttatannn

SEQ ID NO: 20237 - DNA, 568 bp, Homo sapiens
  misc_feature 1, 2, 3, 564, 565, 566, 567, 568: n = A,T,C or G
nnncgtccgacaacatttggcatcagggttgtatctgttggtggaggacacaccgccaaaaggaaatgggatttcctggttaggcctgcggcttggcagatgattgttatgggaaagacactgagtctgtttaggcaatttcttcctctttactaataaagtgttcctattttgaaagcaatgctgagttgtggacatgtgtataaaccgtaatgctgtaagttaggcctctcttgtctagaatctcagcctcttcatactctctcccccttttttgccatattattttccttatcactaactatatattttacctgtctcacttactatctgtctctcctctcagagtgttactccaggagggcagagataactgtttagtccaggctgtgccttcggtgctcaaaataatgcctgggtgcaaaataaatatatcttgaatgaaataatgaagtaatctttaaaatggtgctccgagcataattttcatatagtaacacaatagtttgcattagttgtctctttcagggatatggaattgttcaacataagaaaatcaggccnnnnn

SEQ ID NO: 20238 - DNA, 371 bp, Homo sapiens
ccacgcgtccggcgggtgagccgctggcgcgccgggccgggcgggggattggctgagggcgacccgagagaggggagacccggactgaggagaggacggggtggagggtcccggccggaggctagcctgaggagaccgggggcggaggggagacccgggccgcggaggaaagggatggaggagaggaagccgccgggcgccagcgggacccccgggctgaggggagaggcgccccaggccgggtgaaaagtggccgaggagacctgggctgggctggcaagtcccggaccggggaggaggggagcagccctccgatgtgagggatcgcagaggaatgagcttcgttctggattaaaaaaaaaaaaaaaaaa

SEQ ID NO: 20239 - DNA, 1162 bp, Homo sapiens
  misc_feature 1, 2, 1137, 1138, 1139, 1140, 1141, 1142, 1143, 1144, 1145,1146, 1147, 1148, 1149, 1150, 1151, 1152, 1153, 1154, 1155,1156, 1157, 1158, 1159, 1160, 1161, 1162: n = A,T,C or G
nngcgtccgggggaggggaggggaggggagcaggcactgggcgggggcctaggtgcactttgtccttgccaccaatggcgggaggagggtggacctgaacacctgcagggtgtggtgcctgccccagcctctcaggtacttggcccttggggagaagagaagagggtctggtttttgctgggggtgagtttccgggacactcccaaagcccacagataatccctggtgtgggaagaggagtcctggataccttgatgtttagcactttaaccccctttgtctttaaggtaggcgtgggggctactgccagaagtggctgttgggtctgaccccctcctttctgccctccctctgccacatgctggtccgcagagccctcctcccaaggggtggggccctgggtggagctcagcagggtctgcccactccctacgctggcccacataggcctccaggagccctcagtgagagggaccagcatagctgacccccagagtgtggtgggcgccggccctgcccgaggcccagtcggggccctttctgcagatctacctctggctcagcgcacgccccctgccctgagaacaggaaagggcccggaagggctgactcaccgggccgacgctcacacgaaaatgggatgcactttatttgctggtgcaaaggcaggtgagggtgcctcctgtgtgaccgttggccctcctgcctggtggcgctgaagggaaggagccagtgagcctgaccccgggaggggccgtccccgtgtgccgcgtttggcggggccccaggcggctcccccaggcccgggtctggggccccaggctttcccctgcctcgcggccgggcgtcccgtgctttgggtttcttggtttgggttttttaatgccagttctcagtacataagtgcattttgaaagaggttccagctatcacttgtaaccatatatatatacatatatattctatctacaaagtgtttatttgcgagatgtttcaacggtgagttcgggccccgcccgccttgtgaccatctgtccccggtcctcgtccccgccccgcgccctggtcccgagtggcgtggggacgggccatcactgtatgtattaaaatgactgtatcaaataaatgtttattgannnnnnnnnnnnnnnnnnnnnnnnnn

SEQ ID NO: 20240 - DNA, 365 bp, Homo sapiens
  misc_feature 281, 282, 283, 284, 285, 286, 287, 288, 289, 290, 291, 292,293, 294, 295, 296, 297, 298, 299, 300, 301, 302, 303, 304,305, 306, 307, 308, 309, 310, 311, 312, 313, 314, 315, 316: n = A,T,C or G
cacgcgtcgtgcctgacccattcctgatcccaaggccaggtggttgtcttattgcaccatactccttgcttcctgatgctgggcaatgaggcagatagcactgggtgtgagaatgatcaaggatctggaccccaaagaatagactggatggaaagacaaactgcacaggcagatgtttgcctcataatagtcgtaagtggagtcctggaatttggacaagtgctgttgggatatagtcaacttattctttgagtaatgtgactaaaggaaaaaactttgannnnnnnnnnnnnnnnnnnnnnnnnnnnnnnnnnnngggcgcgcggggtgggcggcgagcggagccggccggagcggcccgggca

SEQ ID NO: 20241 - DNA, 3905 bp, Homo sapiens
  misc_feature 1, 3897, 3898, 3899, 3900, 3901, 3902, 3903, 3904, 3905: n = A,T,C or G
natatcatgtaagctagtcacacctatttgaattcacttttctttgtttcttgatttcttatggctattattgcaacaatcaaacaaattttgaataccttttgtgagctagcactgtggaaatatgagggaagtttattgtgttcttactttaaatagtttgcagttttattgtgtatacaaatgtatgcatgtgaaatatacagattttaaaaaagcagatcattaaagattaggtcataaggtgtagtctgtacatggaggaagagctaagttgattcagaataacatggttagatttcgaagctagcctggatttgaatcttggatccaccactgactagctatgtaagcttagtcaagcaactcaacggaggaggcgaggagcgccgggtaccgggccgggggagccgcgggctctcggggaagagacggatgatgaacaagctttacatcgggaacctgagccccgccgtcaccgccgacgacctccggcagctctttggggacaggaagctgcccctggcgggacaggtcctgctgaagtccggctacgccttcgtggactaccccgaccagaactgggccatccgcgccatcgagaccctctcgggtaaagtggaattgcatgggaaaatcatggaagttgattactcagtctctaaaaagctaaggagcaggaaaattcagattcgaaacatccctcctcacctgcagtgggaggtgttggatggacttttggctcaatatgggacagtggagaatgtggaacaagtcaacacagacacagaaaccgccgttgtcaacgtcacatatgcaacaagagaagaagcaaaaatagccatggagaagctaagcgggcatcagtttgagaactactccttcaagatttcctacatcccggatgaagaggtgagctccccttcgccccctcagcgagcccagcgtggggaccactcttcccgggagcaaggccacgcccctgggggcacttctcaggccagacagattgatttcccgctgcggatcctggtccccacccagtttgttggtgccatcatcggaaaggagggcttgaccataaagaacatcactaagcagacccagtcccgggtagatatccatagaaaagagaactctggagctgcagagaagcctgtcaccatccatgccaccccagaggggacttctgaagcatgccgcatgattcttgaaatcatgcagaaagaggcagatgagaccaaactagccgaagagattcctctgaaaatcttggcacacaatggcttggttggaagactgattggaaaagaaggcagaaatttgaagaaaattgaacatgaaacagggaccaagataacaatctcatctttgcaggatttgagcatatacaacccggaaagaaccatcactgtgaagggcacagttgaggcctgtgccagtgctgagatagagattatgaagaagctgcgtgaggcctttgaaaatgatatgctggctgttaacacccactccggatacttctccagcctgtacccccatcaccagtttggcccgttcccgcatcatcactcttatccagagcaggagattgtgaatctcttcatcccaacccaggctgtgggcgccatcatcgggaagaagggggcacacatcaaacagctggcgagattcgccggagcctctatcaagattgcccctgcggaaggcccagacgtcagcgaaaggatggtcatcatcaccgggccaccggaagcccagttcaaggcccagggacggatctttgggaaactgaaagaggaaaacttctttaaccccaaagaagaagtgaagctggaagcgcatatcagagtgccctcttccacagctggccgggtgattggcaaaggtggcaagaccgtgaacgaactgcagaacttaaccagtgcagaagtcatcgtgcctcgtgaccaaacgccagatgaaaatgaggaagtgatcgtcagaattatcgggcacttctttgctagccagactgcacagcgcaagatcagggaaattgtacaacaggtgaagcagcaggagcagaaataccctcagggagtcgcctcacagcgcagcaagtgaggctcccacaggcaccagcaaaacaacggatgaatgtagcccttccaacacctgacagaatgagaccaaacgcagccagccagatcgggagcaaaccaaagaccatctgaggaatgagaagtctgcggaggcggccagggactctgccgaggccctgagaaccccaggggccgaggaggggcggggaaggtcagccaggtttgccagaaccaccgagccccgcctcccgccccccagggcttctgcaggcttcagccatccacttcaccatccactcggatctctcctgaactcccacgacgctatcccttttagttgaactaacataggtgaacgtgttcaaagccaagcaaaatgcacaccctttttctgtggcaaatcgtctctgtacatgtgtgtacatattagaaagggaagatgttaagatatgtggcctgtgggttacacagggtgcctgcagcggtaatatattttagaaataatatatcaaataactcaactaactccaatttttaatcaattattaatttttttttctttttaaagagaaagcaggcttttctagactttaaagaataaagtctttgggaggtctcacggtgtagagaggagctttgaggccacccgcacaaaattcacccagagggaaatctcgtcggaaggacactcacggcagttctggatcacctgtgtatgtcaacagaagggataccgtctccttgaagaggaaactctgtcactcctcatgcctgtctagctcatacacccatttctctttgcttcacaggttttaaactggttttttgcatactgctatataattctctgtctctctctgtttatctctcccctccctcccctccccttcttctccatctccattcttttgaatttcctcatccctccatctcaatcccgtatctacgcaccccccccccccaggcaaagcagtgctctgagtatcacatcacacaaaaggaacaaaagcgaaacacacaaaccagcctcaacttacacttggttactcaaaagaacaagagtcaatggtacttgtcctagcgttttggaagaggaaaacaggaacccaccaaaccaaccaatcaaccaaacaaagaaaaaattccacaatgaaagaatgtattttgtctttttgcattttggtgtataagccatcaatattcagcaaaatgattcctttctttaaaaaaaaaaaatgtggaggaaagtagaaatttaccaaggttgttggcccagggcgttaaattcacagatttttttaacgagaaaaacacacagaagaagctacctcaggtgtttttacctcagcaccttgctcttgtgtttcccttagagattttgtaaagctgatagttggagcatttttttatttttttaataaaaatgagttggaaaaaaaataagatatcaactgccagcctggagaaggtgacagtccaagtgtgcaacagctgttctgaattgtcttccgctagccaagaacctatatggccttcttttggacaaaccttgaaaatgtttatttaaaaaaaaaaaagatgacaaagaaaaacagagagagagaatattggagatgtcctgaattttaatagggtacgcgccattagggctttttgcgctaaaggatgaacatgtactggtttatgtggacaagccattataccaccagactgcaatgccagtttcctctactgcaaacagtgttctgtgacaaaaaaaaaaaaaaaaaaaaagaaaaaaaaagaaaaaacagaaatatatccagctaacaannnnnnnnn

SEQ ID NO: 20242 - DNA, 434 bp, Homo sapiens
gcgtccgctaacacttaaaggatgaagagaggaaaaatctacagtgtaggcacagaaatgcctagaaatgagagaaaaaaaaaacaggagcgcatactgcctcagaaacaccaagagtagtttgggaagaaaggagtcaacaataacaactatcaaaggaatgaatggccaacagtgtagcctcaagtagggtagtgtgagtagttgatagaccaaaaatcctcagcaaaatactagcgaacagattcaacagcatactgaatggattatacaccatggccaagtgggatttatcccaggaatacaaaggtagttcagcattagaaaatcaatcaatgccaacacacctcattaacagaaaaagtaaagaactgcatacatgatcccacaattgatgctgaaaaggcatgacaaaatccaacatgctttcatga

SEQ ID NO: 20243 - DNA, 2925 bp, Homo sapiens
  misc_feature 1, 2, 3, 2917, 2918, 2919, 2920, 2921, 2922, 2923, 2924,2925: n = A,T,C or G
nnnctctttgtcgaagctagaggaccggcaggcggcagcagcaactacggcggcggcggcagaacccagcagtgatgtggaggtggagacccacaggagccccggacttcacctgagctacctcagtggtcaccaagagtggcaagataaagaaaaccctgagttgggcgggaccaggatgcctgaccgggacagctatgccaacggtaccgggagcagcggtggaggccctggaggtggtggcaacgaggaggccagtggggcaggggtaggcagtggcggggccagctcagatgccatctgtagagacttcttgaggaatgtgtgcaagcgaggcaagcgttgccgatatcgccacccagacatgagcgaggtgtccaacttgggggtgagcaaaaacgagttcatcttctgccatgacttccagaacaaggagtgtagccgcccaaattgccgtttcatccatggctccaaggaggatgaggatggctataagaagacaggagagcttcccccacggctgaggcagaaagtagcagctggccttggcctttcaccggctgacctaccaaatggcaaggaggaggtccctatctgccgtgactttctcaagggtgactgtcagagaggagccaagtgcaagttccgtcacctgcaacgggattttgagtttgatgctcggggtggaggaggcactggtgggggctcaacaggctcagtcctcccaggacgacgtcatgatctctatgatatctatgaccttcctgacaggggctttgaggaccatgagccaggcccaaaacgccggcgaggtggatgctgcccccctgatggccctcattttgagtcatatgaatatagtttggctccaccgcgaggggtggagtgcagactgctagaggaggagaatgccatgctcaggaagcgggtagaggagttaaagaagcaggtcagcaacctgctggccaccaatgaggtactactggaacaaaatgctcagttccgcaatcaggccaaggtcataaccctgagctccactgcaccagcgactgagcagactctggcccccactgtgggcactgttgccacttttaaccatggcattgcccagactcacactactctcagcagccaggctctacagcctcgtccagtgtcccagcaagaactggtggcccctgctggagctccagctgctcccccaactaatgctgcacctcctgctgctccaccacccccacccccacacttgaccccagagatcacgccactgtcagctgccctggctcaaacaattgcccagggaatggcacctccacctgtctccatggctcctgtggctgtatctgtggctcctgtggcccctgtggctgtatcgatggcccaacccttggcaggaatcacaatgagccacaccaccactcccatggtgacttaccctatcgcttcccagagcatgcgcatcacggccatgccacactgatggggctaatggacactcccctggtatagcctcgcagggctggggtcagggggcccttgcccactcacctagccttccccatccctgtctgaagggctcccttgagaactaggacaagagactacaaggagtatgtcctgaggaggggttgggatggtgtgttttctctcacctcccttttatgagggtcctcttgtccatcttcaagcctcacagtgggggcttgcagaggagtgcagactgaagccagcagagaggaaggactgactgaggggctgtgtcctcttatgggaatttgggaacatccctcgtcttgtcctctcttctgcacagcacaggttccagcactggttttagaagaaaaaaataccctgcccagagggaaagccaggaaagattgggaagtgggtggtcaggagagaaggcctgataggagccttcagacaatttgggtcctagttgcttgggttggacaatacaggaattgcttctgggccctgggaaagctgggaccatagtgctccagcccaaagactaggggagcattcattaccctagtttgacctgaaaatccatagggcagggcccactactttccaaagaaataaaagaacaattatttttaacaaatggaggcagtgaaaacttgcttagctattctgtgtggaagatgggagcagtaaatagatctcatgccaaaatgggataaagaccccagcctcacatagctttggtaagatggatagaagccagtgaagaagggtagggacccagaacaagaccaaattggggctttggggaaggcactttatggggtaaaagctttggagccacccagtctagttttaaaaatagtcccatctgtttctggtctctgtctgtattgtgctattcccaggttgcctcagtaccaggctcctagggtcatttagcaggcaggcagtaaggagagtgtatttgctgaaatgcggatgggattgttccttagttggcaggatccctattcaaacagagcaggacaggttgggtttgatggcccttgggtttgatggccggtggccgtcaagttgatggcggtaaatgtccctcctaaccaaccctttagtggccgttcctgaagccttcaggcttgggagggttggacagagaggccctcctgggggccaccggcccaggggcacaccctttttcctggtctccatatggccgcagcgtttactctctattctgggagggggcgggcgccatatacactctcccctgctacggggtgtgggcgaccctcgtgttttcgggcacgaccggcggagcagcgtgggcgtccccctactacgcaggtgtgtggtgtgagacgcacgtggcgcggcgcctaaaatgttatcctcttcgttggcccgtcgtcgtctctgctgtagcctgcttcgctctccgtannnnnnnnn

SEQ ID NO: 20244 - DNA, 420 bp, Homo sapiens
gtccggggcaggagaggttcaaatgcattgcatcaacctactatagaggagctcaaggtaaggggctgggtgaagtggggtaggtgggtctcagagtgcacatggcttctcatatggagctggaaggattggggaaatgagcagtagtgtcttccctgtcaacctggggctgtttctgccactcttccagccatcatcattgtcttcaacctgaatgatgtggcatctctggaacataccaagtaagtgagcatcctgcaatataatgggaggctccgggaagagagggttcagaacagaggggtggtcaggaagaagaagaatgcatgtaggaccagagagggggtaattgggcctatgaatgtcagtgggaggggccctgcagactcactcatcccttactttccacctcccatggca

SEQ ID NO: 20245 - DNA, 739 bp, Homo sapiens
  misc_feature 1: n = A,T,C or G
ncctccagcctgggcaatagaatgaatgagactccttctcaaaaataaataaataaataaaatactgagaaaaagaatctttattgtttcctgtaaaataaattttccttttagcaaagctcttttccctttgactctcgccgcctagatttcggtcccaggaccacacatttttaaagatgctcctcaccgccgtacagctcctgtacagcccagaaagctccgtgcgcacgaagctcatccagctcccggtggtctacgtgatgctcatgcagcactcgctgtttctgccgactctactgacgtctgacggagaggagagcccggacagccaagtaaaaggtgacccctcaccccagcccttccattccgtatccagattttatctcctgatttccttacactggctgcactgaggctcatctccctccggctctcggagctaaggaagcattgccaagacagtgtcagaatgttttatttctgtcaaatccagggtgaagaaatgtctcctctgacttgtggtcaaacagcaaatacaaacctgtttccaaggccttaactggcttacagaagttgtgtttgagatcttagtgccgttatcatgggctcatgttaaaatctgggatcgaggggaagtcacgcgtgggaaaaaagtgtgggtgtctaacctgagagaaattgattagttgcatgaaatttctgcttgggaagactgaaacttttatcaagggaaaac

SEQ ID NO: 20246 - DNA, 1737 bp, Homo sapiens
  misc_feature 1: n = A,T,C or G
nctcaaaattctttttaaaatttttttaaaagcccaggcttggtggcgcatgcctatagttccagctactcaggaggctgaggcagaaggatctcttgaacccaggagtttcaggctgtagttccacctatgcatggcagcctgtgaatagccctgggcaacacagcaagacctcatctccaaaaaaagacaaaagaactaaattattctactgcagaacatgattaggtaaatatctccaaagcagaaagacaggtttcatattttcgttagtttgagtcagtccttccaaatcaaatcttgttttttattagtatacagatggtatagccagtaagtaaatgagaagcagtctttttaagccgatccattcttaaatgaaaaaatatataaatattttagaataaatttattaaattctaaagttgtagaatttttaaatttggatattttgggaaaatatttaaaccactattgcaaacaaaacaacaaaatgtacttatgtttatacttaggcacaaagaaaactacagtattttaaagtaaccattacacaatattgaggttgcaaagattactgaaggcataacctaaaaaatgagttgatttctaaaaatgggaaaaaggaaaaaaataatttctaaaaacaagtatgcatacctaaacctacctaatgacaccttagaaaattcaagtatagcaccattcattaacatcaatgaggatgtcatcacacatcatgtagcctctgcacaccgtgagaataaatgaaaaagacaggcatcttgctatcatgacaatagttttgacctcgcagacctctctgtgcttacgcaacggataaagccataagaactgtcctgccctcaaggagcaacctaaagtaggaaaaaaaaaacaaaattacacaattattatttacaattgtgagaagagctcttgacaacattcaaatggaggatacagtgtagtaagggtgagggtatcaaggcttccttgagaagtgatgttttgaggccattctttcttctcaataactggtatttggttcctgaatcctttaacttccttaccattgtcactcctaagccaaatctcattacgtcatgtctagactactgttaagagaaccacttaagtggtctctgcagccctcaatttattggtgttatctatgggaaaattgctcaaactctaagccttagtttcctaccctataaaatggggttttatatacaaggaacatactaaatacacaggtatacctcagaaacacggcaggctcaattccagagcactacaataaagcgaatctcatgaatttgttggtttcccagtgcataaattatggttacactataccatagtctattaagaagtgtacaatagcattatgtataattgataaatacatcactgctaaaaaaatgctaacaatctttttgctggtggagggtcttacgccaacgttaacgatggctactgactcatcagggtggtggtggttgaagattacgatagctgtggcaatttcttaaaagacaatgaagtttgccacactgacatcctttcacaagacttctctgtagcatgtgatgctgtttgatagcatgatagcattttacccacagtagaacttttttttccttttcctttttttttttttttaaacgcaaggtctcactctgtcacccaggctggagtgcaggggcgccatctcggcggacgcgtgggtcg

SEQ ID NO: 20247 - DNA, 1339 bp, Homo sapiens
  misc_feature 1, 2, 3, 4, 5, 6, 7, 8, 1339: n = A,T,C or G
nnnnnnnnacatatttttaataatgtaattttaaaaatcctttataatcaggactgagtcttggtttgcagaagctgtcacttaccctgaaacacagtatcaaaagggaaacttaaaacatactgtttgatttttttatttcctcttacaatccatgttttcaggtagaattatgactttccccccattgttacacatttctttacaaaggaggcctgtagaaattggacacgatcatgcttgagcatgtgagttagtcaaattatgagtccctgcctattgtccattacacaccgaatgttaatttaagaaccagaggcagaagttctggcttcctgcttgaaacccaattcttatatgaaattttttaaaagcagaaacctagcagcccatctgctttttctcttttgtcggtgtatttggtacccctccaatgctggtctttttgtagaaactcagtagagaaagtctagctaagcagtgttgaaaagcctgcaagatttcagtttacatatcgacagcatatccactgatttctaaatgggctggtcccatcatctgaagattctgtatagaattattaaaaaaaaaatccatctttctttattttcttcacatgcgacaatttcttaagcactttgacattttggtagttccacactattgagagaataatatatttattttgtgacattgcagatgccaaatactgtaaccttctcatgataacaatacttaggttcaagatcactgttcaaaccctgtcatgctttaaaactgatgcgagatgattttgttttttgcataatcaatacttaagggtgcaatcaactgttagtaattgtgcagtaaagtaaagccctgtggtgtatcaactactagttaagagtctcagttgatttctgtaatgtttgacctaataatagcccgtttcgtctctgacccaacagaggaagcacagatcaaatcaccttggagtggtcaccagggggacagggagccccccaccaatgtatcaatgggtgatttatgatgccttctgccctttggcgagtgaatgggtttcccataggggaagttggcctccctccgtgagctttggaaatgttttctaatagacacagggaggccagttctgtttcagagcaattatcttcccaaattctctgttctggtgttggaactgtgtgccctggtttctgttttcctttctactgctgtaattctctgtctcatcatccttctcttttgtttccatagccttttataatgcatatatgatgctgtgaacagaaataaattatttatacaatcaaaaaaaaaaaaaaaaaaaaaaaan

SEQ ID NO: 20248 - DNA, 2932 bp, Homo sapiens
ggtctaggtacgaggctgggttgtggcctgctcctgcggaatcgcaggtttgaccccggaagtgcgggcgctcagggagctgtcaccgtggtcggcggcggcggcggcggcggcacagagccggtggtggagccgccgaggccacctcgtgtatgcagagaccatgtgtgtctgatctgctgggatcctagagctggaacaggagggtcacgcagcacaatgccagctctgcccctggaccaactccagatcacccacaaggacccgaagacaggaaagctgaggacttcaccagcgctgcaccccgagcagaaggcagaccggtattttgtgttatacaaaccgccccctaaagacaacattcccgccctagtggaggagtacctggaacgcgccaccttcgtagccaatgacctcgactggctcctggccttgcctcacgataaattctggtgccaggtgatctttgacgagactctacagaagtgcctggactcctacctgcgctatgtcccccgcaaattcgacgagggggtggcctcagcccctgaggttgttgacatgcagaagcgcctccatcgaagtgtttttctcaccttcctccgcatgtccactcacaaggaatccaaagatcacttcatttccccttctgcgtttggagaaatcctctacaataacttcctctttgacattccaaagatcctggacctctgcgtgctctttggaaaaggcaactcaccactgctccagaagatgataggaaacatctttacacagcagccaagttactacagtgacctggatgaaaccctgcctaccatccttcaggtcttcagcaatatcctccagcactgtggtttgcaaggggacggggccaataccacaccccagaagcttgaggagaggggccgattgacccccagtgacatgcctctcctggaattaaaggacattgttctctacctttgtgatacctgcaccacactttgggcctttctggatatcttccctttggcttgccagaccttccagaagcacgacttttgttacagactagcttccttctacgaagcagcaattcccgaaatggagtctgcaattaagaagaggaggcttgaagatagcaagcttcttggtgacctgtggcagaggctctcccattccaggaagaagctaatggagattttccacatcatcctgaaccagatctgcctccttcccatcctagaaagcagctgtgacaacattcagggcttcatcgaagagttccttcagatcttcagctccttgctgcaggagaagaggttcctccgggactatgatgcactcttccccgtggccgaagacatcagcttgctgcagcaggcctcatcagtcttggacgagacgcggactgcctacatcctccaggcagtcgagagtgcatgggaaggggtggacagacggaaagccacagatgctaaagacccatcggtgattgaggagcctaatggggagcctaacggggtcacggtgacagcagaggcagtcagtcaagcatcatcacatccggagaactcggaggaagaggagtgcatgggagcagccgcggctgtgggccctgccatgtgtggggtggaactggactctctcatctcccaagtgaaggacctgctgccagaccttggtgagggcttcatcctggcctgcctggagtactaccactacgacccagagcaggtgatcaacaatatcctggaggagcggctggcccccaccctcagccagctggaccgcaacctagacagagaaatgaaaccagaccctacacccctgctgacgtctcgccacaacgtcttccagaatgacgagtttgatgtgttcagcagggactcagtagacctgagccgggtgcacaagggcaagagcaccaggaaggaggaaaacacgcggagtttgctgaacgacaagcgtgcagtggcggcacagcggcagcgctacgagcagtacagcgtggtggtggaggaggtgccactgcagccaggcgagagcctgccctaccacagtgtctactacgaggatgagtacgatgacacatacgatggcaaccaggtgggcgccaatgatgcagactctgatgacgagctcatcagccgcaggccattcaccatccctcaggtgctgagaaccaaagtgcctagagaagggcaggaggaggatgacgacgatgaggaagacgatgctgacgaggaggctcccaaggtacctccctggcagcccgaccattttgttcaggaccctgcagtgctgagagagaaggcagaagccaggcgcatggcctttctcgccaagaaagggtaccggcatgacagctcaacagcagtggccggcagcccccgaggccatgggcagagccgcgagacaacccaggaacgcaggaagaaggaagccaacaaggcgacaagagccaaccacaaccggagaaccatggccgaccgcaagaggagcaaaggcatgatcccatcctgagacctggtgcagggccagtggggaggcagcggcaccagactcaccaggccgtgctcccatcgcctggggcctcctcactaggggccccaagttcaactcaacccctcaacagcctcagctttgcagcccctgagaaggccgcctctcatctaccagccagccatgagcgccttcctgcagaacacacagtgccttatgccacagccgaagaatccgtggggccggcaagcaggcaccttcccccagctgcgctagcgggaaagagatggggatggagtcccaaggcaagcgccccaaacctcgggccacaagacaccacttcccctttaccctggacagcaggaaacctgtatattcaaaaacacaaaaagtcctgctaataaaatttttgaccctttaaaaaaaaaaaaaaaaaaaaaaaaaa

SEQ ID NO: 20249 - DNA, 490 bp, Homo sapiens
  misc_feature 487, 488, 489, 490: n = A,T,C or G
tccggaagcttaatttaattaagctgaaaccgaagctttaattttaatttaaatagttccatgtgcccatattggacagtatagctccagggtttattaaaccaccattcctggtgataggatagagcccagcacaaactaatctgggcaacaaatcaaagggcacaagtcgcatgtaggttccaaactcagtacattttagagaaaaggagtttgattatgtagtagaaggaagaactgcctggtgggactcatgatcttcctttaagagcaaggctcaaagacctggggagttttgatttgatgctatgatgtctcctggggctcagaatattatgaaatgaggagtgaatctctgagtgaaaagaactcaagctgcttgttgcattgcggaatgtctctaagaggtagagaggcgtctgttaagtggcttgtatgaaggtttcagaaggtaagatgagccccagctttgggagttgtgtttgcnnnn

SEQ ID NO: 20250 - DNA, 458 bp, Homo sapiens
  misc_feature 1, 2, 3, 4, 438, 439, 440, 441, 442, 443, 444, 445, 446,447, 448, 449, 450, 451, 452, 453, 454, 455, 456, 457, 458: n = A,T,C or G
nnnnataaacatacctagtccatttaactgtaatagatatagaagtatccttcaataaccaacaacaaatgcttgtttccaacaggctctgatggttgtatataggaaaccttgataccaatacgtccagctgacccagaaaaaaatcagagcttagttaaatcactgctgctcaaggctgttgtatctggtaacgctcgaaatggagttgcactcactgccctggatcaggatcacgtcgcagtcctaggaagtccactagcagcttctaagggtaactgacatccaattcattaagaaggcctttgtatgtttccttcacggtgtaccttttagtcttccttttctttttcatttcattattacccagactaattcattctctttatcagcatactcaattttttttgtgcctttctaaatcttcttgaattgggnnnnnnnnnnnnnnnnnnnnn

SEQ ID NO: 20251 - DNA, 546 bp, Homo sapiens
  misc_feature 1, 2, 3, 520, 521, 522, 523, 524, 525, 526, 527, 528, 529,530, 531, 532, 533, 534, 535, 536, 537, 538, 539, 540, 541,542, 543, 544, 545, 546: n = A,T,C or G
nnnccggccactgcactagggtactggggaggacatggagtataatatagtaccagcacagacagacaggcagcttctggagccagactgtctgtgtgatcttgggtaagtaatctagcctaaccatagagatgataacaattgtacctgccacaggctcatggggctattgtgatggtgaaatgtaaagatgtaaagtatagagaaaggatgtaaaactgcccgacatatagtaagggccatttaaaagatgcctgttattgtccctcttcttgagagcatattaagggctcaaatctagccagagtctggcgggtacagaggtaaacaaataatggcaggttggttaagtactggacaccagtgatgtccaaggtctctaggatgccctggagaaataatgaactcttctaagattgtttggaagggatttataaaggacatctaggctgggttttgagtgaggtatgggagttcgctggtcaagaatgtaggaattacaaaagcataaagtgcatannnnnnnnnnnnnnnnnnnnnnnnnnn

SEQ ID NO: 20252 - DNA, 547 bp, Homo sapiens
  misc_feature 522, 547: n = A,T,C or G
ctgccaaaataattttattctgttttcaaattgaacagcatatattgttagagtgagagtctgtaaattcagtcctcttctttgttggcattcagaagtctttgttgaaatctggatgagattctgaattcaggtgatgttgatttacataaattggatgtctctgggactttccattttgacagtcgctcttctacttcagtctcctgaagacatctctccaacagaagttacataaaaatactaatcttcaaggtgctttctaaaatattttcatcacgtcattaaaatcttctttcactaggcaatggttctgtctctatgggggctggcaggcagggcaaatgaattcctaccaataaggcgggcctagttggttcatgtcaattccaaagcaagaggatggttgaagaagggtattgaatgagtagataacaaatatttggagagagatttggaggaaccctggaagacaagagtaggctattggcaagggctacaagatggtagagacatccttgngctttgactctaattgaaaatacan

SEQ ID NO: 20253 - DNA, 1013 bp, Homo sapiens
  misc_feature 1, 2, 990, 991, 992, 993, 994, 995, 996, 997, 998, 999, 1000,1001, 1002, 1003, 1004, 1005, 1006, 1007, 1008, 1009, 1010,1011, 1012, 1013: n = A,T,C or G
nnccgcaagcagagtgtcacagctggctttcctcacttgggaaaggggtactgccagtctagcagcctcctctgtactcagccaggacacccagcgcgtgggacctgtttgtgtctgttttgcttcctggggaacggcacagtcactcaccctgccatttgcggaaatgacctggtgcactttgactgttaagcaatgcgttattgctgtagtcaaggttagtgcaagcaaggaaacattcccagtagggtattggtttccattttctgtctgggcttctgtcagaaacttgctaggactttagtggccaataaaaaagaaattctagcttgatcgacccacgcgtccggtaatgattgatgaggacatgactgcccgaattagcatggctgatgtcaagttctctttccaatgtcctggtcgcatgtatgcacctgcctgggtagcccccgaagctctgcagaagaagcctgaagacacaaacagacgctcagcagacatgtggagttttgcagtgcttctgtgggaactggtgacacgggaggtaccctttgctgacctctccaatatggagattggaatgaaggtggcattggaaggccttcggcctaccatcccaccaggtatttcccctcatgtgtgtaagctcatgaagatctgcatgaatgaagaccctgcaaagcgacccaaatttgacatgattgtgcctatccttgagaagatgcaggacaagtaggactggaaggtccttgcctgaactccagaggtgtcgggacatggttgggggaatgcacctccccaaagcagcaggcctctggttgcctcccccgcctccagtcatggtactaccccagccatggggtccatccccttcccccatccctaccactgtggccccaagaggggcgggctcagagctttgtcacttgccacatggtgtctcccaacatgggagggatcagccccgcctgtcacaataaagtttctcgnnnnnnnnnnnnnnnnnnnnnnnn

SEQ ID NO: 20254 - DNA, 1021 bp, Homo sapiens
  misc_feature 1, 1021: n = A,T,C or G
ncgagcggccgcccgggcaggtcggccttcccaacatggcgcagtctattaacatcacggagctgaatctgccgcagctagaaatgctcaagaaccagctggaccaggaagtggagttcttgtccacgtccattgctcagctcaaagtggtacagaccaagtatgtggaagccaaggactgtctgaacgtgctgaacaagagcaacgagggtatggggtaggcgggtgagggtaacctaaagtggcgaacctgcttctctcgtcccacctcctaacccagtttttcttacctgaaacgagaaaatccattacatatcgtataccgcttcatgaaccctttgcatgttgcctgcctagaattgaaaagtacaggacattcctctgctcctattgcccctgtttccgttcttttcacactgtctgtgggtgctgtgccctgttggaactctctttaacgtcttacgttggagccgctaaccttccccaggtgtttgtcttcattgctttcacagggaaagaattactcgtcccactgacgagttctatgtatgtccctgggaagctgcatgatgtggaacacgtgctcatcgatgtgggaactgggtactatgtagagaagacagctgaggatgccaaggacttcttcaagaggaagatagattttctaaccaagcagatggagaaaatccaaccagctcttcaggagaagcacgccatgaaacaggccgtcatggaaatgatgagtcagaagattcagcagctcacagccctgggggcagctcaggctactgctaaggcctgagagtttttgcagaaatggggcagagggacacccttgggcgtggttcctggtgatgggaagggtcttgggtttgccataagaataaatgtgccagcttgggcatacccattgcaagtaacatactcaggaaagaaaagaaggaaaccattaaatgttgttcctgcccgggcggccgaggtacatttttattatccttataccagttataacttcattcan

SEQ ID NO: 20255 - DNA, 952 bp, Homo sapiens
  misc_feature 1, 926, 927, 928, 929, 930, 931, 932, 933, 934, 935, 936,937, 938, 939, 940, 941, 942, 943, 944, 945, 946, 947, 948,949, 950, 951, 952: n = A,T,C or G
nccgtaattaggcagctgctttgtctgggagggggctttgtgtcgagtctccctgaatgagcagggctggcgacagttgtcaaaacacatggtgctttggtcagagcccccgtagaagccccttgtcctccgcatggcctccgcctgcacccggggcgtggaatgtgctcttgtgtgtccctggctgtctgcttgcttctacactggcccctgcagatggagggggtggggtacaggggttcctataagaagcagacacttggggtttttcccaggccctgttgcaggagggtgcgtgggctggtttccctgaaggcgcctgggcgtgttggtgttaactgatctgagatcttctgtggccctgatgtctatgagcatgccccagcttgcagggggctgagtagccgggcaccaccaggaggctgcgtgccctgtgcttgggtgtacccatgccctgtcagcatcgttggtctgttagggtcagggacttcggcttcttgtttagtaccctccatcccttccagttgatcatcagaaacattctccttaaatgcggctgcctgaccccggtgagggggcctgcctcccacttgccttccagcctcctctaagctgcactgagtcttaaaaataggaaggatagggctgggtgtggtggctcacgcctgtaatcccagcagtttgggagaccgaggcgggtagatcacttgaggccaggagttcaagaccagcctggccaacatggtaaaaccccatctctactaaaaagacaaaaattagatgggcatgttggcatacacccgtagtcccagctactcaggaggctgaggcatgagaatcgcttgaacccaggagggagagattgcagtgagctgagattgcgccacagcactccagcctgggtgacagagcgagactccttctcnnnnnnnnnnnnnnnnnnnnnnnnnnn

SEQ ID NO: 20256 - DNA, 3975 bp, Homo sapiens
  misc_feature 3973, 3974, 3975: n = A,T,C or G
cggcggcccaccctacgcgcacaagcgggcggcggcagcagtcgacagcgcgatggaggtggtgccggcgctggcggaggaggccgcgccggaggtagcgggcctcagctgcctcgtcaacctgccgggtgaggtgctggagtacatcctgtgctgcggctcgctgacggccgccgacatcggccgtgtctccagcacctgccggcggctgcgcgagctgtgccagagcagcgggaaggtgtggaaggagcagttccgggtgaggtggccttcccttatgaaacactacagccccaccgactacgtcaattggttggaagagtataaagttcggcaaaaagctgggttagaagcgcggaagattgtagcctcgttctcaaagaggttcttttcagagcacgttccttgtaatggcttcagtgacattgagaaccttgaaggaccagagattttttttgaggatgaactggtgtgtatcctaaatatggaaggaagaaaagctttgacctggaaatactacgcaaaaaaaattctttactacctgcggcaacagaagatcttaaataatcttaaggcctttcttcagcagccagatgactatgagtcgtatcttgaaggtgctgtatatattgaccagtactgcaatcctctctccgacatcagcctcaaagacatccaggcccaaattgacagcatcgtggagcttgtttgcaaaacccttcggggcataaacagtcgccaccccagcttggccttcaaggcaggtgaatcatccatgataatggaaatagaactccagagccaggtgctggatgccatgaactatgtcctttacgaccaactgaagttcaaggggaatcgaatggattactataatgccctcaacttatatatgcatcaggttttgattcgcagaacaggaatcccaatcagcatgtctctgctctatttgacaattgctcggcagttgggagtcccactggagcctgtcaacttcccaagtcacttcttattaaggtggtgccaaggcgcagaaggggcgaccctggacatctttgactacatctacatagatgcttttgggaaaggcaagcagctgacagtgaaagaatgcgagtacttgatcggccagcacgtgactgcagcactgtatggggtggtcaatgtcaagaaggtgttacagagaatggtgggaaacctgttaagcctggggaagcgggaaggcatcgaccagtcataccagctcctgagagactcgctggatctctatctggcaatgtacccggaccaggtgcagcttctcctcctccaagccaggctttacttccacctgggaatctggccagagaaggtgcttgacatcctccagcacatccaaaccctagacccggggcagcacggggcggtgggctacctggtgcagcacactctagagcacattgagcgcaaaaaggaggaggtgggcgtagaggtgaagctgcgctccgatgagaagcacagagatgtctgctactccatcgggctcattatgaagcataagaggtatggctataactgtgtgatctacggctgggaccccacctgcatgatgggacacgagtggatccggaacatgaacgtccacagcctgccgcacggccaccaccagcctttctataacgtgctggtggaggacggctcctgtcgatacgcagcccaagaaaacttggaatataacgtggagcctcaagaaatctcacaccctgacgtgggacgctatttctcagagtttactggcactcactacatcccaaacgcagagctggagatccggtatccagaagatctggagtttgtctatgaaacggtgcagaatatttacagtgcaaagaaagagaacatagatgagtaaagtctagagaggacattgcacctttgctgctgctgctatcttccaagagaacgggactccggaagaagacgtctccacggagccctcgggacctgctgcaccaggaaagccactccaccagtagtgctggttgcctcctactaagtttaaataccgtgtgctcttccccagctgcaaagacaatgttgctctccgcctacactagtgaattaatctgaaaggcactgtgtcagtggcatggcttgtatgcttgtcctgtggtgacagtttgtgacattctgtcttcatgaggtctcacagtcgacgctcctgtaatcattctttgtattcactccattcccctgtctgtctgcatttgtctcagaacatttccttggctggacagatggggttatgcatttgcaataatttccttctgatttctctgtggaacgtgttcggtcccgagtgaggactgtgtgtctttttaccctgaagttagttgcatattcagaggtaaagttgtgtgctatcttggcagcatcttagagatggagacattaacaagctaatggtaattagaatcatttgaatttatttttttctaatatgtgaaacacagatttcaagtgttttatcttttttttttaaatttaaatgggaatataacacagttttcccttccatattcctctcttgagtttatgcacatctctataaatcattagttttctattttattacataaaattcttttagaaaatgcaaatagtgaactttgtgaatggatttttccatactcatctacaattcctccattttaaatgactacttttattttttaatttaaaaaatctacttcagtatcatgagtaggtcttacatcagtgatgggttctttttgtagtgagacatacaaatctgatgttaatgtttgctcttagaagtcatactccatggtcttcaaagaccaaaaaatgaggttttgcttttgtaatcaggaaaaaaaaaaattaatgaaccttaaaaaaaaaaaaaaaggttttgaagggaaaaaaagtggtttcacacctcttgttattccttagagtcacttcaaggcctgtttgaatgtggcaggttagaaagagagagaatgtctttcatttgaagagtgttggacttgtgtgaaaggagatgtgcgtgttggaatctgcttttccaagccgccagggtcctgacggcagcaggacgaagcctgttgtggcgtcttctgggaaagcctgaccgtgtgttcggacggcactggctcctttccgaagttctcagtaactgagcccagagtaactgcacgcctttgtgcagctctggagctccaccaactctcggcctgccagttctcaagcgagctaatcttgtcattaatcgatagaagctaacttccgaagttaggacctagttactttgctctcaacatttaaaataatgcagttgctctagtgaatggggcgttaggggcctgtctctgcacctgtctgtccatctgcatgcagtattctcacccatgttgaatgcctgctgcttgtttaccctttggaaaccctggggtgaccaaggtttggaaagccacctgagaccacttcatagcaagggaaggctttaagcagttactagaaagagatggggatttggcccctggctcctccagcctgaatgagctatttaatccactgtccatgttcctcatcagtcaaatccaaagtcaaaggatttgaacctgcatctggaaacgtaaccactcacagcacctggcccgccaaggttgggaggattgtacactactttcatttaaaggggaaagttgaaacggggaaatcaatgaggagacggcgtatacaacactcgatcttgagagtgacagggtgtcaggagagaggagctttttaaagatagcggaagagagggtagtattggagaggggatatttaaagggaaagatatttaaggatagggggagacatgatatatgttagagggctaatagaggggtgggaaagtaatgagagaaaaaagagagaagtagagagagtagtattttacggaatatattagcttatatggtgnnn

SEQ ID NO: 20257 - DNA, 697 bp, Homo sapiens
  misc_feature 1, 2, 3, 4, 5, 6, 7, 697: n = A,T,C or G
nnnnnnngactacgttcgaggacgcggcgtggcacatactcgcagtaagtcgaggatcggctagcagtttgggtccttgagctgtgccgtgctcgcaggaagggcctggctccacgggcaggccctggtagcggagccgaggggatgagaggtcaggccggtcctgggggcagcaggcccggccacactccccaccgcgaccggggctctgggctcgcttcctgcttcagtttccccaagctcccgatgagactccgctactaccaccacgtcgataacgcaaacctagagggactcagggtaaactgaggcactcaaactgccgaggagctccgcctcccgagagacatttaatccggggggatttgcaggaaacttctaaattaagggtagcggctgctgcagctgagggggggcacaccggtccctgcgcccgggcagctgccgtgagctcacgccccgaaatagccccaggggccccagccgcagctgccactgggtccggctgtcactcagaggaagcacggagcccccagcccaagggtcccctccccttcgcatcgccggggtttttccagccgaccgtcggccactttttcctccgacggctggcagggaagagggggatgggggcgggaccccaagggaggcggtccccagtgggtgggcgaagggggcggccgctagactagtctan

SEQ ID NO: 20258 - DNA, 2980 bp, Homo sapiens
  misc_feature 1, 2, 3, 4, 5, 6, 2967, 2968, 2969, 2970, 2971, 2972, 2973,2974, 2975, 2976, 2977, 2978, 2979, 2980: n = A,T,C or G
nnnnnncaaaaaaaatacatagactgatgtttcagacttgtgcagcataagcctacagggtacgaagaatgaactctgagaatgtttggagaatgtttcatcattactaacaggatattcctcatgacattgctgtctgatctttgaccatcagtctgtgacctgccccttctctttacatgcagccgctctctgctccctgccccaatgaacatctgcactaggcccaagccttggagtaatttacctgaagagtgacaccattgattttgaaactactgaagaaacccaagacagctgaaaaccagaaggcatctgaggagaatgagattactcagccgggtggatccagcgccaagccgggccttccctgcctgaactttgaagctgttttgtctccagacccagccctcatccactcaacacattcactgacaaactctcacgctcacaccgggtcatctgattgtgacatcagttgcaaggggatgaccgagcgcattcacagcatcaaccttcacaacttcagcaattccgtgctcgagaccctcaacgagcagcgcaaccgtggccacttctgtgacgtaacggtgcgcatccacgggagcatgctgcgcgcacaccgctgcgtgctggcagccggcagccccttcttccaggacaaactgctgcttggctacagcgacatcgagatcccgtcggtggtgtcagtgcagtcagtgcaaaagctcattgacttcatgtacagcggcgtgctacgggtctcgcagtcggaagctctgcagatcctcacggccgccagcatcctgcagatcaaaacagtcatcgacgagtgcacgcgcatcgtgtcacagaacgtgggcgatgtgttcccggggatccaggactcgggccaggacacgccgcggggcactcccgagtcaggcacgtcaggccagagcagcgacacggagtcgggctacctgcagagccacccacagcacagcgtggacaggatctactcggcactctacgcgtgctccatgcagaatggcagcggcgagcgctctttttacagcggcgcagtggtcagccaccacgagactgcgctcggcctgccccgcgaccaccacatggaagaccccagctggatcacacgcatccatgagcgctcgcagcagatggagcgctacctgtccaccacccccgagaccacgcactgccgcaagcagccccggcctgtgcgcatccagaccctagtgggcaacatccacatcaagcaggagatggaggacgattacgactactacgggcagcaaagggtgcagatcctggaacgcaacgaatccgaggagtgcacggaagacacagaccaggccgagggcaccgagagtgagcccaaaggtgaaagcttcgactcgggcgtcagctcctccataggcaccgagcctgactcggtggagcagcagtttgggcctggggcggcgcgggacagccaggctgaacccacccaacccgagcaggctgcagaagcccccgctgagggtggtccgcagacaaaccagctagaaacaggtgcttcctctccggagagaagcaatgaagtggagatggacagcactgttatcactgtcagcaacagctccgacaagagcgtcctacaacagccttcggtcaacacgtccatcgggcagccattgccaagtacccagctctacttacgccagacagaaaccctcaccagcaacctgaggatgcctctgaccttgaccagcaacacgcaggtcattggcacagctggcaacacctacctgccagccctcttcactacccagcccgcgggcagtggccccaagcctttcctcttcagcctgccacagcccctggcaggccagcagacccagtttgtgacagtgtcccagcccggtctgtcgacctttactgcacagctgccagcgccacagcccctggcctcatccgcaggccacagcacagccagtgggcaaggcgaaaaaaagccttatgagtgcactctctgcaacaagactttcaccgccaaacagaactacgtcaagcacatgttcgtacacacaggtgagaagccccaccaatgcagcatctgttggcgctccttctccttaaaggattaccttatcaagcacatggtgacacacacaggagtgagggcataccagtgtagtatctgcaacaagcgcttcacccagaagagctccctcaacgtgcacatgcgcctccaccggggagagaagtcctacgagtgctacatctgcaaaaagaagttctctcacaagaccctcctggagcgacacgtggccctgcacagtgccagcaatgggaccccccctgcaggcacacccccaggtgcccgcgctggccccccaggcgtggtggcctgcacggaggggaccacttacgtctgctccgtctgcccagcaaagtttgaccaaatcgagcagttcaacgaccacatgaggatgcatgtgtctgacggataagtagtatctttctctctttcttatgaacaaaacaaaacaacaacaaaaaacaaacaaacaaaaaagctatggcactagaatttaagaaatgttttggtttcatttttactttctgtttttgtttttgtttcgtttcattttgtactacatgaagaactgttttttgcctgctggtacattacatttccggaggcttgggtgaataatagttttcccagtctccctcggatggtggccttaaggcctggtagtgcttcaagaggtccactggttggatctctagctactggcctctaaatacaacccttctttacaaaaaaatcttttaaaaaaaagtaaaaaaaaaaaaaaatttccacttgtgaagagcactacaaaaaatatataacaaaatctaaaaaaaaaaaaaaaaaaaaaaagaatatctcatgtactccacaaatatatatacctactgtgtacccacaaacannnnnnnnnnnnnn

SEQ ID NO: 20259 - DNA, 1166 bp, Homo sapiens
cgtccgttttttttttttttttgccatttgctatgttttattttgctagtagcttattaaacataacatgcaaataatcaaagagaaacataccaactgtgaatgaaaaccttgaaaactattacctggaggtcaatcaacttgagaagtttgacataaagagcttctgcaagatcctggggccattatcctactccaagatcaagcatttgcgtttggatggcaatcgcatctcagaaaccagtcttccaccggatatgtatgaatgtctacgtgttgctaacgaattcactcttaattaatatctgtatcctggaacaatattttatggttatgtttttctgtgtgtcagttttcatagtatccatattttattactgtttattacttccatgaattttaaaatctgagggaaatgttttgtaaacatttattttttttaaagaaaagatgaaaggcaggcctatttcatcacaagaacacacacatatacacgaatagacatcaaactcaatgctttatttgtaaatttagtgtttttttatttctactgtcaaatgatgtgcaaaaccttttactggttgcatggaaatcagccaagttttataatccttaaatcttaatgttcctcaaagcttggattaaatacatatggatgttactctcttgcaccaaattatcttgatacattcaaatttgtctggttaaaaaataggtggtagatattgaggccaagaatattgcaaaatacatgaagcttcatgcacttaaagaagtatttttagaataagaatttgcatacttacctagtgaaacttttctagaattatttttcactctaagtcatgtatgtttctctttgattatttgcatgttatgtttaataagctactagcaaaataaaacgagttgacccacgcgtccggacacaagaaaggaatataattcatacactattgcatttttaataaatcttttgaaatttgcagaattagattgtattgtgtattttcggttaaatgataattgaatgtaaatatttagatgcagcaccatattttataacccagctgtagcatttcttcatattttaaggaaaccccccacctccttcttttaagggcgcttcttgctctctgaaatgccctgctaaatgcttctcttaa

SEQ ID NO: 20260 - DNA, 913 bp, Homo sapiens
  misc_feature 1, 2, 912, 913: n = A,T,C or G
nnattggaggacccccgaaatttttccaataatcctgaattatcacaaaaagataagatttttaaagttatttggagggagtgtacacattgtttatttaatagtgagggctattatacaagcaaatcaatgtaaaataatccctttatatgtatgagcatagttaatttggtaaacaacagacaattacatactgtgatcataaggactttagtatcagttaccatatagcaggtactctttagtcaggatatacctatataggtgctaaattaaaaatcaaccttatatctcaaatttacttcctagtagagtgtaacgctgccataattgcaagcctaattatggggttgtccatactgcagtcccatcagtactcatacaccaaagggtcgggcctgtgaagactggaaaaagaataaaatatcttttgattgagatactacaagcaaaaatgactttctggctaccattactgcaaagaacaaaactcaactgaaaacaatatgtagcaattaaaaagtactcattatcttcaaaacacactttttaactaattgagactctaaattcattggttctactataattttataccctagtaattttatatgctaaaattcatttattaataggccatactttagttgaatagttggtaaataattttatttggactcatatgcaaatttttaaatacatattgagaagcatgcagacatcaacatttcctccctcttccacaaaaagaatttacagatgttagcaatttaggtatgacaaaagcaaaagatactttgtttttcaaagtggggcaagacgggaggaagaaaagatggtcataattagctagtagataaaagagtaaaagtgtgctcctcaatgaaaagactgtcagttaaaattcttcann

SEQ ID NO: 20261 - DNA, 2327 bp, Homo sapiens
  misc_feature 1, 2, 3, 4, 2327: n = A,T,C or G
nnnncgcggccgcgtcgaccggcggcgcggtcgctcgcgctggaagaagcggaagaagatggcgctcaccagctttttacctgcacctactcagctatctcaggaccagcttgaggctgaagaaaaggcaagatcccagagatcacggcagacctcactggtctcctcccgaagagaacctcccccgtacggataccggaaaggctggatacctcggttattagaggattttggagatggaggtgcttttccagagatccatgtggcccagtatccactggatatgggacgaaagaaaaaaatgtcgaatgcgctggccattcaggtggattctgaaggaaaaattaaatatgatgcaattgctcgacaaggacagtcaaaagacaaggtcatttatagcaaatacactgacctggttccaaaggaggttatgaatgcagatgatccagacctgcaaaggcccgatgaagaagctattaaagagataacagaaaagacaagagtagccttagaaaaatctgtatcacagaaggtcgccgcagccatgccagttcgagcagctgacaaattggctcctgctcagtatatccgatacacaccatctcagcaaggagtggcattcaactctggagctaaacagagggttattcggatggtagaaatgcagaaagatccaatggagcctccaaggttcaagattaataagaaaattccccggggaccaccttctcctcctgcgcctgtcatgcattctcctagccgaaagatgactgtaaaggaacaacaagagtggaagattcctccttgtatttctaactggaaaaatgcaaagggttatacaattccattagacaaacgtctggctgctgatggaagaggactacagacagtacacataaatgaaaatttcgccaaattggcagaagccctctacattgctgatcggaaggctcgtgaagctgtggaaatgcgtgcccaagtagagagaaaaatggctcagaaagaaaaggaaaaacatgaagagaaacttagagaaatggcccagaaagccagggagagaagagctgggatcaaaactcatgtggaaaaagaggatggggaggcacgtgagagggatgaaatccggcatgacaggcgaaaagagagacagcatgaccggaatctttccagggcagctcctgataagaggtcgaaacttcagagaaatgaaaatcgggatatcagtgaagttattgctctcggtgttcctaatcctcggacttccaatgaagttcagtatgaccaaaggctcttcaaccaatccaagggtatggacagtggatttgcaggtggagaagatgaaatttataatgtttatgatcaagcctggagaggtggtaaagatatggcccagagtatttataggcccagtaaaaatctggacaaggacatgtatggtgatgacctagaagccagaataaagaccaacagatttgttcccgacaaggagttttctggttcagaccgtagacagagaggccgagaaggaccagttcagtttgaggaagatccttttggtttggacaagtttttggaagaagccaaacagcatggtggctctaaaagaccctcagatagcagccgccccaaggaacacgagcatgaaggcaagaagaggaggaaggaataggcacaggtctctccaaagtgaatgaactcttacccataaccctaatgatgcaagtcatatgggggaacactttgtaaatggtcaggataaaaaccaaatctgggtgccagatcccagcactactttttattactggagaaatgggggggatagaaaattctactttgaattatttagttttttttaaagagtgggttgtgtttgtgcttctcccacctttcagcatttatagaacatgctgccccacatacaaagtcaagaccacttacttttatgtgacactagtagtttggggttaatgttttgtgtaagaacagctgcatatgagtaaagttaccccaaccacagtgaggaggaagatgttcacatactggaactgtcctgccaaataaattttgcccctattgtgctctgttttaatttggagtgggcaaagtaacctcttgcttggtgcaactatttgtttcaaataaaaacatttagacaaaaaaaaaaaaaaaaaactgggcggtcgtttacaacgtcgtgactgggccctggcgtaaccaacttaatcgccttgcagcaaattccctttccgcagctggcgaatagcgaagaggccgcacgatcgccttccgttggcagctgaatgggatggcaatggaagcgtattggn

SEQ ID NO: 20262 - DNA, 1491 bp, Homo sapiens
cgtccgcctactactactaaattcgcggccgcgtcgacttttttttttttttttatctggagactgagttttgcactcgttgcccaggctggagtgcaatggtgcgatctcagctcactgcagtctccacctcagcaggagagcaggaatcttcagtgatccacgggcagatctgcagccattgtgggcacctgttcctcccgcgacctttgtgcccacgtctctccctccagtacctattgcacgaccccccccacgtccgcctcctgccattgccagcaagtgccttgcgcgggtacctggctgcgcttattaatccattatggtcgctctgtcactggtgccattatgtgctcacgtgcccactccctcaggtttagaagtcgcgtcgcccggcaacagaacaatctgctggcttagcctttggccaagttggcagctggacgaggacgctcagagcccagctctcgagagttcaagtatccgacagttccccactgctcccaggagcggttacccgggcactctgtgcccctcattcctgtttgggccaaggccgaggacctgcgagtagggctcagttgcctggagccccttcagcccatcgcccagttcactttgcttgtgggatctccccgttgctcctgcccctggactgagtggcaggccatcctacaaacacccggacactcaacatcagtggtgtcaagacaactctaagaaggttttccgtgatcctgcaagacctgtgttccatcctggtgattctgtctccaatttcactgcacaggtaccacagtaagccagtgctgtgtgctccgaattccagggcatcccccagctcagccactacactgagcacaaggactctgtggggcccaggagcaggtagtcacccctttggggtcctcaacacccggctgtccccagacttgtgtccagggaagatagtgttgagggccctcaaggagagcagggcagggatgcctgagcaggacaaggaccccagagtccaagaaaatcctgctgatcagagaacggtccccgaggtcaccggggatgcacggtctgcattttggcccctgcgggacaatggaggcctctctccctttgtgcccaggcccgggcctctgcagacagacctccatgcccagagctcagaaatcagatataaccagacatcccagacatcctggacgagctcgagcaccaaacgaaatgctatctccagctcctacagctccacgggaggcttgccggggctaaagcagaggaggggaccagcctcatcccgctgccagctgaccctcagttactcaaagacagtgagtgaggacaggcctcaggctgtctcttcgggtcacacacggtgtgaaaaggcggcagatacagcaccagggcagacactcgcccccaggggtggctcccccagatcccaggcctctaggccccgtagacgcaagattcccggacgcgtgggtcgactcccta

SEQ ID NO: 20263 - DNA, 1238 bp, Homo sapiens
  misc_feature 1238: n = A,T,C or G
gctctccgatgcccagccctcctggaaccacctcgcctgtgacgtaggtggagcgcgcactgcctccgggcccgtctttctcaattgggaccggaaaacgttgtcgctcatcctatgacgcgaaagtaaccgagactatcaggatccggagacggaaatgtccgaaggccgcagtacttgaccctgtattttgggagtcgaacggagaatggaaactgaaagtggaaatcaggaaaaggtaatggaagaagaaagcactgaaaagaaaaaagaagttgaaaaaaagaaacggtcacgagttaaacaggtgcttgcagatattgctaagcaagtggacttctggtttggggatgcaaatcttcacaaggatagatttcttcgagaacagatagaaaaatctagagatggatatgttgatatatcactacttgtgtcttttaacaaaatgaaaaaattgactactgatgggaagttaattgccagagcattgagaagttcagctgttgtagagcttgatttggaaggcaccagaatccggaggaaaaaacctctgggggaaagaccaaaggatgaggatgaacgcacagtgtatgtggagttacttcccaaaaatgttaatcacagctggattgaaagagtatttgggaaatgtggcaatgttgtttatataagtataccacattataagtctactggagatccaaagggatttgcgtttgtggaatttgaaacaaaagaacaagcagcaaaagcaattgagtttcttaacaacccaccagaagaagcaccagaaacctggattttctaaaaaggaaatagccattcagttaatggggcgacacgccacaaacgagaagaggcggtgaaggggaaataccgcgaaagaaatgggcacgccactacgaagaagccaccccagggcggtggacggacccagcggacaaaaggtcgggcaggcggggggggaagtgtggctgtcccccggacaccacacgaaacaccactggggggctcgcaaagccacaaccaggatccagagctacacgagcaacacgcaacacgcagcagaagagccaaccacgcacagacaatcaagagtacacgacagaagcagacagaacacaaaacagacagcagagcaacgagcagaagcgcgaacgagagaccagcaagaacaagcaggaaacaagcgcacgcaaggacgacacgacgcaacgagacgacgaccaaacgacaan

SEQ ID NO: 20264 - DNA, 1235 bp, Homo sapiens
  misc_feature 1, 2, 3, 4, 5, 6, 7: n = A,T,C or G
nnnnnnnccaacaaacgtgaaaaggcggccaaccaaaagtgcccggcgggcccacccggcctcaaaaaggagccctaagacctgtcgcctaggactccaggctcatggcccccgaaataaatagggaatacgtgtcccaatgtcctttgtggttgcttagaagaattagtccaacggtccgctggggcctgcagaacaactgcagacgggacgggacagcacaagatgggacaaccagctgggaggcttggcccggccatagggctctcatgcggggacagtcccagctgctagtgtcgctgttgctgctactgacccgtgtccagcctgggacagacgtggccacccagagcttcacggccccacggacaaaccaggacatccctgctcctgccaacttctcccagaggggctactatctcacactgagggccaaccgggtgctgtaccagaccagaggccagctccatgtcctccgcgtcggcaatgatacccactgccaaccaacaaaaattggctgcaaccatcccctaccaggacccggcccctacagggtgaagttcctggtgatgaatgacgaaggacccgtggctgaaaccaagtggtccagcgacactcgcctgcagcaagcccaggcacttcgggctgtccccggcccccagagcccgggcaccgtggtcatcatcgccatcctgtctatcctcctggccgtcctcctcacggtcctcctggctgtgctcatatacacctgcttcaacagctgcaggagcacttccctatcaggcccagaggaggcagggagtgtgagaagatacaccacgcacctcgcgttcagcactcctgccgagggggcttcctgaggggttccagaggggcccacgtgtccctccacctcctccctggcccaggctgcagagcctgagctgggacacgccctgaagcttctggaccctgagagagattgtttcttttctttactattttttttttttttttctggcaacacggagtcccctctggtcgccaagggtgggcgacttgtggtcattggaacctctgccctcagcggttcaagcggatttccgtggtgacagcccctgagtggtggggctacggccaccccaccattgcccaggctcattttggttttagcgcgagtggcgtcgcccctgtgggccggggtgcgcactctttgacttgtgaccgcggatcggcccatgggggttcacgcgggc

SEQ ID NO: 20265 - DNA, 336 bp, Homo sapiens
  misc_feature 1, 2: n = A,T,C or G
nnactcacgctgctagaaaaggttagactaactgggagttcataatttgtcttggagatttaagaaagtttttgaagaggttttctgtgttgagatgaagaggaagattgagacaaagcacaatggagagtaggggagagagcacttcagaatgtttgaaggtgctaagaggaagtgcttgacacacgggaggaactgagaaagaaggctagggccatcggctggagggacaggacaggtggagatgtaagcatgggcctccagaccatggtaaggccactggatctttactttaatgcatttgtgcatgtgattaaaaaaaaaaaaaaaaaaaaa

SEQ ID NO: 20266 - DNA, 848 bp, Homo sapiens
  misc_feature 845, 846, 847, 848: n = A,T,C or G
cgcgtccgaaaaagacatatgtacaagtctatttcctatagcactatttgtaatacctagcactatttgtaatatctaaagactgtaaacaacgcaggtgcccacaaaaggaaaatggtttgacaaacttacgaacatccttttaaaggagtactagacaggtacaaaaaggaatgaagaatgtatatattactatggagtgaatcttcagggtatatgactaagtgaaaaaatgcaaggtgaagtagtatgtaacatatggtacagtttacttaagagagaaatacagatgtatatacacattacctaaagcaaaatgaggaccctactgggctgccatcccagctggactgctgctgtggagctcagcatcaagtacttccaggagaagcttcagcaggacctagaggcagagcatggtagaggtagaggatacagccctcataccaccgtgctgtatgtccatctttcaagtcctggtggtgcccgcagagtttgaagggaagccactgcttcagagataccaggtggtaaatgcatgcctagtggaagtgtgctcctctgcatctatgcctttgagcagaaagcctttgagtcccaattagtgggcccatgagtggccaaaatgagggactgggacctgtatagccgttaaactataaatcagggccaaaaaggaaagataaattataagtttaaagaaaatgggctaggcatggtgacttacacctctattcccaaaggaagctgaggcagaaggatcatttgaggtcaggagttcgaggttacagtgagctacaatcctgccaccgcacttatatgtgcaacagagcaagcactgtccnnnn

SEQ ID NO: 20267 - DNA, 455 bp, Homo sapiens
  misc_feature 453, 454, 455: n = A,T,C or G
gagtcgacccacgcgtccggagagagctgtctttgcagttactaggtttcatcaaacttgtttttttcagtatggtaggtttaaaaatggggatacatttttgtttttatttgcatttttaaatattttcttaggttagttggctacttaaatttctttttctgaaaactttgtatttatagccttttaaaattcttattgacttgcctgaactatttgtaaattacagaaattagccctttgtcgtatgtgttgcaggtgcttttccagtttgccagtggtcattcattttggtttatggtacttttgatagaccagaatctttgacttttatttagtgagatttatccatctttttctgtgtggcatcttggtattatagcattaatattctcttttcttttttttttttgtttacgagatggagtctgactctgccgcccaggctggcgnnn

SEQ ID NO: 20268 - DNA, 1840 bp, Homo sapiens
  misc_feature 1, 1840: n = A,T,C or G
ncatgacgagaccgcgctacttgtagcaacttacgagtttcagtggcggaacggaatatgcccggaattcggcgcatgcggtggggtctctccgggtaaagatggcggagcgcgggtacagcttttcgctgactacattcagcccgtctggtaaacttgtccagattgaatatgctttggctgctgtagctggaggagccccgtccgtgggaattaaagctgcaaatggtgtggtattagcaactgagaaaaaacagaaatccattctgtatgatgagcgaagtgtacacaaagtagaaccaattaccaagcatataggtttggtgtacagtggcatgggccccgattacagagtgcttgtgcacagagctcgaaaactagctcaacaatactatcttgtgtaccaagaacccattcctacagctcagctggtacagagagtagcttctgtgatgcaagaatatactcagtcaggtggtgttcgtccatttggagtttctttacttatttgtggttggaatgagggacgaccatatttatttcagtcagatccatctggagcttactttgcctggaaagctacagcaatgggaaagaactatgtgaatgggaagactttccttgagaaaagatataatgaagatctggaacttgaagatgccattcatacagccatcttaaccctaaaggaaagctttgaagggcaaatgacagaggataacatagaagttggaatctgcaatgaagctggatttaggaggcttactccaactgaagttaaggattacttggctgccatagcataacaatgaagtgactgaaaaatccagaatttcagataatctatctacttaaacatgtttaaagtatgttttgttttgcagactttttgcatacttatttctacatggtttaaatcgactgtttttaaaatgacacttataaatcctaataaactgttaaacccaccttccagccttttaggagttgctaaaattttaacagttatttcctgctttttatcacagttgatttctgaagactacattgccaagcagaatgatgaaatgactttttcgttgtcaggcaattttggttaagtcaaatcttaatgccctcttcgctatcagatgttgcctgtgtttccataaagcaaaatgctgattttggtaaaaaacatgactgcttctagagctgggaggatctgcagactttcacggattcatggaacaagaaaagaagcataggtacttttaggtgccattaggtattgatcagtgaaatcctagggtgctctatgagattgtactaggcctatgaagagtggtaagccaaataggtctccatcgggagaataccttcatgctaccttacctcaaccaatggcttggcctggttccctgattggttgttctccaccagctcaggttaaccctgttttcacacggaagcgcgggcttcttacgactttgttcgacttttttaattccagggagagcctaagtggctcgtaatcaccgggctacaagacctaacgtgggtcaaaccaacaacaacacaacaaacaaacaaaaagaagaggggccgctcaagagagaaacaccgaggagggcccgagaaaagcagcaccgctttctgggacacacagggcccccccacgacagagcataaaccagaaaacggccctcctaacacaaagacgggggcaaaacgaccgcatccggacgaactctcgcgggcgtcagcgccgcccaccaaactgcataaacagaccccactgatcgctaggaaccaaacaagcaaagaagcgacacgggcaagaccactagacaccaaccan

SEQ ID NO: 20269 - DNA, 3964 bp, Homo sapiens
  misc_feature 1, 3936, 3937, 3938, 3939, 3940, 3941, 3942, 3943, 3944,3945, 3946, 3947, 3948, 3949, 3950, 3951, 3952, 3953, 3954,3955, 3956, 3957, 3958, 3959, 3960, 3961, 3962, 3963, 3964: n = A,T,C or G
nccagattggggttttattcccacaagacctgaccctgcaaactccttggctgtccggaggaagagcaagtactgcggggatcccggcctactagcagaccctccggggccagctccgcctgctggagaatgatagccgggagatggcccgcgtgcttggggaattatcagccaggctgctgtccatccacagtgaccaggaccggatcgtggtgacgtttaagacttttgaagaaatctggaagttttccacctaccatgctctcggcttcactcatcactgcctggcaaacctgctcatggaccaggccttctggctgctcttgcccagtgaggaggaggagacggccatccaagtccatgtggatgagaacgccttaaggctgacccacgagagcctcctcatccaagaagggcccttctttgtcctgtgtcctgaccaccatgtgagagtgatgacgggtccccgggatgcaggaaatggcccccaggccctcaggcaggcttcgggggcaccccagggagaggcggccccggaaacagactcttcaccgccgagccccagcgtgtcctccgaggaggtggcagtggcggccgccccggagcctttgattccatttcatcagtgggctcttaggatcccccaggaccccatcgacgatgccatgggtggccctgtgatgcccggcaacccgctgatggctgtgggcctggcctcggcattggcagacttccagggctcggggcccgaagagatgaccttccgaggtggcgacctcatcgagatccttggggcgcaggtgcccagcctgccctggtgcgtgggccgacacgcagcctcgggccgggtggggtttgtgcggagcagcctcatcagcatgcagggccccgtgtccgagttggaaagtgcgatttttctcaatgaggaagaaaagtcattcttcagcgagggctgcttttctgaggaggatgccaggcagttgctgaggcggatgtcgggcaccgatgtctgcagcgtgtacagcctggactcagtagaggaagctgagaccgagcagccgcaggaaaaagaaatacctccaccttgcctgagcccggagccacaggagaccttgcagaaggtgaagaatgttctggaacaatgcaagacctgcccaggctgcccccaggagccagcgtcctggggtctctgtgcggcatccagcgacgtgagcttgcaggaccccgaggagccctccttctgcttggaagccgaggacgactgggaggacccagaggccctgagctcactgctgctgttcctgaacgcccctgggtacaaggccagcttccgtggcctgtacgatgtggcgctgccgtggctgagcagcgtgttccgcagcttcagcgacgaggaggagctgactgggcgcctggcacaggcccggggggcggccaagaaagctggcctcctcatggccctggccaggctctgcttcctcctggggcggctgtgcagcaggaggctcaagctgtcccaggcccgggtgtactttgaggaagcgctgggggccctggagggcagcttcggggacctgttcctggtggtggctgtgtacgccaacctggccagcatttaccggaagcagaagaaccgggagaagtgtgcacaggtggtgcccaaagccatggccctgctcctggggacgcccgaccacatctgcagcaccgaggcggagggggagctcctgcagctggcgctgcggcgggcggtgggtggccagagcctgcaggccgaggcccgggcctgcttcctgctggccaggcaccacgtgcacctcaagcagcccgaggaggccctgcccttcctagagcggctgctgcttttgcacagggactcgggagccccagaggccgcgtggctctcagactgctacctactcctggctgacatctacagccgcaagtgcctgccccacctggtgctgagctgtgtcaaggtggcctcattgcggacacggggctcgctggccggctcgctgaggagtgtgaacctggtgctccagaacgccccccagccccacagcctccctgcccaaacttcccactacctcaggcaagcgctggcctccctgaccccgggcacaggccaggcgctgcgcggccccctctacaccagcttggcccagctgtacagccaccatggctgccacggcccggccatcaccttcatgacgcaggcagtggaagccagtgctattgccggagtccgtgccatcgtggaccacctggtggccctggcctggctgcacgtgcttcatgggcagagcccggtggccctggacatcctgcagtctgtccgggatgcagtggtggccagcgaggaccaggagggcgtgattgccaacatggtggccgtggctctgaagaggacgggccggacgaggcaggcagctgagagctactaccgcgccctgcgggtggctcgggacctgggccagcaaaggaaccaggcagtggggctggccaacttcggggccctgtgcctgcatgcgggtgccagcaggctggcccagcactacctcctggaggccgtgcggctgttctcgaggctgccccttggggagtgtggccgggacttcacccacgtgctcctgcagctgggccatctctgcacccgccagggcccggcccagcagggcaagggctactacgagtgggcccttctggtcgccgtggagatgggccacgtggagagccagctgcgggccgtccagcggctgtgccacttctacagcgccgtcatgcccagcgaggcccagtgtgtcatctaccatgagctccagctctccctggcctgcaaggtggccgacaaggtgctggaggggcagctcctggagaccatcagccagctctacctgtccctgggcaccgagcgggcctacaaatccgcactggactacaccaaacgaagtctggggattttcattgacctccagaagaaagagaaggaggcgcatgcctggctgcaagcagggaagatctattacatcttgcggcagagcgagctggtggacctctacatccaggtggcacagaacgtggccctgtacacaggcgaccccaacctggggctggagctgtttgaggcggctggagacatcttcttcgacggggcctgggagcgggagaaagctgtgtccttctaccgggaccgggccctgcccctggcagtgactacgggcaaccgcaaggcggagctgcggctgtgcaacaagctggtggcactgctggccacgctggaggagccccaggagggcttggagtttgcccacatggccctagcactcagcatcactctgggggaccggctgaacgagcgcgtggcctaccaccggctggccgccctgcaacaccgactgggccatggcgagctggcagagcacttctacctcaaggccctgtcgctctgcaactcgccgctggagtttgacgaggagaccctctactacgtgaaggtgtacctggtgctcggtgacatcatcttctacgacctgaaggacccgtttgatgcagccgggtactaccagctggcgctggcggccgccgtggacctgggcaacaagaaggcacagctgaagatctacacgcggctggccaccatctaccacaacttcctcctggaccgtgagaagtcgctcttcttctaccagaaggccaggaccttcgccacagagctcaacgtccgcagggtcaacctgcctcctctgccactctgcgggtgggccccctggttggcccccagccaccctcgctgaggacagcatccaagggagtgggttttgtgcaagggctgggggtctcctgcctctcctcgtgtcgccggtggctcattttctggcaaatggaggcacgaacgcaggggccaaatagcaataaatgggttttgtttttttnnnnnnnnnnnnnnnnnnnnnnnnnnnnn

SEQ ID NO: 20270 - DNA, 703 bp, Homo sapiens
cgcgtccgcgtttttatgtgtgtatgtacaaaacaaaatacctttttgaaattacataagtgatacatgcttattgtgaaagagttggataatacaatatactgtaaagaagatgaaaaccactcataaattccaacctgtaaatactttcgtgttcatattttggcatctaatgtatcctttatgtatatttaaatatatattttattcaagtataggatcatgtacctccctgttttataattttcttttttaatttttcagtgtattgtggacatcttttctcatcaacaaatacatcccacaatgttcatttttgtgcctcattataccatggaatagtgacatcctagtatgtttaagacattccttattaatgaacaattaggctacttccaatttttaattataaaggacattttgaaggacttccttgtacatattattctattgctttatcatctttttgggataatttcatgtagtatatttccagttatttaaatgagaaagtacatggtttataacaaatggtatttaacgtccaagtcactgctatctaaaggggtaatttttaaggtataaaataatttggcttataaaaaatgcgtgggaaaaatatcctagaaatatttaaggattaacttctaaattgtaaattgacatatttaatgatagattcaaaaaaaaaaaaaaaaaaaaa

SEQ ID NO: 20271 - DNA, 862 bp, Homo sapiens
  misc_feature 1, 2, 5, 18, 43, 50, 63, 73, 94, 228, 859, 860, 861, 862: n = A,T,C or G
nnccncggaaaaggcctnccccgcccttacctaaaccccggancccctgnaagaatggagccntttataatancccaaatttacctgtccacanggagcctggtttgtgaaataatttaaatgtattaaggatgttttatatttagatcaccgattattaatgggacccgataggcaaatagcctaatattcccaaaaagcaaccttcctaagatgcctgcctggaantcttgaaagaactgagtttaggtctttgtcatatatacatcccggacgcgtgggtcggccatgaacaagttttcaagtatcagttgatttatgatataggcttatccatttggttataaaatcatatgtttattacataatcattgacaaatagtttctgtataataactggcagagtagctctaaaacatatgcaaggaaataaataaagaaaaaacttacaataaagagagtaactcatattttaacagttttgtgaaaaaaatagaaaatattttatgtagcttatagtacatatatttttttacaacagaagaatcgcattctgattttccatatggatcatttccctatgttgctagaccagtacactggcaacctggtcatacagcttttcttgtcaagttgaggaaggtcaaaccacaacttaactgagtactccagatgacagtaactgacttgaagatggaaaaatatcaaaatagaactttatattgaaaatcactgcttccatagattggcatttttagctattactatgacttatataacttatacatataatttttgaaaataacacctaaaagatgtataacatagcaaaactgcttaaacatcccattttgacacnnnn

SEQ ID NO: 20272 - DNA, 499 bp, Homo sapiens
  misc_feature 480, 481, 482, 483, 484, 485, 486, 487, 488, 489, 490, 491,492, 493, 494, 495, 496, 497, 498, 499: n = A,T,C or G
tcgacccacgcatccgacccacgcgtccgccagacctcacgtcaaccggctgcaccccactttccagcctgcgccccagatctgcagccttcgcccctagatacacccgcctggtgatgaggcgctcctcgcgttccttccgggctccaggtgtccgtgagcctcccttccgccctggcctccggtctctgccttgctcgtgcttctaccaccacccttcccctcccaacccggtggatcctctcgtctcccccagtctccagtgcaccggctttccctcgtcctctgcgcagtccatctcagctcatctctccaattcaatgccatcatctctcctcaccatctctcggtgccctggaatgtttgctgtcagatgtcccctgtgaaacccacaaacgcttgcgatttggcctccttgttttattttgtgtagtcctacaacgtcttgttactaccccctattacaacacttataactcnnnnnnnnnnnnnnnnnnnn

SEQ ID NO: 20273 - DNA, 954 bp, Homo sapiens
cacgcgtccgataatctttaattttggggcattttatcttctgtctcttccaagacagtactgctttctcagtgggaaaggttaattctggcttaacaaatacttattgaatgcctatcatgtactgggcagtgttctaggttctagggatttagcagtaaacaaaacagactaaatctttgtcttcacggaattgacattctagtggggaaaggatgataagtaagtaaatgtatgatataccaagtggtggaaaatgctatggataaacaacacatgggtgccgattcgcgattgccctggatgtcaaccacttcgccccggacgagctgacggtcaagaccaaggatggcgtggtggagatcaccggcaagcacgaggagcggcaggacgagcatggctacatctcccggtgcttcacgcggaaatacacgctgccccccggtgtggaccccacccaagtttcctcctccctgtcccctgagggcacactgaccgtggaggcccccatgcccaagctagccacgcagtccaacgagatcaccatcccagtcaccttcgagtcgcgggcccagcttgggggcccagaagctgcaaaatccgatgagactgccgccaagtaaagcccctagcttgagtcgacccacgcgtccgatttaaatatttgtcccattgtttgtgattaggatgtaagctttgtggaatgtaattaaccctgctttacgaagtcaccatattataataggaaaaacactgcctaggaggcaagagatctgaattccagttctgatgctgccactgtgtaaggaagtagttttataaaccatgggcaaatcatctgagctttctcatctgtaaagttagggagagggaataattagttgatctgtaaaaaaatcagcttcaaaacgttatggctaaatctgtagaatgtatgcccaattgctaaacgga

SEQ ID NO: 20274 - DNA, 732 bp, Homo sapiens
  misc_feature 706, 707, 708, 709, 710, 711, 712, 713, 714, 715, 716, 717,718, 719, 720, 721, 722, 723, 724, 725, 726, 727, 728, 729,730, 731, 732: n = A,T,C or G
cgacccacgcgtccgaaaaaccaaagcctgattgagatcttggaaccgctgtgcgccggccgaccctctaccaggggaccacccagccccgcgcggtggccgcctgcagaggcgggactgcgcttcgaggcttaaggtcgccagatcggaggcatcgctgtgttgtctgtgcggagaagccaaaaagtgattacgtctatttgcaagaccgttcatgttgttttcagttcatggtatgattaaaacccgatcctttgttaccatgccacttaggtacgaaaaaataattgtgtttgatagttggcagtcacccaaaaatatccaaaaagccatgaaacagtaaaggtaaacaagtaggaagtgaaaataatattcgtcctttgttttctttctggagtgctcaaaacaccctctcaaaccatttttctcagcatagaaccaagtgtggtcaggttaacagctaatatttacaagggaagaaacgacccctgagatatttagtcacttgttccggtgatcacagaaaatcggcgaagaaacacatgaaactgccaacgatctctctattgataacaaggataccgtgatttttatgtaatattaatctgagaagccaggattattttgtaggtattagctttacgaagatgcccttacatacaaagaaaaggataattttaaaactttcccagaaaaatggatggcnnnnnnnnnnnnnnnnnnnnnnnnnnn

SEQ ID NO: 20275 - DNA, 1807 bp, Homo sapiens
  misc_feature 1, 2, 1790, 1791, 1792, 1793, 1794, 1795, 1796, 1797, 1798,1799, 1800, 1801, 1802, 1803, 1804, 1805, 1806, 1807: n = A,T,C or G
nnccggcgagaagcctgggggtcctggctgaactgggctgggtgaagggggccccctgacccccttggggtccgggctgggctgggtgaggggcggtttccgacccccagccaggttcccaggcaggatgagctggggttggggtggctaggccgtgggccttgggagctgggcagtctgggctgggctgggctgggcagggcgccacatggaagctggaggagcaaccgggagcgctgggcgtggggtgcaaattgcccagtgccttctgtttcccaggcagctctgtggccatggatatgttccagaaggtagagaagatcggagagggcacctatggggtggtgtacaaggccaagaacagggagacagggcagctggtggccctgaagaagatcagactggatttggagatggagggggtcccaagcactgccatcagggagatctcgctgctcaaggaactgaagcaccccaacatcgtccgactgctggacgtggtgcacaacgagaggaagctctatctggtgtttgagttcctcagccaggacctgaagaagtacatggactccaccccaggctcagagctccccctgcacctcatcaagagctacctcttccagctgctgcagggggtgagtttctgccactcacatcgggtcatccaccgagacctgaagccccagaacctgctcatcaatgagttgggtgccatcaagctggctgacttcggcctggctcgcgccttcggggtgcccctgcgcacctacacccatgaggtggtgacactgtggtatcgcgcccccgagattctcttgggcagcaagttctataccacagctgtggatatctggagcattggttgcatctttgcagagatggtgactcgaaaagccctgtttcctggtgactctgagattgaccagctctttcgtatctttcgtatgctggggacacccagcgaagacacatggcccggggtcacccagctgcctgactataagggcagcttccctaagtggaccaggaagggactggaagagattgtgcccaatctggagccagagggcagggacctgctcatgcaactcctgcagtatgaccccagccagcggatcacagccaagactgccctggcccacccgtacttctcatcccctgagccctccccagctgcccgccagtatgtgctgcagcgattccgccattgagaatgtcaaggccacactcagatcctttctcgagcagcagctgctgccccagctgcctcctacccattgccaagagaggatgcatctggggagagcaaagcactaaggaattcagcatcagcctgcagagggctgagtctgggttagtcctgcccgcaggttagcgagatcctgtgttgttttttgggttggacggtgccgtttcaaaatagaggcacagatgctccatgcacgaggggtccccgggcactggaacaagtgccaagttgaaggcagggggcctgccagagctgggtgtgggtattcaggccctcacctgccctgcctgcagggccagaccctgaggaaagggcgccccctgctggtctttttggatttaaaatgtttgggggaagagttgagttccagttcagtcccaagttaaacaggagggagtgagggagaggagagagggcgttccccggatcccaggagagctgggctatgactgcaataaggagttgttccttcacctgagatgtgcttcttttggttcatttctggcttgacaacaagaaataaacgtggtatgttcctgannnnnnnnnnnnnnnnnn

SEQ ID NO: 20276 - DNA, 527 bp, Homo sapiens
  misc_feature 1, 2, 527: n = A,T,C or G
nnacactcatcaatagggttttatttttatttctttcctctacccccagaaacaagcctgttaattttttttccttctcctctggcgactgtgtgatgaatcctttcttgcgtgatcaggttgcggatagacttgtaagggtgtttgctgcatacagtgtaagcattgtgaccgccaataaacttcaatggtttctactgaaaaaaaaaaaaaaaaaaaaaggacgcgtctacttcccactgggtccctcccacaacacatggaatttcaagatgagatctgagtggggacacagccaacccaaatcaaagggatatccaaaatacccagaaaacattgaacaaattgacaggaataagttctcacctatcaataataactttgaatatgtgttaaattacctacctaaaagatagagacaggcttaatggataaaaaatgactcaacaacgtctacaagaaactcacttcacttgtaaagacacacacagactgaaagtgaagggattgaaaaagatatgccacan

SEQ ID NO: 20277 - DNA, 3322 bp, Homo sapiens
cgctgttgtggccacatcggcgtttgcacctcgctgtttttccttctcgcgcctttttttcgcgcccccttttttttttttcttgggggccccttccccgtgcgcccgccctctttccaggaaaaaagggatcctttcgccgcctgtgttaaagcgtgaccaccttggagccagcagcagatctctgacccagagttcaagacagcgttggcagcataattgggccctctctatggattaccaattagcagtgtggtggtgcgtgcctgtagtccccgctgttcggaaggctgaggtggaagaattgcttgagtttgggaggttgaggctgcagtgagtcgtgattgcaccactgcactcagccagggcgacagagcaagactgcctcaaaacagaaaagaaaacaaaggctaattctcaggctctacaccgaacctactggatcagaatccctggagctagggaccagaatctgtttattggtgattctgttgcatgcttttgcactattctaaaacctatgtgtgcatacacacacacacacacacacactcactctcttagcccttgttaacccttatcgatcctagacaaatgtatggggaacccatcagaggctattctttagggctagtgttcaatttgactgtttttaatatgaaagattatggatcacatttcaaacagatgtgaacgtggagagaataatacgatgtaccgcagtgtgtccatcactgttcttcagaaattcacattgggtcattttgttttagccatctctttccacattatcttctttttgttcttttaaatttcgggggtaatatgaagcaagcctcagctgggcagaccagagtctgttccctttttatatatcccggcgtcttagccgggtactcgtgtctgaatagtgagtaccttttgggcctggcactgggcaggccttcagctgggtcattctctacctggcgatggctttaggtgagttgtggagctcttttcacctttttgcctcatctgaaaatagttcctggccagaagggagaattggtgagaaaagtttcaacattttaagtctcatgctataagtttgcctgtcttttgtctttcaaggtgaagctattaaatttgttctcagctaccctccatgtcctagcagatagaggacttggtctgaccttcagggttgtgatggggcaggttgggaggtgggcggggagtctctgtggtctgggtgctgaggttgacccgatgggcaggtgaagaaaatcaccttctccattccccttgatttctttatcgtgtgccgcacgaggcatgctgaagggacacacacctttccccctttttatttacaaagtagagagctgagaaagacagctcatgttctgttttgttttgtacacattatctttctcaagagatgtgatgtccttaagtaaactgacctgccttcatggcttgtcctgtaatgaatgcgttcaagacagtgttttggggacaggaaagaggcattcttaggtaagcggcggtgggggatggggtggggtggagaggaaacccttctaggaagtagttcaatgaaaaacctaaaaatgcccaaataaacattcgcttacatattatatatcttgggcttctttttatgacagttcattcagggacccagtcagtaaacaggtagttaacttcgtgtaaccaagcaagggttttgtttatcttttttaaagtagaaaaaagtgaggctcaaactctctctttctccttgtcataactattggtttacagtctttatttgtttaaaagtaaagcacattgtatgtatttatttggcaatacatgaggccattaaaaccctgagcctaaggtaccacagttagtctcatttgcctcttgtcctgtgaactccacttagaatgtcattgaacttgggcagacataattctagtgtctgttccaaacgcactgtgtcacagaagctagaattaccattagaggcacaaacccctgagaatacacaagggggcacgcttccagtagatgtgttggggaaggaggagggcagaggggacaggggacaggattcagctttgtggtgggtcctgagggttcctaccaggggtagccaggatctgggaaacagatcagcgactctagtctgaagtggctgcctggttcgggggctgccttcagcaagattcaggcaggagagacggaaatagccaccttccaggcgtgagtcctggagataaaaatggattttaacctaggactgccgggagctggccctccgcggctgctcagactagggctgtgtgtgctggctctcgcctgtttccggtgtctaactggcttgtttctctttatggcttggcttcattccgacctggggtggggccacatccaacccactgcccactggctgtccgtctggcctgccccgcggttccaaccacagtggtgaagcagcgcttgcagatgtacaactcgcagcaccggtcagcaatcagctgcatccggacggtgtggaggaccgaggggttgggggccttctaccggagctacaccacgcagctgaccatgaacatccccttccagtccatccacttcatcacctatgagttcctgcaggagcaggtcaacccccaccggacctacaacccgcagtcccacatcatctcaggcgggctggccggggccctcgccgcgcgccacgacccccctggacgtctgtaagacccttctgaacactcaggagaacgtggccctctcgctggccaacatcagcggccggctgtccgggtatggccaatgccttccggacggtgtaccagctcaacggcctggccggcctacttcaaaggcatccaggcgcgtgtcatctaccagatgccctccaccgccatttcttggtctgtctatgagttcttcaagtactttctcaccaagcgccagctggaaaatcgagctccatactaaaggaagggatcatagaatcttttcttaaagtcattctctgcctgcatccagccccttgccctctcctcacacgtagatcatttttttttttttgcagggtgctgcctatgggccctctgctccccaatgccttagagagaggaggggacggcacggccgctcaccggaaggctgtgtgcggggacatccgaggtggtggtggacaggaaggacttgggaaggggagcgagaaattgctttttctcttcctccctgggcagaatgtagcttttctgcttcactgtggcagcctcctccctggatccttagatcccagaggagggaagaaaatttgcagtgactg

SEQ ID NO: 20278 - DNA, 1492 bp, Homo sapiens
  misc_feature 1, 2, 3, 4, 5, 6, 7, 8, 9, 10, 11, 12, 13, 14, 15, 16, 17,18, 1490, 1491, 1492: n = A,T,C or G
nnnnnnnnnnnnnnnnnnaagtgttgaacaaatggttttttatttaaaaaaaaaactttattaaagagatagtttggggcattttttctttacattattttaaaatgacaatatccttctatgttagaaatacaacaattttggaaatcatttctaaatatatttagcaccccactattcttaatgtcatgttacatgaaatttacataactagtttagaatcagcattactgggaaaaagacaatgttcctatataaattctactacatataatatatatatgctactgtttatgagaagggtcaataggataaagaaactttcaaaaaattatatacacatacacaaatacacaagaacattttatattcattattcaataatccttagaatgatgacaatgcttatatgtaaaaaataatttcactctagagcagattacaagtaaatttatctgccacatacgagaatctatttacttatgttatagcaacatctcttttctaaaataaaaacatggcaaatactcagcttgatcatctgcactatacaacagaatttactcggaatgaccttttgatcatttgcaaaaaattcaatttaatgttaatggatgaagatattatatcactgttggcaatatttataaaaatgtgcttatggctctggaagcaattcctaaaaagaggtagtaaatgttctgagacttcagaattgttagaaaaagttaagcttcagttggcgtttactgcatataagtatgttgacatatgttttcctgagcaaatggcttattctagatatatacgttggtatattcattgaaaattagatttattatgttataaaatgtgactaaaagcccatttaaagggcacatatctctcatcttttggttctaacgtgaagccaaatgaggacaggcgcatgattcagtttatacaataagaaaattgccccaaagtggatgaagcacacacatcagcagctcagccccactccgtacaatccaagtgcattcaacaagtgatatggtttggctgtgtccccacccaaatctcatcttgaattgtaactcccatgattcccacatgtctgtgggaggaacccggtgggaggtgatttaattatgggggtgggtctttcctgtgctgttctcctaatagtgaatgagtctcatgagatctgatggttttaaaaatgggggtttctctgcagaagctctctttttgcctcctgccatccacatacgatgtgacttgctcctctttgtcttccgctatgattgtgaggcctcctcagccatgtggaattgtaagttcaataaacctctttgttttgtaaattgcccagtcttgggtatgtcttcatcagcagcatgaaaatggactaatacaacaagtaaatcactgaacatttaatcccagcagttctcttttttcaaacttctcccgttgattttgtgtccccttctgtcgtcttctcgcannn

SEQ ID NO: 20279 - DNA, 1675 bp, Homo sapiens
  misc_feature 1, 2, 1675: n = A,T,C or G
nncgcatgacttggtaggtggtcttaactatggattggttggtgtttggctgttcagggtcagatgtctgtgttggtgcttctggctcctcgtattgttgataccaagtttctgcgcttgcgtcaagggatgtcaggatctcattcggtctcgctttagtagttggcatggatctctggtgatcgcgcagatccgatcttagagttagccgacatcttggtgctggtaacttggtgtgtgagttcaaatcgaaagtcatatgggtgtgatcctacctatgtcacgtgcagtgtacacacaggtcaattcaaggcagtgtatagggagagacccatagccctgggaattgattccagagacatcttgctgaagaaattgtgcttcagagtcaagagtccagatgttgttccataatcaaagatctagatttcatctccagagataaagagaacctgttatgtccttagaatgagaagaccagagaagaccaggggcaaggtttctgagggacttcaaggtacagaagatacacaaagtggcaccagcctcactagcactctcatttctcaagagccagaacatggtgaatacagtcaagttcagtgtatttgataatatcaatttgggccccaaatctctctcacagtcttcctgggagtctattcttcttccaaaagtgcaagctaagccttctgaagatggtaaagaacttggccgggtgtggtggctcatgcctgtaatcccagcactttaggaggctgaggctggaagattgcttgagcctaggagtttgaaaccagtctgagcaacatagtaagaccctgtctctattctaaaaaacaaaataagtaaaaaggactgtaggaggccaagacaggtacaggaggcaccacactaccctgttgacacagcctggatccagagttcagcagaccttgagacaatgaaaacaaacttagtaataatcatttttcaatcattgcagtaattattgatttggacaaaaatcaattgacgtcaaaaccttaaagtgacgtttctctgcctatggagtggtcattcttttattcctttagtttcataataaattttcttttacttaaaaaaacttatagtttgatgaagagtgagatatatacctcatctcaaagaatcttcacacacacacttattaattacaaaaggaaaatcagtaattttgcagtggagacatatggccaactccaccttacccaagtggctgaaagtcactgcaccagtaatggcacaaaccaatgtgagatgattcctgatatgatacactaaaaagggcactgtctcttctgcatgttgcagacaaaaagtgggtaagctgacactgaaactaataattaggcaatgtcaagcaaatacaaattcaggttgacagtctgcaaagtaacatccatgtactcttcaacaatggatcgaccctagctactcaggaggctgaggtggaataattgtttgaggccaggagttccagatcagcctgggcaacatcatgcgaccccatctctaaaaacatctttttaaaaatgagccaggtgtggtagcatgcacccgtagtctcagctactcaggagcctggaggcaggaggatggtttcaacataggaacatccaagtgctggaagctaagaatcgggctataaacn

SEQ ID NO: 20280 - DNA, 982 bp, Homo sapiens
  misc_feature 1, 2, 3: n = A,T,C or G
nnnatatagatcgattaaacgtccctaaagtattggcctgggccaatatcggcacagattggctgggcatctccaagaataaccggtaagttggattacaatgaaagtctgtaacttctttatgggtcagtgaaaaaggaaagaatgttgcacctgtctagtcccatagtcaagaggcttctggatcacaaagtcataactagacaggtttgttcttgtagttttctatccccagtctttgctccccagatggcagtagtttttagtaggaaagtgccattcctgtccttaaggcacagtctcatcagaagtctaatacctgggcaggtttataacatcctgagagccagcctgacattagacagaataccctttgtaatacattggaaatttttactcatgcctttttgtttaggataaataggtaagcacaaagagctcttcaaaatcagaaaaaacaataggagtccttccttgtcttttctgtgatctctgtccttgtttctgagactttctctaccattaagctctattttagctttcagttattctagtttgtttcccatggaatctgtcctaaactggtgtttttgtcagtgacagtcttgccagtcagcaatttctaacagcattttaaatgagtttgatgtacagtaaatattgatgacaatgacagcttttaactcttcaagtcacctaaagctattatgcaggaggatttagaagtcacattcataaaacccaagtgctatgggtgtattattcatgatagctggcccacaggtcatgaattgaggaggaatttgctttcaaaaagcaagaatgtccaacactgaaagtttatagttttatatttggaccttgaaaggtaagaaaaaaccaggttctccaaagttaggaatagggaactaatttatgaaacagccatcttaaaaaaaaaaaaaaaaaactgcggccgcaagcttattccctttagtagggt

SEQ ID NO: 20281 - DNA, 1257 bp, Homo sapiens
  misc_feature 1, 2, 1257: n = A,T,C or G
nngaatttaggtgacactatagaagagctatgacgtcgcatgcacgcgtacgtaagcttggatcctctagagcggccgcctactactactaaattcgcggccgcgtcgacttttttttttttttttttttttttttttgggggtgtcaacatttatttgcaaacatgtctatttgatttcaaatgaaaacgcttttgagtggatttaaaaacaaaacacatgcgggggagaaaagagaggctgacagacatgttagtaaacagcgaaatatttttgaaagctggatgcagatagctcagatgctagagggttgaaatggacagactttggctaggaagagatatgtgaatgttagcagagggacctttcttggggattaaggaatcaggaacacaaatttctcttctttccttcccaccagggctccatgccccccttactggaggaccaagaccttgttgccttcaatttacgggatcccagtgggatcctgatattttccatagtttcttaacaacatttcaagttaaatattaaaattattcgtagggtgtggagtgagccaagtgcaacacattgctgtcaggggtgttggctactccgccagctgttgaaaaaaggagaaagaaagagagcaaactgagatccacacaccccacacagtatgaccaaggcgccttctgacttcaggaaagccaggcagacggggatccctggatgctcacagcttggcagccgatattcactggagccagaacagtctgctctgaggcttgtctgcatccagaagttgcaggaaagttccacaacgtgtgaagacttcttttgtcctctctgtgggagagctggggaaataggattccttatagacttatcctccccacctctccaatgagcaaaggctgctaaaaacttctgaagcctgaatcccaaagctggaggctttctctctcctcccagtgatcggagcttctcagggtggggattgtctcatggttctggggccaaaggcagttccaggaaggaggtgagggtccgactctggagagaggcatttcagctctttggctcaggggttccatccttcagcggggcatccttgcagtctgctgcctgggtgccggtctccagacctggctctcttccctcgcgctcttcttcaagcttctgggactcagctgccaccgtggtgctcttgctggagtggcaccccatctcagagggacacagaggatccagtgcccttggatgttccan

SEQ ID NO: 20282 - DNA, 713 bp, Homo sapiens
  misc_feature 1, 713: n = A,T,C or G
ncgtccgatggattgtgtcatcacaggacggccctgctgcattggcaccaagggcaggtgtgagatcacctcccgggagtactgtgacttcatgaggggctacttccatgaggaggccacgctctgctctcaggtaggtctgcagagtgtccgtcgttcccctcccccagctactgtgatgctgatatgctgctctgcgcaggtgcactgcatggatgatgtgtgtgggctcctgccttttctcaaccccgaggtgcctgaccagttctaccgcctgtggctatccctcttcctgcacgccgggatcttgcactgcctggtgtccatctgcttccagatgactgtcctgcgggacctggagaagctggcaggctggcaccgcatagccatcatctacctgctgagtggtgtcaccggcaacctggccagtgccatcttcctgccataccgagcagaggtgggtcctgctggctcccagttcggcatcctggcctgcctcttcgtggagctcttccagagctggcagatcctggcgcggccctggcgtgccttcttcaagctgctggctgtggtgctcttcctcttcacctttgggctgctgccgtggattgacaactttgcccacatctcggggttcatcagtggcctctttctcttcttcgccttcttgccctacatcagctttggcaagtttgacctgtacaagcgcgtcn

SEQ ID NO: 20283 - DNA, 1048 bp, Homo sapiens
  misc_feature 1047, 1048: n = A,T,C or G
tccgcccactcgtccgctgggatacaagcatgtgccaccatgcctggccaacatggtgaaaccctgtctctacaaaaatacaaaaattggctgggtgtggtggcgggcgcctataatcctagctactagggaggccaaggtgggagatcgcttgagcccaggaggtggaggttgtagtgagccaagatgcaccacggcacgctagcctgggtgacacagcaagactccatctcaaaaaaaaaaaaaaaattactttcaacaaggcatatagtctcttgtaatatatatgtatactattacattgtacagaatctgtacttatgtttggtgtgtaatataccaattagttttatataatatcctcataagctattctaatttttgagagaaacacaaaaagttatagattgatagtctgtataatattagacaaaatagtaagctttataaaaagttatttttggtaaatggtaaggaatttggggtggaatgtgatgagattaaaatgtagctttggtataacttcatgtgtatttcaaaatatactgaacgtcaacatgatttgaataaagaaaatgtattttctacttgaaccacataacactgttatttaaaacagttttcggagtctataaacatttcctcaacattttttaaaaagtcttagttaaaggtactctgatatacagtagtgttctcaagtatagtcatgaatcttggtcaataataactagatgctcttaaaatgtgaggattcaggagacccacttctaaacagggattacctcttgaggtaagatggctgtgtgaactaaaattggttggttgccttttgggcggtgcaatatttagaccagtagggtttcgatattaagggggaagttaacaggcggtaaaggccaattttgacatttaggatatttggttgaaatggtgtaaaaaggggttatgagcgcaaaatgtatggtggtggaagacccatattttttgaggtatgtaacacgatgtttgaaaggatgataaaaaagcgggtggggtgagtgagann

SEQ ID NO: 20284 - DNA, 511 bp, Homo sapiens
  misc_feature 499, 500, 501, 502, 503, 504, 505, 506, 507, 508, 509, 510,511: n = A,T,C or G
cggagagagcccagggatgccttatggtcagaacaaatttatagacaacaaaagggaagtgacgtgcagaaatcagaagtgaggtacagaaacagctggactgattacagctcaacatttgccttttttgaacaaatctgaacactcagcagtgtatgagtggttgacgtatggctgctgtgattggccagacctcagctattgttacaggcacatactcttaagtcaggttttcaatcctatctgactataaagttaggttacagtttgtcctcatggactcaaatttagaagtatggcgtccttctcaggccatatttagttcagtttaacaagtgcatatggcttctgacaaaggtgtggcccctttaggactccaaagacgctgtcacttacatggtattcagggaagacacagaggatctgtgagcagcctgcagccaagctttgagatcatattgagatttttttgtaatatatgaggagtgttctggctccnnnnnnnnnnnnn

SEQ ID NO: 20285 - DNA, 850 bp, Homo sapiens
  misc_feature 1, 2, 3, 4, 5, 6, 7, 8, 9, 10, 11, 12, 13, 14, 94, 97, 98,99, 100, 101, 102, 103, 104, 105, 106, 107, 108, 109, 110,111, 112, 113, 114, 115, 116, 117, 118, 119, 120, 121, 122,123, 124, 125, 126, 127, 128, 129, 130, 131, 132, 133: n = A,T,C or G
  misc_feature 134, 135, 136, 137, 138, 139, 140, 141, 142, 143, 144, 145,146, 147, 148, 149, 150, 151, 152, 153, 154, 155, 156, 157,158, 159, 160, 161, 162, 163, 164, 165, 166, 167, 168, 850: n = A,T,C or G
nnnnnnnnnnnnnncccgttttgggggggtggggggggttttttttttcaaaaagttagggggcgcccccccttgtttttttttttagcccccnaannnnnnnnnnnnnnnnnnnnnnnnnnnnnnnnnnnnnnnnnnnnnnnnnnnnnnnnnnnnnnnnnnnnnnnnccaaactccagttaaactttatttgcaaacacagatggcggccacaatttgccacctgctggtgtagaacgtgtttttccacggttttgccaagaaatagtgtccaactgttaccaccatctcccttttttccccgattttcctgttggtggcttttaagtcccccgtccctgctttgccatgagagcagggactcccagtgtccctggcgccctgcagcttccatagccattcggggtgtgcgtgggtgctctgctcccagctctgtgagctcgcaggtcgatgcttctgacactgatctgtgcacatgtgtgtgcacacgcgtgtgctcgattgtgagcgcctgccgtggccctgggccgcggtgtgctgagcgggccagttcgctgccttccactgctgggccgggtcctgtctcctcagcattgtgtggccaggcacacgcgcctctgcgtctcaggtccctcacctggaagccaggtcagaggatggctgtggtggccctgggtgagctggcgccagctcctgcccttacatgcccttcctcttgcaggaacccaagacagaccaggatgaggagcattgccggaaagtctaccagtatctgaacacccccccgatgcctggggcactgggggccagcggaagcagcggccacgaactctctgcgctaagcggtaan

SEQ ID NO: 20286 - DNA, 337 bp, Homo sapiens
  misc_feature 1, 2, 3, 4, 5, 6, 7, 8, 9, 10, 329, 330, 331, 332, 333, 334,335, 336, 337: n = A,T,C or G
nnnnnnnnnnacatgagctgtcccgcctagtggcctgcgaaccctaacctccacaacaacctcatctcctccgaaggcctgcctgacgaggccttcgagtccctcacccagctgcagcacctctgcgtggctcacaacaagctctcagtggcccctcagtttctgcctccggtccctccgagtcgcggatctggctgccaaccaagtgatggagatcttccccctcacctttggggagaagccggcactcaggtccgtgtacctgcacaacaaccagctgagcaaccctggcctgtcccccgacgcctttcgcggtttcgaggccatcnnnnnnnnn

SEQ ID NO: 20287 - DNA, 568 bp, Homo sapiens
  misc_feature 558, 559, 560, 561, 562, 563, 564, 565, 566, 567, 568: n = A,T,C or G
acccacgcgtccgccgattttcaggtgccgtctgtcacccctttctttgactaggaaagggaactccctgaccccttgcacttcccgagtgaggcaatgcctcgccctgcttcagctcgcacatggtgcgcgcacccactgacctgcgcccactgtctggcactccgtagtgagatgaacccggtacctcagatggaaatgcagaaatcacccatcttctgcgtcactcaagctgggagctgtagaccggagctgttcctattcggccatcttggctcctccgctctatttgcagttcttaaagggctattgtactctctgggattgtacgaacttggactggattggaactgcaacagaaaatcttccaggcaagtgccaaagacttacatacacaacagggacagctgatgccaggcgcacacctatgggagctccttccaccctctgggaggctccttgagctgacaagtgtcctggagccctgaagaaactatcctcacagaatgacccaacaacatgggggcagacaccttttgcacatgggcagggcactgnnnnnnnnnnn

SEQ ID NO: 20288 - DNA, 1270 bp, Homo sapiens
  misc_feature 1, 2, 3, 4, 22, 1269, 1270: n = A,T,C or G
nnnncttcagaggtgccttagncgcttgccttgctctcaggatggcttctacaatgctagtcagtctcaggggattcagcagctgctgcaggccgagaagcgggcagccgagaaggtgtccgaggcccgcaaaagaaagaaccggaggctgaagcaggccaaagaagaagctcaggctgaaattgaacagtaccgcctgcagagggagaaagaattcaaggccaaggaagctgcggcattgggatcccgtggcagttgcagcactgaagtggagaaggagacccaggagaagatgaccatcctccagacatacttccggcagaacagggatgaagtcttggacaacctcttggcttttgtctgtgacattcggccagaaatccatgaaaactaccgcataaatggatagaagagagaagcacctgtgctgtggagtggcattttagatgccctcacgaatatgaagcttagcacagctctagttacattcttatgatatggcattaaattatttccatatattatataataggtccttccactttttggagagtagcaaatctagcttttttgtacagacttagaaattatctaaagatttcatctttttacctcatatttcttaggaatttaatggttatatgttgtctttttttcctatgtcttttggctcaagcaacatgtatatcagtgttgactttttctttcttagatctagtttaaaaaaaaaaaaaaccacataacaattctttgaagaaaggaagggattaaataatttttttccctaacactttcttgaaggtcaggggctttatctatgaaaaagtagtaaatagttctttgtaacctgtgtgaagcagcagccagccttaaagtagtccattcttgctaatggttagaacagtgaatactagtggaattgtttgggctgcttttagtttctcttaatcaaaattactagatgatagaattcaagaacttgttacatgtattacttggtgtatcgataatcatttaaaagtaaagactctgtcatgcaaaataaaaaaaaaaaaaaaaaaaattttcgggcgccggacccgaaattttcaaccttctgtgggggccgaccaggggttaggaacggccagcggacaagaaccggcggacgggcgggttccccaaaaagcggggcacggttgacacccaggctcggctcggtctaagtcctaccccccccgcgcgcgggaaacaaagccaaacacaaaccccacacacaacaacaatcann

SEQ ID NO: 20289 - DNA, 497 bp, Homo sapiens
  misc_feature 1, 2, 473, 474, 475, 476, 477, 478, 479, 480, 481, 482, 483,484, 485, 486, 487, 488, 489, 490, 491, 492, 493, 494, 495,496, 497: n = A,T,C or G
nnagcgtggtcgcggccgaggtactatgtgtcttcagagcatgcagaagtcctcgctggagtttcataaggccaatgagtgccaggagcgccctgttgagtgtaagttctgcaaactggacatgcagctcagcaagctggagctccacgagtcctactgtggcagccggacagagctctgccaaggctgtggccagttcatcatgcaccgcatgctcgcccagcacagagatgtctgtcggagtgaacaggcccagctcgggaaaggggaaagaatttcagctcctgaaagggaaatctactgtcattattgcaaccaaatgattccagaaaataagtatttacaccatatgggattcccagaccatgaggccaaagtaaatcctaatcccacacacaggaatggcatggacctgtgattttgagttttcaaggggcgtaagtttttattctccacacctcaaaatacccgannnnnnnnnnnnnnnnnnnnnnnnn

SEQ ID NO: 20290 - DNA, 1450 bp, Homo sapiens
  misc_feature 1, 2, 3, 4, 5, 6, 7, 1448, 1449, 1450: n = A,T,C or G
nnnnnnnaggaggacaggaaatgaacagaacggagctgaacaagttcagccacgtggattctccaaattcggaatgcacgggtgaggacgcgaccgatgaccagtttgaaagccccaagaaaaagtttaaattcaaattccctaagaagcaactcgccgctctcactcaagccattcgcaccggaactaaaacagggaagaagactttgcaagtggtagtctatgaagaagaggaagaggatggcaccctgaaacagcacaaagaagccaagcgcttcgaaatcgctaggtctcaacctgaagacacccctgaaaacacagtgaggaggcaagagcagcccagcatcgagagtacatctccgatttcaagaactgatgaaattagaaaaaacacctacagaacattggatagcctggagcagaccattaaacagctcgaaaatacaatcagtgaaatgagtcccaaagccctagttgatacctcatgttcttccaacagagattctgttgcaagttcatcccacatagcccaagaggcctctccccgacccttgctagttccggatgaaggtcccactgccctagagccccctacgtcgataccttcagcttcacgtaagggctccagcggggccccacagacgagcaggatgcctgtccccatgagtgccaagaacagacccggaaccctggacaaacccggcaagcagtccaaactgcaggatccccgccaatatcgtcaggctaatggaagtgctaagaaatctggtggggactttaagcctacttccccctccttacctgcttctaagattccagccctttctcccagctctgggaaaagcagttctctgccctcttctagtggtgacagctctaacctccctaatccacctgctactaaaccatcgattgcttctaaccctctcagcccccaaacaggaccacctgctcactctgcctccctcatcccttctgtctctaatggctctttgaagtttcagagcctcactcatacaggtaaaggtcaccatctttcattctcaccgcagagtcaaaatggccgagcaccccctcctttgtcattttcctcctcccctccttctcctgctcctcgtctcactgaatcaaggtgccagggcacaaggacatccatactcccagcctcaccagtacaggacagatggaagtcaagcaaagcaaccatcaaagaaagaactcttaaggtcaattctataggcccagtcggcttcctcacacaattccggctacaccatgtctcaccggcagtcctatgcgtcgggagctaagcactaggtacgcgtacaatcaggaggcgccgaggcggtctcaccagtgcaggtagtaccaacaaagggactgcaccagcctgggcacggtgcacacgcacagggcaggtgcactcgaggcgcggagcgacttctacnnn

SEQ ID NO: 20291 - DNA, 593 bp, Homo sapiens
  misc_feature 1, 2, 3, 4, 5, 6, 7, 8, 9, 10, 11, 12, 13, 14, 15, 16, 17: n = A,T,C or G
nnnnnnnnnnnnnnnnnaaacacacacataaatctaaagcaaagggtatgccaagattcagctggggccaggtctgacccccactctgagcatctcattagcttcccatcagtggaatacaatggagacatattccacttggtctggcaatgtcctcctggggtgatgaaaagggggcatgttggtgtagacagcaaagtcgtcctccttctggggagccaggttgatcacgttggaatatatggcatcagcatggcaggaaagatccgaggacttgtggggaaagttggtctgatgcctcagttgtttcttaaatagtcctgctgagtcctgcagtgttagtctctggcttcagggtggtgatgttctctcagtgacttgatgtatatactggaaacagttctcagtctgaggaaggtcagttgaagtccttactgtgcaagtctaaattttaaggaaaattagtcccgcgatgagtttcctcatgcttcagctgtgcgtggaccagtcagcttccgggtgtgactggagcagggcttgtcgtcttcttcagagtcactttgcaggggttggtgaagctgctcccatccatg

SEQ ID NO: 20292 - DNA, 1241 bp, Homo sapiens
  misc_feature 1, 2, 3, 4, 5, 1240, 1241: n = A,T,C or G
nnnnngaggcagtcgtgagtcctcttgtccttgagcgtcaaccttctttccctgaagtggctggggttcctgtttccttctttgattgacaacttgtgttaaccctcgcacatctctgggccaatttttgcttgtaagtctttccggagacccctggaatttaaatcattagcaccgcgcccttccccgaagagtcttcgaagggttgccgcttttcggtggcgcagttctcgcgagaaggtgactttctttctcggtatttcctggtttccagaatccttagcgcgaggcggaaaaaatatttctcccagcttgtgttgatgccgcgattttgactgagacttcttcccacgatttctgtttttgcttctccaaggaaaatggcagctcccgagcagccgcttgcgatatcaaggggatgcacgagctcctcctcgctttccccgcctcggggcgaccgaacccttctggtcaggcacctgccggctgagcttactgctgaggagaaagaggacttgctgaagtacttcggggctcagtctgtgcgggtcctgtcagataaggggcgactggtaagggcgcgcccctccggagtctcccgggaaggcatttgggaagtgaccggggagggggagcgctgacaagagtaaaatggaaacgagtggggaagatggacttgtgtgatgagagctcccccatcctacctcttttttatcaaaatatctgctctgcgaagtggagttttaatcggctcgagtctggattagtcatagcactgcagaaaagggcaagtgagaacgacaaagcagaagaatggaaattacgcttagttatattgagttttcggatccatcctgagagcctcacaacttttttgaatttggggttatttctcctggactcaagagtattcttacaaatgtgcatcacgggattttttaaagtcctacttcatttatagccaatgttacaactcgtcccttaacaatcagaggagcaagctacattggtgacttgcgttaattcactgccgaatttcactaggacaaagagccttctcctaaaatttcccgattacctctcctggggaccatccttcgggctgttagagtcctgtggtgggattcaccactccttggttgcttctatccacggatttcggactccctccttagataggaataggggggcagaccacagggtttcagtccccgagcgcgtcagcgtaaggccgcccagnn

SEQ ID NO: 20293 - DNA, 1487 bp, Homo sapiens
gtctggcttggcctgcgcacccggacctagaagccgggacgagccggggcagagccaggcgcgcggaagtctgaaggtgccctccagacacggccccgatgactgaactacagcaagatgtggaagacacaaagcctgcgaaagtgctcgggaagagggagagcaaacttggctcagcccactcagaggctgagaatggtgtggaggagaaaaagaaagcctgcaggtcgccaacagcccaatcccctaccccatctgtggaggcggactccccagaccagaagaaaatcattagcctatgtacaaggccaatatgcactttcacaagttgtttcttagtgtcccaacggaggaaccactgaagcaaagctttacctgtgctctacagaaagaaatactataccaaggaaagctctttgtatcagaaaactggatttgttttcattccaaagtctttggaaaagacacaaagatctctattccagctttctcggtaaccctaataaagaaaaccaaaactgctcttctagtgccaaacgccctgatcatagcaacagtcacagacaggtacatatttgtctccttactctccagagattcaacttacaaactactaaaatctgtgtgtggacacttagaaaatacaagtgttggtaacagtcccaatccatcttctgctgaaaacagtttccgagcagaccgcccttcatctctgcctctggatttcaatgatgaattctcagatctggatggagtggttcaacaaagaaggcaagacatggaaggatatagcagttctggttctcaaactcctgaatctgagaactctcgagatttccatgcgacagaatcccaaacagttctgaatgtctccaagggagaagcaaagccaactcgggcagatgcccatgtgaacagagtacctgaaggaaaagccaagagtctccctgtacagggtctgtcagaaactgttggaatcttacataaagtcaagtctcagaaatgtccgatgcttcaccatattcttatattctatgcaattgttgtctgtgcactaatcatctcgaccttctacatgagatacagaattaatactctggaggagcagctggggttactaacctccattgtggacacccataatactgaacaggcagcaccatctggcctgaggtcacaagtacaattcaatgtggaggttctctgtcaagagcttacagctaacatagtgaaattagaaaagatacaaaataacttacagaagttgcttgagaatggtgactgatcgaccagattgcttagggacatcggaatacctcctgtttccctttgaagaaggtgcttcctgaggcgttttgtttgagtgcaccctgctggtcagaggtgcaagcagatgagaatccagacattgcatgtggaggtctccagctcaggaaagtgaggagggaaatacttttggttcttgtgcaataagaagttgaccttga

SEQ ID NO: 20294 - DNA, 1151 bp, Homo sapiens
  misc_feature 1, 21, 44, 66, 85, 1150, 1151: n = A,T,C or G
nggccccaggttacacttatnctccgctcgttttgttgattgtngcgatacattcacacggaacanttgcctgttccgattaatncgctcactataggaatttgccctcgagccaagattcgcacgggcttccccaatctccctggtagcgtcagcgtcggaggcgcgaggcggtagtgacggtggcgtttccttgaggaagagtgagggttccaacttttctgcttatctgggaggtgttgggcgcggacagtcgagatgtcagagaaaaagcagccggtagacttaggtctgttagaggaagacgacgagtttgaagagttccctgccgaagactgggctggcttagatgaagatgaagatgcacatgtctgggaggataattgggatgatgacaatgtagaggatgacttctctaatcagttacgagctgaactagagaaacatggttataagatggagacttcatagcatccagaagaagtgttgaagtaacctaaacttgacctgcttaatacattctagggcagagaacccaggatgggacactaaaaaaatgtgtttatttcattatctgcttggatttatttgtgtttttgtaacacaaaaaataaatgttttgatataacaaaaacacaaccacgcagagcagcacaccaacaccgttgtgggggccgggcgggtggccctgagagaggttttcaagacccatctcggtgggggcgcgggggccctggagaaccggcaacatgggcaacaggggacccaagagagccccggcaacgacgaaggggcgggggtccccaccaaataaaaacacggccggggggagaccccgaggggttttagacaaaacaccaccagggggctccaggagaccaaaaggcagcacatacacagggggcgccagggagcctattaattacccgcccccgcccgtgggcgcggtagctgcgcacagagagacgatgcactaaacagcaagacaacaacaagcagcaacagaaaccagcagcgagcagaggacaacaagaaccagcaacaagcagaaggaaagagagagaagaacacgccacaaagcagaagagacagcacaaagaagcacagacgacaataaagcacagacagaatacaacgacagacgaaagcnn

SEQ ID NO: 20295 - DNA, 899 bp, Homo sapiens
cgaaagtcttctagaattaattaacgcggggccccttcaggcaggaagtgtcggcgccgccactgtccggccacagcctaacgctcttcgctgtcgtttgtggtctcgcgcagggcggccccggttctggtgtttggcgtcggaattaaacaaccaccatgtcgagcaaaaaggcaaagaccaagaccaccaagaagcgccctcagcgtgcaacatccaatgtgtttgccatgtttgaccagtcacagattcaggagttcaaagaggccttcaacatgattgatcagaacagagatggcttcatcgacaaggaagatttgcatgatatgcttgcttctctagggaagaatcccactgatgcataccttgatgccatgatgaatgaggccccagggcccatcaatttcaccatgttcctgaccatgtttggtgagaagttaaatggcacagatcctgaagatgtcatcagaaacgccctttgcttgctttgatgaagaaggcaacaggcaccattcaggaagattacctaagagagactggatgacaaccaatgcgggggatcggcgttcaaagatgaggagcgtggaatgagctgtacacgagacgcgcactatagcaccaacaggggcgatgaattacaatcgaggttcaaaacgcatcctggaaaagcggagcccaggaaaagatgacttaagaacttagctaaaaccgtcagacatggtctgaacaaaactatcagaagatgcccagcccatgaacgttgagacatgatacagatagccatactgagcttaccaactctgccagcatgtaacacgaaggcggggctgagcgaaacgcgcacagtacgcaaaagacgaagaaacagaaactgatagcaaacaaaaggaacaaactgc

SEQ ID NO: 20296 - DNA, 1735 bp, Homo sapiens
  misc_feature 1726, 1727, 1728, 1729, 1730, 1731, 1732, 1733, 1734, 1735: n = A,T,C or G
acgcgggggatttgcaaaaggaaagtgcaaagacagctcctcccttctgaggaaacgaaaccaacagcagtccaagctcagtcagcagaagagataaaagcaaacaggtctgggaggcagttctgttgccactctctctcctgtcaatgatggatctcagaaataccccagccaaatctctggacaagttcattgaagactatctcttgccagacacgtgtttccgcatgcaaatcaaccatgccattgacatcatctgtgggttcctgaaggaaaggtgcttccgaggtagctcctaccctgtgtgtgtgtccaaggtggtaaagggtggctcctcaggcaagggcaccaccctcagaggccgatctgacgctgacctggttgtcttcctcagtcctctcaccacttttcaggatcagttaaatcgccggggagagttcatccaggaaattaggagacagctggaagcctgtcaaagagagagagcattttccgtgaagtttgaggtccaggctccacgctggggcaacccccgtgcgctcagcttcgtactgagttcgctccagctcggggagggggtggagttcgatgtgctgcctgcctttgatgccctgggtcagttgactggcggctataaacctaacccccaaatctatgtcaagctcatcgaggagtgcaccgacctgcagaaagagggcgagttctccacctgcttcacagaactacagagagacttcctgaagcagcgccccaccaagctcaagagcctcatccgcctagtcaagcactggtaccaaaattgtaagaagaagcttgggaagctgccacctcagtatgccctggagctcctgacggtctatgcttgggagcgagggagcatgaaaacacatttcaacacagcccagggatttcggacggtcttggaattagtcataaactaccagcaactctgcatctactggacaaagtattatgactttaaaaaccccattattgaaaagtacctgagaaggcagctcacgaaacccaggcctgtgatcctggacccggcggaccctacaggaaacttgggtggtggagacccaaagggttggaggcagctggcacaagaggctgaggcctggctgaattacccatgctttaagaattgggatgggtccccagtgagctcctggattctgctggctgaaagcaacagtgcagacgatgagaccgacgatcccaggaggtatcagaaatatggttacattggaacacatgagtaccctcatttctctcatagacccagcacactccaggcagcatccaccccacaggcagaagaggactggacctgcaccatcctctgaatgccagtgcatcttgggggaaagggctccagtgttatctggaccagttccttcattttcaggtgggactcttgatccagagaggacaaagctcctcagtgagctggtgtataatccaggacagaacccaggtctcctgactcctggccttctatgccctctatcctatcatagataacattctccacagcctcacttcattccacctattctctgaaaatattccctgagagagaacagagagatttagataagagaatgaaattccagccttgactttcttctgtgcacctgatgggagggtaatgtctaatgtattatcaataacaataaaaataaagcaaataccaataaaaactgcaaaaaaaatacccagnnnnnnnnnn

SEQ ID NO: 20297 - DNA, 183 bp, Homo sapiens
ccctttcgagcggccgcccgggcaggtacactcggaaatggaaggcgatgtctgagtcttccttcatctcggtatggaaatccacctgcagctgtgggtccatgacgaaagggatgatcggtgtccctgtgattatcacacaagaaccagtagacaaggacacaggccgtgtgtgtggtacct

SEQ ID NO: 20298 - DNA, 2278 bp, Homo sapiens
cgcgtccgcctgacgtcagcgtcgcgcgcagcgcagtgacgaaatcggctggtttatattggcgcggcccagacggcagaggtctctgcggcgcgtgggctcggagacacgcggcggtgtcctgtgttggccatggccgactacctgattagtgggggcacgtcctacgtgccagacgacggactcacagcacagcagctcttcaactgcggagacggcctcacctacaatgactttctcattctccctgggtacctcgacttcactgcagaccaggtggacctgacttctgctctgaccaagaaaatcactcttaagaccccactggtttcctctcccatggacacagtcacagaggctgggatggccatagcaatggcgcttacaggcggtattggcttcatccaccacaactgtacacctgaattccaggccaatgaagttcggaaagtgaagaaatatgaacagggattcatcacagaccctgtggtcctcagccccaaggatcgcgtgcgggatgtttttgaggccaaggcccggcatggtttctgcggtatcccaatcacagacacaggccggatggggagccgcttggtgggcatcatctcctccagggacattgattttctcaaagaggaggaacatgactgtttcttggaagagataatgacaaagagggaagacttggtggtagcccctgcaggcatcacactgaaggaggcaaatgaaattctgcagcgcagcaagaagggaaagttgcccattgtaaatgaagatgatgagcttgtggccatcattgcccggacagacctgaagaagaatcgggactacccactagcctccaaagatgccaagaaacagctgctgtgtggggcagccattggcactcatgaggatgacaagtataggctggacttgctcgcccaggctggtgtggatgtagtggttttggactcttcccagggaaattccatcttccagatcaatatgatcaagtacatcaaagacaaataccctaatctccaagtcattggaggcaatgtggtcactgctgcccaggccgagaacctcattgatgcaggtgtggatgccctgcgggtgggcatgggaagtggctccatctgcattacgcaggaagtgctggcctgtgggcggccccaagcaacagcagtgtacaaggtgtcagagtatgcacggcgctttggtgttccggtcattgctgatggaggaatccaaaatgtgggtcatattgcgaaagccttggcccttggggcctccacagtcatgatgggctctctcctggctgccaccactgaggcccctggtgaatacttcttttccgatgggatccggctaaagaaatatcgcggtatgggttctctcgatgccatggacaagcacctcagcagccagaacagatatttcagtgaagctgacaaaatcaaagtggcccagggagtgtctggtgctgtgcaggacaaagggtcaatccacaaatttgtcccttacctgattgctggcatccaacactcatgccaggacattggtgccaagagcttgacccaagtccgagccatgatgtactctggggagcttaagtttgagaagagaacgtcctcagcccaggtggaaggtggcgtccatagcctccattcgtatgagaagcggcttttctgaaaagggatccagcacacctcctcggtttttttttcaataaaagtttagaaagaaaaaaaaaaaaaaaaaaaaaaaaaaaaaaaaaaaaaaaaaaaaaaaaaaaaaaaaaaaaaaccaccccaccccacttctcctccccccaccccccccggggagtttgggggggggcccaaccaagaagggccgccgcgaggaggggggcggagggaggggcgaccaacagaaagagctgtgagggaggccccccaacggaggaagtgtggggacacgagagaggaagaagagagcaccgcgagagggattcacccgaaataccaaaaaacggcgggggaaaaaagggaggaggaggagacgaggggagacccaagagcgggagtgtgtgtaacaacacccggacgcaccaccccgcgggagggagactacctatgaacaacacacccgggagggaagggcgggtggcggggaccacaccgaaaaaagacagcgacccgagaaaaaaaaaaacgggtaacacccacgagtggcgaaatttgtgggccacaaggggagaacaacggaatacaaaagaagagaacagcccgcgccaaacacaaaagggaca

SEQ ID NO: 20299 - DNA, 2747 bp, Homo sapiens
gtccgccagtacagggtacgaaaagaacacagaagctgccagggatgctatactgagaattgtgggtgaacttgagcagatggtttctgaggacgtcccgctggaccaccgcgttcacgcccgcatcattggtgcccgcggcaaagccattcgcaaaatcatggacgaattcaaggtggacattcgcttcccacagagcggagccccagaccccaactgcgtcactgtgacggggctcccagagaatgtggaggaagccatcgaccacatcctcaatctggaggaggaatacgtgagtctctgtgggccttggagccctgaggcgccctggcacgtccaccggcctgaggccccagccaggagctacaggggacaagctagctgacgtggtggacagtgaggcgctgcaggtatacatgaaacccccagcacacgaagaggccaaggcaccttccagaggctttgtggtgcgggacgcaccctggaccgccagcagcagtgagaaggctcctgacatgagcagctctgaggaatttcccagctttggggctcaggtggctcccaagaccctcccttggggccccaaacgataatgatcaaaaagaacagaaccctctccagcctgctgacccaaacccaaccacacaatggtttgtctcaatctgacccagcggctggaccctccgtaaattgttgacgctcttcccccttcccgaggtcccgcagggagcctagcgcctggctgtgtgtgcggccgctcctccaggcctggccgtgcccgctcaggacctgctccactgtttaacactaaaccaaggtcatgagcattcgtgctaagataacagactccagctcctggtccacccggcatgtcagtcagcactctggccttcatcacgagagctccgcagccgtggctaggattccacttcctgtgtcatgacctcaggaaataaacgtccttgactttataaaagccaaacgtttgccctcttcctttcccacctccctcctgccagtttcccttggtccagacagtcctgtttgtggagtgcaatcagcctcctccagctgccagagcgcctcagcacaggtgtcagggtgcaaggaagacctggcaatggacagcaggaggcaggttcctggagctggggggtgacctgagaggcagagggtgacgggttctcaggcagtcctgattttacctgccgtggggtctgaaagcaccaagggtccctgcccctacctccactgccagaccctcagcctgaggtctggtgagtggagcctggaggcaaggtggtaggcaccatctgggtcccctgtggccgtcacagtgtctgctgtgattgagatgcgcacaggttgggggaggtagggccttacgcttgtcctcagtgggggcagtttgccttagatgacagctgggctgcttcttcacaccacctgcagcccctccctgcccctgccctagcctgctgtgtgttcagttgccttctttctacctcagccggcgtggagtggtctctgtgcagttagtgccaccccacacacccgtctcttgattgagatgtttctggtggttatgggtttcccgtggagctgggggtgggcgccgtgtacctaagctggaggctggcgctctccctcagcacaggtgggtcagtggccagcaggcccatctggagtgggagtgggcacttccaccccgcccacaggccatccggctgtgcaggccagcccctaggagcaggtcccgggtgactggcagttttcacggtctagggccgagacgatggcatggggcctagagcatgaggtagagcagaatgcagaccacgccgctggatgccgagagaccctgctctccgagggaggcatctgtgtcatgctgtgagggctgaggacggggccctagtctctggttttctggtcttaacatccttatctgtgtccgccacggaggtgactgagctgctagcgagttgtcctgtcccagggtacttgagttttggaaaagctgactcacgcccatccatctcacagcccttccctgggggacagtcgcttccgccttgacacctcactctcagttgaataactcaagcttggtcatcttcagactcgaattcttgagtagacccagacggcttagcccaagtctagttgcagctgcctcggcaagtccccatttgctcaggcagccctgaatgggcctgtttacaggaatggtaaattgggattggaaggaatatagcttccagcttcataggctagggtgaccacggcttaggaaacagggaaagaaagcaaggcccttttcctgcctttcccgggatctgtctactccacctccacgggggaggccagtggggaagggctgtcacctcttccccatctgcatgagttctggaactctgtcctgttggctgcttgcttccagctccccccaatctccatcgcagcgggttcctcctgtcttttctacagtgtcatttgcacatctctgtatgtcgcttgatgtcttagacgcgagccctttcctaaactgttcagcgctctcttttcctttgggtggttgttgcaagggtgatgacatgactgtccccaggcctgtctccctgaagcgtctgtgctgtcaggacagccctgggcagagatgaggcaggggtgaagcgtgcgtgtgcttttcctccttgttggatgtctttcatatcatctgtttccatagctacaatccatccctc

SEQ ID NO: 20300 - DNA, 539 bp, Homo sapiens
  misc_feature 1, 2, 3, 4, 5, 6, 7, 539: n = A,T,C or G
nnnnnnnacaaagggtagaattaatattttatggtcatttataatcagatggcagttgggtatagactctccacacttcatagttttttgcaaattaaaaaaggtacaggttttaaccagctggtagctggtcacacttttcagagcatgattaggcatattcagtaatagaggcttcaagcttttccttgttagcgccggagaactccccccccttttgaccctttttatagagctggaaggtcggcatgcatttgacttcacagtctgcagcaacatcctggcagtcatccacatccacttcaaggaacgccacattggaatacttgtcacagagggaatggaagaagggcttgatcattttgcaaggtccacaccacgtagcagagaagtccaccacgacaagcttgtctcccgcggcggccagggcctcctgaaaagcttccttgctctcgatcagcttcaccattttggctgttgcggggagggagccacacgcgtctcagcagaaccagatggaaatggatccaaggccggan

SEQ ID NO: 20301 - DNA, 18968 bp, Homo sapiens
  misc_feature 7860, 7953, 8503, 8504, 8506, 8532, 8560, 8564, 8584, 8643,8644, 8779, 8986, 9621, 9678, 9727, 9843, 9922, 9948, 9972,9976, 9977, 9983, 10551, 10564, 11691: n = A,T,C or G
ccacgcgtccggtgctaacagtaatttatacatttttaaatgttctgagtatgttttgactgggctagtgtaacaatatactaccctgaaagtgcagttttgattgttgttggtgtctttgggtcaggaaagtgaactgtgccaagaagtatttttcagtgacatgaatggattcctgttaatgcaattgactgagagattgtgcttacgctttcttaactgacaaaaagaggctttgtccaacatcagaattgttgaaactggtgctgttttctgttgcactgggattctgatgatctgggattttccctccttggcacagtaaacaccatgactgtctttactgagaatgtcgtcacagtcctttagtgatagattagttagacccatggttgcaatacctttatctccccaaagaaaataatcaaaagaaagcacaaaagctaccctgtttgcagaatatttcactgacattgatttgtcattaattctaccagagctgacctcattcaggcttgatagaaacaggttcctatgtttagggcagatccctagcctctcgctcacagtgagtctgcatgtcctagattctggttattgctggagcatccattaaagtctaccaaactcaggacagaagaagatagcagtggatttgtaaaaatttttagtttataaattacagtcattggggaaacactagtaaggtcatgtgatcttttggaccaggattttctctctgtcttctctctgggtgtgtgtgtgtgtatgtacagaagggctaccaggaagtgtcaaccatgttagattttctgtagtcttccagaaacagtgcagcccatacaacaggaatcttaattttcctcacagcaaatataacaggatggaacagttagtgtttgttttcacaagtgtccaccactccatctgccctgcatggagagggctctctcactgctagatctaggctgagccatctggaaggatcaaagggtgtgggagtatcaccccctctcaggctgcagaaggtctcgagggtggcgtcacagcaggatttccgccttctgcattgcactgcacagccccatggaacatgaggcacttgaggccttgcttcttggagcctctggggagcagagtaggtcactgccctctgggagtgttttgcagtagttttgtaaatgtgttgctacatagtcaagttcctttgtggcaaagaaatattttgttttgatattaggagccagcccatgtaatgcctctcaggcttgcttgcttagaagaaaaaagtcaccctttgtggtttttaagaaaaaaaaattctgtgcagatctgttcctcctcctgctccttcccttttctctacatacagtgctcattggaggctcctgctaaaccttcttaaccagagaaataataggtatttgttagacctgagtgtacatttcacatgttatccttcacatatttctcattttcatctagtactttcttaatgcctttgttggagtccgcatcctcatctttaaaaaaaaaaaaaaaaaaacagcttagcctaagccacattcactttttttagttcacaaaaaggatttaatagccacaatgtgatttttgccacaactgtgtgattttaatattctctaatatcaagggcggatttagaattgcaggaaatacctggagaaatcacagtggaatgaatttttgctttaagagaaatgagagttggctgtctctgtaattgataatacagcttcatcctagtcccatctgcatttcagaaaataaccctcatctttacaaaacacaggacacttgtgggacagttaactcaagcagctatggggagggaggagattattgaatggtgattaaataatgcaaatggctcttctgtttcttaaagactgtggaagaggtcagactgcccagttgaggtgggcagttcatactgctcagttgaggtggcagtcatttattctgagtcctgttggatagagcctatctcctcaaggctacagaggcttccaggatatggagctgtgcatgttaatggctcagccttgcctccatcagggcacctgcctaacttggagcaagtgggagagcaccctagagtcatcctctgtgctgtttcgtgagttttgcagcggagacttcaccatccggaggagctgtgtttctgtgtcacttgggatatcacctaaaaatgaaacatttgatattttaaggtataaaaaaaaagtaaattggggaacattggctgcagtccctaaaagatactgttgtctgtgcatcaggttagcttgaggtcaccacaggtcctgggagcccagagagtttaggcatactctcctttggaggccagcagcctttcacaaaccctgcctctaaaagggcggtttcacatttgaccatgtttttgcattagcctcagaaactcttgtctttagctgataacctttgagggatgtgagaagcctagttggagcatctgagaaaatgatacctctcaccttcaaattaatcaaatagtttgtccttctagtccccttataaattaataaatggagggctggtcatggtggctcacgcctgtaatcccagcactttgggaggccgaggcggggtggatcacaaggtcaggagttcaagaccagcctgaccaatatggtgaaaccccatctctactaaaaatacaaaaattagccaggtgtagtggcacgctcctgtagtcccagctactcgggaggctgaggcaggagaatcgcttgaacccaggaggtggatgttgcagtgagccgagatcccgccactgcactgcagcctaggcgacagagcaagactccgtctcaaaaaaaaaaaaaaaaaaaaaagaaaagggaagggaatcccattttgtgatgatttgggcacactacttgagctgaggctagcagtcacatgattttggctgtctctgacctgaagcttttgaagtaaggttatgtctcttccctgaagctttgtttatagtggtaatttggtgagtttgagctttgagcttgtcttagaaaataagactgtccacctggggaggggagcttatagggaacccgtgttaactcagaatgctgaagaaagtgcttttagccaacaaaagtaagattactatctagaaggtggaaagaagtcattgcttctgttcctccagcagtcagttgactctaggtttcctttggtttatatccccagttcttaatactaaaacttatttgacttcctatcaggaagcacacaaaaaaagcgtcatttaaaaccctggatataggctttaaaggatacaaaaacagcagcattgtcgttttgccaggttcatcaccattttgatgtgctacccatccttccaccctccctttcctgcccccaagcctcccagccaggccagatgtgaagattctattaatcactgtttcagagaacattaattcttgtatagaataattatctactaaattgcttattatctgtgactaccttgcagagaacatctcaacagtgcagtaaaatagctctcctagacttgagcttccagccaggcatttagatcactcttaagcctttgtggaattctgaggaaaaaaagcaagatgcctcaatgccaatgctgggccataagattctactcccctccctgtagggtggggcgcgtggctcagctttggaaaatcattttgccagtaatattgcctgtgaatccctttaagaagtcgtcctgatctgagcctgtctttctgagcactttggtgctgaattgaaaatggtaagctaaagcagtgacagatccacgtagcctctttaacctctttattatcttgccaaaaaaaaagtttctcaggttaaacctttgtctttaacctccctttgttgtggagaaaatgtgtcactaatcagtggtccaagggatatctagctttggttactcagttcctgcagcataacagatatgacttatgccagggaaggtagaggctgattatggagacacccaggaacaggaataagaagggataggtctgctccacgtagaacctccccagatcggaagttaagtcttggagagtttccaaagtgctgaagtaaaaaggagacttggagggcctttgcttaatgagcaagaggcttgtgtcctcccaagaacatgagggagttcagaagggagctatagctcacagacagaaacctgcccgctcaccccatccctcgtgactgggagcatgtttgctcagaattttctaagaggactctcccttcaaaaatccaatttgctcccagaatgttgtttagcctctgagaatctcactctttcatttccatctgtgaatggacatagatgtgttgctcagggatcagaaacatcagagtccagggcccagtggcatggtgttgcattagtagttagaaaagtaattggtcagctctactgtaaaagaaataagtatgtagtacagttttgtaaatgtcaggtctgttctattgttttgtgatctgaagactgtcaaactggttgataatcaaagaaaaggttggtggttagaataagtaaaatttcagttagaaagatatagcttaccagttttccatgtgcttaaggaagtcaagaatatttcaggttgttgagaactgttgtaaaatggaattgaagctagtgtctctcaccttcttaggtgtatcagagagaggaagtggaaggccagtagtagcatcttcatacttacttttgccagcccagcctccatttcaaagactttgtcttccatcctatccaatgacatggtcagggatgggctctgaggaggcagtgaggccccaccttggtttgctccactgtggtgtgtagtctccaaacagcttaagggtttttaagttttctcacgattacctccactccactcatctactatcagcatcagaaaggttaacatccctgggaccattctacttataaaagagatgaactagtgtgctttctccccttttccaggtgtgccatccatatacaatctcctcttggccaagttcaacaaatgtttccagggaaccccgtgggttgaggcaaagtagccaagatgtattgagttaagtttttctagaggacaaaagtatttcttgtcccttttccctcatgctcatatgttttagctgaggcgtaaatggccaagttgagtaatatctgtggaactgagacagagagccagggacccatgtacccagggaccagtcccctggggaatcacacagtggctcagactagactgctctatcccaccagaactctgctgctgttcatttccatcaggaccacccaggaaagcaaataagttagccttctcatcattaggtcacctaatctcttgggttgcaggatgagagcatatatagatctcctgtttagagagtgtgttcataattgtagaaagggatagaaaatggaataaccaagaggctgtgtcattttttaagaggatggcaaggatgacctcaaatgagctcaacaaaactgggaatccaaggaatggtgcttgtagggaaagagaggtcagttgtggtccttaaacctcttggcaccttgtgcgggttataaaacaaggagctggagtaaaattgcccttacccccaatccaaatgctgtccaggatttaggagctacccaacctgtggttatatggtgttggtttccattttttgtttgtttgcttgtttccaaaatagccttgcttggtactgcatggaaagttcaagcttttcttcttgcccgctcagggctggcctcttccccgtgtcttcacagcgtccctaaggaagatttttgcagcactctctggagctgaggggagtgaaatttggtccagagaaggcgggaggaaatagttttcctgtttccttttctcgaggtggatgtcctcaggcttccttcacacctccttctcatgggtgcggctggcagtacagtcaggctgtggaggagggctgagaagaaaggggcactggtccagccccaggtttggtctgagacaggtacacagcagataccatcccaccttcctctctaaagaacaggccagccacacatataaccctttccctactttactaatgtatcccttatgtggtaccagcaatggaggacaggcagacttaccccctgccatctagagagaatgttgttattacccgtaaaacttgaccacccccatatcccactcctttttgtaaaaacaaatgcttaaacctgtgagcctgccgttcctttctatgtgttaatcagtttccttccatttgagctgtgtgggagggaagggcattgaaattgtaggttgtaatcttgtgccaaccaataaaaaccagtatttcaatgcccttccctcccacacagctcaaatggaaggaaactgattaacacatagaaaggaacggcaggctcacaggtttaagcatttgtttttacaaaaaggagtgggatatgggggtggtcaagttttacgggtaataacaacattctctctagatggcagggggtaagtctgcctgtcctccattgctggtaccacataagggatacattagtaaagtagggaaagggttatatgtgtggctggcctgttctttagagaggaaggtgggatggtatctgctgtgtacctgtctcagaccaaacctggggctggaccagtgccccttctcagccctcctccacagcctgactgtactgccagccgcacccatgagaaggaggtgtgaaggaagcctgaggacatccacctcgagaaaaggaaacaggaaaactatttccttccgccttctctggaccaaatttcactcccctcagctccagagagtgctgcaaaaatcttccttagggacgctgtgaagacacggggaagaggccagccctgagcgggcaagaagaaaagcttgaactttccatgcagtaccaagcaaggctattttggaaacaagcaaacaaacaaaaaatggaaaccaacaccatataaccacaggttgggtagctcctaaatcctggacagcatttggattgggggtaagggcaattttactccagctccttgttttataacccgcacaaggtgccaagaggtttaaggaccacaactgacctctctttccctacaagcaccattccttggattcccagttttgttgagctcatttgaggtcatccttgccatcctcttaaaaaatgacacagcctcttggttattccattttctatccctttctacaattatgaacacactctctaaacaggagatctatatatgctctcatcctgcaacccaagagattaggtgacctaatgatgagaaggctaacttatttgctttcctgggtggtcctgatggaaatgaacagcagcagagttctggtgggatagagcagtctagtctgagccactgtgtgattccccaggggactggtccctgggtacatgggtccctggctctctgtctcagttccacagatattactcaacttggccatttacgcctcagctaaaacatatgagcatgagggaaaagggacaagaaatacttttgtcctctagaaaaacttaactcaatacatcttggctactttgcctcaacccacggggttccctggaaacatttgttgaacttggccaagaggagattgtatatggatggcacacctggaaaaggggagaaagcacactagttcatctcttttataagtagaatggtcccagggatgttaacctttctgatgctgatagtagatgagtggagtggggtaatcgtgaaaacttaaaaacccttaagctgtttggagactacncaccacagtggagcaaaccaaggtggggcctcactgccctcctcagagcccatccctgaccatgtcattggataggatggaagacaaagtctntgaaatggaggctgggctggcaaaagtaagtatgaagatgctactactggccttccacttcctctctctgatacacctaagaaggtgagagacactagcttcaattccattttacaacagttctcaacaacctgaaatattcttgacttccttaagcacatggaaaactggtaagctatatctttctaactgaaattttacttattctaaccaaccttttctttgattatcaaccagtttgacagtcttcagatcacaaaacaatagaacagacctgacatttacaaaactgtactacatacttatttcttttacagtagagctgaccaattacttttctaactactaatgcaacaccatgccactgggccctggactctgatgtttctgatccctgagcaacacatctatgtccattcacagatggaaatgaaagagtgagattctcagaggctaaacaacattctgggaagcaaattggatttttgaagggagagtcctccttagaaaattctggagccaaacatgctcccagtcacgagggaatggnntnagccgggccaggtttcctgtctgtgngctatagctcccttcctgaactccctcntgtnctttgggaaggacacaagcntcttgctcattaagcaaaggccctccaagtctcctttttacttcagcactttggaaacnntccaagacttaacttccgatctggggaggttctacgtggagcagacctatcccttcttattcctgttcctgggtgtctccataatcagcctctaccttccctggcataagtcatatctgttatgctgcaggaacngagtaaccaaagctagatatcccttggaccactgattagtgacacattttctccacaacaaagggaggttaaagacaaaggtttaaccctgagaaactttttttttggcaagataataaagaggttaaagaggctacgtggatctgtcactgctttagcttaccattttcaattcagcaccaaagtgctcagaaagacaggctcagntcaggacgacttcttaaagggatacacaggcaatattactggcaaaatgattttccaaagctgagccacgcgccccaccctacagggaggggagtagaatcttatggcccagcattggcattgaggcatcttgctttttttcctcagaattccacaaaggcttaagagtgatctaaatgcctggctggaagctcaagtctaggagagctattttactgcactgttgagatgttctctgcaaggtagtcacagataataagcaatttagtagataattattctatacaagaattaatgttctctgaaacagtgattaatagaatcttcacatctggcctggctgggaggcttgggggcaggaaagggagggtggaaggatgggtagcacatcaaaatggtgatgaactggcaaaacgacaatgctgctgtttttgtatcctttaaagcctatatcccagggttttaaacgacgccgggggtgtgcttcacatctggcctggctgggaagcttgggggcaggaaagggaaggtggaaggatgggtagcacatcaaaatggtgatgaacctggcaaaacgacaatgctgctgttttgtatccctttaaagcctataacagtttaatgacgcttttttngtgtgcttcctgataggaagtcaaataagttttagtattaagaactggggatataanccaaaggaaacctagagtcaactgactgctggaggaacagaagcaatgnctttctttccacccttcttagatagtaatcttacttttgttggctaaaagcactttcttcagcattctgagttaacacgggttccctataagctcccctccccaggtggacagtcntattttctaagacaagctcaaagctcaaactcaccaaattaccactataaacaaagcttcagggaagagacataacctnacttcaaaagcttcaggtcagagacngccaaaatcatgtgactgctagcntcanntcaagnagtgtgcccaaatcattcacaaaatgggattccctttccttttcttttttttttttttggagacggagtcttgctctgtcgcctaggctgcagtgcagtggcgggatctcggctcactgcaacatccacctcctgggttcaagcgattctcctgcctcagcctcccgagtagctgggactacaggagcgtgccactacacctggctaatttttgtatttttagtagagatggggtttcaccatattggtcaggctggtcttgaactcctgaccttgtgatccacccgcctcggcctcccaaagtgctgggattacaggcgtgagccaccatgaccagccctccatttattaatttataaggggactagaaggacaaactatttgattaatttgaaggtgagaggtatcattttctcagatgctccaactaggcttctcacatccctcaaaggttatcagctaaagacaagagtttctgaggctaatgcaaaaacatggtcaaatgtgaaaccgcccttttagaggcagggtttgtgaaaggctgctggcctccaaaggagagtatgcntaaactctctggnctcccaggacctgtggtgacctcaagctaacctgatgcacagacaacagtatcttttagggactgcagccaatgttcccccaatttacttttttttttataccttaaaatatcaaatgtttcatttttaggtgatatcccaagtgacacagaaacacagctcctccggatggtgaagtctccgctgcaaaactcacgaaacagcacagaggatgactctagggtgctctcccacttgctccaagttaggcaggtgccctgatggaggcaaggctgagccattaacatgcacagctccatatcctggaagcctctgtagccttgaggagataggctctatccaacaggactcagaataaatgactgccacctcaactgagcagtatgaactgcccacctcaactgggcagtctgacctcttccacagtctttaagaaacagaagagccatttgcattatttaatcaccattcaataatctcctccctccccatagctgcttgagttaactgtcccacaagtgtcctgtgttttgtaaagatgagggttattttctgaaatgcagatgggactaggatgaagctgtattatcaattacagagacagccaactctcatttctcttaaagcaaaaattcattccactgtgatttctccaggtatttcctgcaattctaaatccgcccttgatattagagaatattaaaatcacacagttgtggcaaaaatcacattgtggctattaaatcctttttgtgaactaaaaaaagtgaatgtggcttaggctaagctgttttttttttttttttttttaaagatgaggatgcggactccaacaaaggcattaagaaagtactagatgaaaatgagaaatatgtgaaggataacatgtgaaatgtacactcaggtctaacaaatacctattatttctctggttaagaaggtttagcaggagcctccaatgagcactgtatgtagagaaaagggaaggagcaggaggaggaacagatctgcacagaatttttttcttaaaaaccacaaagggtgacttttttcttctaagcaagcaagcctgagaggcattacatgggctggctcctaatatcaaaacaaaatatttctttgccacnaaaggaacttgactatgtagcaacacatttacaaaactactgcaaaacactcccagagggcagtgacctactctgctccccagaggctccaagaagcaaggcctcaagtgcctcatgttccatggggctgtgcagtgcaatgcagaaggcggaaatcctgctgtgacgccaccctcgagaccttctgcagcctgagagggggtgatactcccacaccctttgatccttccagatggctcagcctagatctagcagtgagagagccctctccatgcagggcagatggagtggtggacacttgtgaaaacaaaacactaactgttccatcctgttatatttgctgtgaggaaaattaagattcctgttgtatgggctgcactgtttctggaagactacagaaaatctaacatggttgacacttcctggtagcccttctgtacatacacacacacacacccagagagaagacagagagaaaatcctggtccaaagatcacatgaccttactagtgtttccccaatgactgtaatttataaactaaaaatttttacgaatccactgctatcttcttctgtcctgagtttggtagactttaatggatgctccagcaataaccagaatctaggacatgcagactcactgtgagcgagaggctagggatctgccctaaacataggaacctgtttctatcaagcctgaatgaggtcagctctggtagaattaatgacaaatcaatgtcagtgaaatattctgcaaacagggtagcttttgtgctttcttttgattattttctttggggagataaaggtattgcaaccatgggtctaactaatctatcactaaaggactgtgacgacattcctcagtaaagacagtcatggtgtttactgtgccaggagggaaaatcccacgatcatcagaatcccagtgcaacagaaaacagcaccagtttcaacaattctgatgttggacaaagcctctttttgtcagttaagaaagcgtaagcacaatctctcagtcaattgcattaacaggaatccattcatgtcactgaaaaatacttcttggcacagttcactttcctgacccaaagacaccaacaacaatcaaaactgcactttcagggtagtatattgttacactagcccagtcaaaacatactcagaacatttaaaaatgtataaattactgttagcactgcagttccgttttattttcttatttatttattaagacagagtcttactctgttgcccaggctggagtgcagtggcatgatcttggcttactgcaacctctgcctcccaggtttaagcaattctcatgcttcagcctaccaagtagctgggattacaggagtgcaccatcatgcccagctaatttttgtattttagtagagatggggttttgccatgttggtcaggctggtctcaaactcctggcctcaagtgacccacctgccttggcctcccaaagtgctgggattacaggtgtgagccactacacccagccctgcagtccctttttaaagattactgactgttttcctgcaaagtactttcaaatccataccataaaggtagaatttatctggaagaatgtgttttttgaattccacctggcacttggttaaatctactttattttgccctttatttatttgaacagaactttagaatgctctaggtcaggaaaagaaacagtgtgttcgtttttaagaaggatgtgtgaatagtaagttggcattcagactcaagtcccatggtattgttcttatccaatgggacctctccttgggaatataattcctttcccagaggtatcatggtatcccaagaatataactgctctttggctctgtgtgtgaagattgggggagaggatgtaaactaagagtatatagcaaaaaaaaaaaaaaaaattttttttttttttttttgagatggagtttcactcttatcacccaggctggacgacagtggtgcaatctcggctcactgcaacctctgcctcccaggttcaagcgattatctcgcctcagcctcccaagtagctgggattacaggcgcccaccaccatgcctggctgatttttgtatttttagtagagatggggtttcacccttcaccctgttggccaggctggtaactcattaatattttagtattgtcctcccagactttgttcctgtgtatgtgtgtacgtatgtatttgttttgtttatttgtttaagcaaactgcccacgcgcccagccagtactggggtggctggggccagtagctccctgggcccctctggctcagcgtcagcaggtgagctgagcagcagtgagcccagcaccccggctcagactccgctggcagcacccatcatccccacgccggtcctcacctctcctggagcagtccccccgcttccttccccatccaaggaggaggagggactaagggctcaggtgcgggacctggaggagaaactagagaccctgagactgaaacgggcagaagacaaagcaaagctaaaagagctggagaaacacaaaatccagctggagcaggtgcaggaatggaagagcaaaatgcaggagcagcaggccgacctgcagcggcgcctcaaggaggcgagaaaggaagccaaggaggcgctggaggcaaaggaacgctatatggaggagatggctgatactgctgatgccattgagatggccactttggacaaggagatggctgaagagcgggctgagtccctgcagcaggaggtggaggcactgaaggagcgggtggacgagctcactactgacttagagatcctcaaggctgagattgaagagaagggctcagatggcgctgcatccagttatcagctcaagcagcttgaggagcagaatgcccgcctgaaggatgccctggtgaggatgcgggatctttcttcctcagagaagcaggagcatgtgaagctccagaagctcatggaaaagaagaaccaagagctggaagttgtgaggcaacagcgggagcgtctgcaggaggagctaagccaggcagagagcaccattgatgagctcaaggagcaggtggatgctgctctgggtgctgaggagatggtggagatgctgacagatcggaacctgaatctggaagagaaagtgcgcgagttgagggagactgtgggagacttggaagcgatgaatgagatgaacgatgagctgcaggagaatgcacgtgagacagaactggagctgcgggagcagctggacatggcaggcgcgcgggttcgtgaggcccagaagcgtgtggaggcagcccaggagacggttgcagactaccagcagaccatcaagaagtaccgccagctgaccgcccatctacaggatgtgaatcgggaactgacaaaccagcaggaagcatctgtggagaggcaacagcagccacctccagagacctttgacttcaaaatcaagtttgctgagactaaggcccatgccaaggcaattgagatggaattgaggcagatggaggtggcccaggccaatcgacacatgtccctgctgacagccttcatgcctgacagcttccttcggccaggtggggaccatgactgcgttctggtgctgttgctcatgcctcgtctcatttgcaaggcagagctgatccggaagcaggcccaggagaagtttgaactaagtgagaactgttcagagcggcctgggctgcgaggagctgctggggagcaactcagctttgctgctggactggtgtactcgctgagcctgctgcaggccacgctacaccgctatgagcatgccctctctcagtgcagtgtggatgtgtataagaaagtgggcagcctgtaccctgagatgagtgcccatgagcgctccttggatttcctcattgaactgctgcacaaggatcagctggatgagactgtcaatgtggagcctctcaccaaggccatcaagtactatcagcatctgtacagcatccaccttgccgaacagcctgaggactgtactatgcagctggctgaccacattaagttcacgcagagtgctctggactgcatgagtgtggaggtaggacggctgcgtgccttcttgcagggtgggcaggaggctacagatattgccctcctgctccgggatctggaaacttcatgcagtgacatccgccagttctgcaagaagatccgaaggcgaatgccagggacagatgctcctgggatcccagctgcactggcctttggaccacaggtatctgacacgctcctagactgcaggaaacacttgacgtgggtcgtggctgtgctgcaggaggtggcagctgctgctgcccagctcattgccccactggcagagaatgaggggctacttgtggctgctctggaggaactggctttcaaagcaagcgagcagatctatgggaccccctccagcagcccctatgagtgtctgcgccagtcatgcaacatcctcatcagtaccatgaacaagctggccacagccatgcaggagggggagtatgatgcagagcggccccccagcaagcctccaccggttgaactgcgggctgctgcccttcgtgcagagatcacagatgctgaaggcctgggtttgaagctcgaagatcgagagacagttattaaggagttgaagaagtcactcaagattaagggagaggagctaagtgaggccaatgtgcggctgagcctcctggagaagaagttggacagtgctgccaaggatgcagatgagcgcatcgagaaagtccagactcggctggaggagacccaggcactgctgcgaaagaaggagaaagagtttgaggagacaatggatgcactccaggctgacatcgaccagctggaggcagagaaggcagaactaaagcagcgtctgaacagccagtccaaacgcacgattgagggactccggggccctcctccttcaggcattgctactctggtctctggcattgctggtgaagcaacagcagcgaggagccatccctgggcaggctccagggtctgtgccaggcccagggctggtgaaggactcaccactgctgcttcagcagatctctgccatgaggctgcacatctcccagctccagcatgagaacagcatcctcaagggagcccagatgaaggcatccttggcatccctgccccctctgcatgttgcaaagctatcccatgagggccctggcagtgagttaccagctggagcgctgtatcgtaagaccagccagctgctggagacattgaatcaattgagcacacacacgcacgtagtagacatcactcgcaccagccctgctgccaagagcccgtcggcccaacttatggagcaagtggctcagcttaagtccctgagtgacaccgtcgagaagctcaaggatgaggtcctcaaggagacagtatctcagcgccctggagccacagtacccactgactttgccaccttcccttcatcagccttcctcagggccaaggaggagcagcaggatgacacagtctacatgggcaaagtgaccttctcatgtgcggctggttttggacagcgacaccggctggtgctgacccaggagcagctgcaccagcttcacagtcgcctcatctcctaagcactcctttcccctgctgtccccttcgaccctcagccctctggtgccgctctgcccgatgcacagccacctcagccagcccccaggtagaaacgtgggttaagctcttcctgccccgttcagcttcactcccaccctttcagcgtcctgccccttcaccttgacccgggttcccccactcccattccctggcctctgccataatttgttgttcaactgctccctccttcctgaggggcctcagggcttgtggggggtaggctgagaccccaccaccaaaggttaagtgaggtccccttgattgaggacttcaccccttgattaaagcaacttctgcttccaggacacaaccacacacacaccgacaacacacaccagttgggggcggcctggggccatgcagaaacgcatctcaacccaatcgcggtggccgccggggccccaataggaacagtacccatggtccacaccgtgatcccgaggaaccggtggccatggacagacgccgcgtggatatacaccaccactaaaaaaaaccccgggagaacaccggcggttgtgcaaccaactccaaaaaaggcccgaaggcagacaggggctcaactcacgagccacaacaggccgaagtaaaaccgccgcagggggagaaaacaaacgaaacacacacacacaccgccgcacacagcacagacaccagcaccgggacggggaaaaaacaacgacgacgaagcaacaagaagaccaacggcaccaacaacggaacaggaaggaaacagaagaaggcacagagagaggagcacggaaaaacaagatgactgagaaacacgagcgacgagagaacaaagggcacaaaagcgagaggacaaacgacgagaaacagccaacgcaacggcaacagaagcgaccgacgaagcgcaagagaagagcgcgaacggagcggacccagacgaacacgagacacgaaaagcaaagcaacggacgtcacgagccggaaggacgagcacgcgaagcacgacagaggagcagaagagaacgagaacagagaaggagacagaacgaaagcagaaaagaaacgagagcgtacaggccacagagagaggaagcaggagaagagaggagggagacagacaaggaacgagacgagcgacaacaaacaagaagagagggagaacagcaagagagagagacagaaaggagaaacaagaaaagacaaagacgaagagagacaccacgctacaacaggacagagaagaacagcgaacgacaaagagagacgacgaaaaagaaaagaacggacacagagcgcaaactaccagcagaaacagcgtacgaaaacgagcgagcaagagacagaggcccagaacacagagacaaagagaagacggggaaaagaccagaacagaacaacagcgcgagagacacgcgcacagagccccgcagcaaagcaaagaaaacagaaagcacagagaacgcatacagaacacgagagagaaaagagagagagaacgaaacgcaaacaagagaaaaaacagaacagcgagcagacagaggagaacagaggagagcaacacagcgacaaccacacgcgaagcagaggcgacccacgagaaaagagaccacgaagacaacaaagcagaggacagaagagaaa

SEQ ID NO: 20302 - DNA, 2054 bp, Homo sapiens
ccttcggtggtgaacgagtctccagcaccatgtctggttgtctggcccaccagcccggcgcggccttttccgttagcgtgctgctttgttcctgctcggccccagattggtccttgccatctccttccatctgcccattaactctcgcaagtgcctccgtgagggagattcacaaggacctgctagtgactggcgcgtacgagatctccgaccagtctgggggcgctggcggcctgcgcagccacctcaagatcacagattctgctggccatattctctactccaaagaggatgcaaccaaggggaaatttgcctttaccactgaagattatgacatgtttgaagtgtgtttgagagcaagggaacagggcggatacctgaccaactcgtgatcctagacatgaagcatggagtggaggcgaaaaattacgaagagattgcaaaagttgagaagctcaaaccattagaggtagagctgcgacgcctagaagacctttcagaatctatgtgttaactgattttgcctacatgaacgaagagagaagaggagatgcgtgataccaacgagtcaacaaacactcgggtcctatacttcagcatcttttcaatgttctgtctcatgtggactagctacctggcaggtcttctacctgcgacgcttcttcaaggccaagaaaattgatgagtaatgaatgaggcatattctcctcccaacttgtaactcagccagcagaacatcgctgggacgtgcctggcctaaggcatcctaccaacagcaccatcaaggcacgttggagctttcttgccagaactgatctcttttggtgtgggaggacatggggtacgcggggattccaggctcttctgtgcctgtgggactacattctctgtgccgggcttagagaacacgaagagggagccatctgccacactctggaggctgaagcctgcaccagtgctgctcgcctcactgtggtaggtggtggtgatggaaactgcagatcggccagagtggtagaaaagttgctgcagggtttttctggctttgcctgcccagccgctccatgcctggctagaggagaaggaggagccacatgtggtacactggaggctggagcctgcagatggcatggctctgcggctcaccttgctgcagttggtggtggtgacagagactgcagcttgactgtagtgaatttggaaattatctgtctggaagctctgagtttatcttgggacctcaagaggagaggatcacccaactcacagcaatcaaactccaaatggtgctataaactgaaccacacatggacacgtcagtcttccgaggacccttagatcaaccccaggaggagccctagctgctgttccccattcgacgcccctttccagcaggaagtagccagaagacatcgtcgcccaaacctctaacagcagttagtgcggcatctccacaggggggaatgttgtaggagttattgataaattattttaggcagatagagaggaaaaggggtccttaggaagtttttgttttttaaagcacgtctggaaaagtttcttgtaaagctccagctcttaaagccaggccagttacccgatatccaaatgccagccattagaaagtgggtccacccaaacatggcgattcctgtggacttcttgccctttccccacattcctggatacatggacaccccgaagtatccccacctgtgtagaagatcatggtgccctgcatttgcatattaaaaggctagggtgggagagccagcttttcctgcgggctacgtgaatgacatgcctagtcaaaccaatcccctgagcctgtgcaaatcagacactgcctcctccagcctctgtatatatacctagctggtatctgtggcaggtggggttccctctcttggctttggggccccccttcctctgtctctgtacctgcccgggcggccgctcgactccctgctcctctccctatattactgattgcactgaacagcatggtccccaatgtagccatgcaaatgagaaacccagtggctccttgtggt

SEQ ID NO: 20303 - DNA, 1357 bp, Homo sapiens
  misc_feature 1355, 1356, 1357: n = A,T,C or G
actctgtctctgtagtctctccattctaaagtttaatttggaaaggtctgtcctgaattatcaaagtaagaatactcagatttccataagctcttctcacctcctcttagcccaactcaaactccatcagaccttctcaccttgattttgagctggaatgtttcaatgagcaaaataaattagacaaaagtttactttctttttttccaaaatacacacaggttgatttgctgtaatataaaacttagaagtaaaccactgctaattaatcattttaaactttcaaaaactgctaaaacaggtgccatgaatcaggtacaattactgtagaaactaacattagctattatacactaaccaggcatttttcccaaattaattacaatctggttgtttagcctatgctaattaagccctcttagtagtagtattcactttacattgaagacctcattcacaaatacagggtgctctgtgcttatatccttccacccttgactgccaaaaatgtgtgaaatggaaagttgatggcagcagggccgacgatgtcacctggtgcctcgcgggctcagtgagttaggaagtcagcagcaggggaggcagcttgcatgcctgtcccccggcacactgtgtggaggtggaaacagagctacgccagcaggcgccaagcacccaactccagagatggaagcctggtggccttcctttcacagagctcagctgctcgcaggctgtgaaatctaagacacccctcataaatatcaaaaacacctccaaagctaacgtcagggtaaaactacttggagtcgaatccccatgccccagtaggtgtatcttgtgtatgacctgtgccctgttcttccctcagcctcgcctgctgtgctgactccttcaggggtccttctaagcatcatcctgttggaactcccaaaagtcatcccagtgccattctgtgttcaggtgcccatttccttgtgtacatcctgtccctgccacatccataagctcctgagagaaaggtctgacttgttgattgtgtcaccccatcacagctcagtgttggtggcatagttccaggtgcgtgaaagtatttgctgattctttgaagattgggaaggctcagaagggcagagttgaagaaggcatacctttaagagaagccctttgaataatcaagtgctaaaacaaaatcaggtgcttttttaaaacagcttgattgagatataatccacataccttaaaattcacacatttaaagtttttagtgtctccagacacagtggttcatgcctgtgagactggggcaggaggatcacttgaggccaggagttcaagatcagcctgggcaatatagnnn

SEQ ID NO: 20304 - DNA, 3082 bp, Homo sapiens
  misc_feature 1, 2, 3064, 3065, 3066, 3067, 3068, 3069, 3070, 3071, 3072,3073, 3074, 3075, 3076, 3077, 3078, 3079, 3080, 3081, 3082: n = A,T,C or G
nnggagtcacccacgcgtccgggcggcgcagctacggcaagagagtgagaaggaagggaagccggaaggggcgcgagtgaagcaaagcgaggacagacagctcccagagggcgaggggtgcgtgtgcgtccgcttctcacctcaggtctcccttcggccccgctgccctccctcgcggctgggtgacagctgggtccggtccgtcgcgggctgcctggggtgcgaggatcgcgcaccccgtcttcgcgcgctgtgcctgccgccccgccccctcgtcccgcccgtcccgtcgcgtcgcgtcccgtcccctcgggtgctgccagccgggtgctgatgcgagtcggtggcagcgaggacattttctgactccctggcccctgacacggctgcactttccatcccgtcgcggggccggccgctactccggccccaggatgcagaatgtgattaatactgtgaagggaaaggcactggaagtggctgagtacctgaccccggtcctcaaggaatcaaagtttaaggaaacaggtgtaattaccccagaagagtttgtggcagctggagatcacctagtccaccactgtccaacatggcaatgggctacaggggaagaattgaaagtgaaggcatacctaccaacaggcaaacaatttttggtaaccaaaaatgtgccgtgctataagcggtgcaaacagatggaatattcagatgaattggaagctatcattgaagaagatgatggtgatggcggatgggtagatacatatcacaacacaggtattacaggaataacggaagccgttaaagagatcacactggaaaataaggacaatataaggcttcaagattgctcagcactatgtgaagaggaagaagatgaagatgaaggagaagctgcagatatggaagaatatgaagagagtggattgttggaaacagatgaggctaccctagatacaaggaaaatagtagaagcttgtaaagccaaaactgatgctggcggtgaagatgctattttgcaaaccagaacttatgacctttacatcacttatgataaatattaccagactccacgattatggttgtttggctatgatgagcaacggcagcctttaacagttgagcacatgtatgaagacatcagtcaggatcatgtgaagaaaacagtgaccattgaaaatcaccctcatctgccaccacctcccatgtgttcagttcacccatgcaggcatgctgaggtgatgaagaaaatcattgagactgttgcagaaggagggggagaacttggagttcatatgtatcttcttattttcttgaaatttgtacaagctgtcattccaacaatagaatatgactacacaagacacttcacaatgtaatgaagagagcataaaatcttcttttaatttctgatctgtaaagaattaacctagtagaagtctttcatttatttagaaaatgttatattgtgatagttatgccttgcttagttgattagaacatgtccccatgtgtagcagtagctcacccttgttacagaggtaactactaatttagaataataatatgagtatctttttcttatgtacatttccagtttaacatgttaccaaaaatgtactttcccatcaggtaaaagtaaaattaggttgtgtcaatctgaggtgtctctgaagcaaataattcagcttaaacaaatacgttaattaaaagtaatgtactacgtgaagtgctttagatattcttaaaatatagtacgttcatttttctcaagacagtagcacctttcttgtatcttactatagttttcctactcagttttcttggattgacaaaagtaatacattcaagttaatgcccaagcaaactgttggatcctaaagtacatgtactcatagcatagatttatcaaaaacagtcaaaatcaatgatttacatgccagatagcttgaattagtttgatgctaggttaatacttgacttggtggtggtttcggctactatgtgttagattagatgtggagactaagacgccacgtctaatcagactgtggggcattgctaataaagtgtgtccctaagaagaactttgaactgatttgatattgaaacaaaccaaaaacttccagtccaaaccatatttactcctgaagtcctattatgcctaactggcacatctctgctggatgctaggtagcaacttggaagactgtctatatataattcataatagtaattggtttcccccaatgaaaagtaagctcctaatgtttttaagtgcaatgaacataaaaaaatttcagaatttaattaaagacagtccagtagagctcagtctttggcaaatacatacactaacctagaatcagtctactatacaggatttttatttaatttttttctcttttgctatagtactttattatagtctattctgcctcattttctgacataactctagcaaacttaaaggagtctagtaaatgagtacattttgtactcatttaaacatgtatagctttgtcctttttatgtcaaagtaattgtgcttatatgaacacctactcattaagaagtttcaaattcaataatcgaatgagtggtcaggtagtcttaaagagcctcatgttaaatagacacaaatttgcatagttgaattctttaatagacttaatttaagattttgtggggtttttttgagaaattaatggcttaataaaatggataattacaacatgggcttaaaacatagaactatttacaaatcttattttccttagctaaaaacctttaggtatcttcttattttcttgaaatttgtacaagctgtcattccaacaatagaatatgactacacaagacacttcacaatgtaatgaagagagcataaaatctatcctaattattggttctgatttttaaagaattaacccatagatgtgaccattgaccatattcatcaatatatacagtttctctaataagggacttatatgtttatgcattaaataaaaatatgttccactaccagccttacttgtttaataaaaatcagtgcatagannnnnnnnnnnnnnnnnnn

SEQ ID NO: 20305 - DNA, 3090 bp, Homo sapiens
  misc_feature 2820, 2821, 2822, 2823, 2824, 2825, 2826, 2827, 2828, 2829,2830, 2831, 2832, 2833, 2834, 2835, 2836, 2837, 2838, 2839,2840, 2841, 2842: n = A,T,C or G
gagtcgacccacgcgtccgactctataatgttcttggtattaaaaaaaaagcatatttgtcacagaaatttagttaacatcttacaactgaacatgtatgtatgttgcttagataaatgtaatcactgtaaacatctatatgatctgggattttgtttttattttgaaatgggagcttttttgtttacaagttcattaaaaactaaaaactgtttctgtaaggaaatgagattttttttaaacaacaaaaaatgccttgctgactcactattaaataaaaatctccccaattttttgatagactacttcaagccatttgttacatggtattcctttgcaagtcaatttaggtttcgtgttataacttttcctctttttttaagaaaaatgaaaaaagtaattcttttgtctgaaggggaaaggcattctttcatttttttctttttttttttttttttttatgacttgcaggcacaatatctagtactgcaactgccagaacttggtattgtagctgctgcccgctgactagcagctggactgattttgaataaaaatgaaagcattaaagggtttccctacaaaacatttttctttaaaatacttttgaaatggctataagcagttgactttcacccttggagagcatcacactgtgtgaggttcagtgattgttgaccctccccagcccctcctggcttctttaagttatctgtgtgcgtgcacttcctctcaatcttcttgcacgctcattcttttctctgacccatgagaaaggaaaacttactgatgataatttttaaatagtgtaatttattcatttatagcatgtcaggataaattaaaagaacatttgtctggaaatgctgccgggagcctattgtgtaaatgtaggtattttgtaaaataaccttgaaattgtaaattgacacgtgtttggtcagattgtgtcaagtttaatttgttttgttttcttttttcttttttttatttgaaaactactttagcaataattaattccatgattatcacattctgccattaagggatattagtaccgtaatactgaagaaattttattaagtctgaacttctggggtaggcagcttctttgtttcttttctatccacccttgtcggttgaggtatttgtttcttgactaataaaccctttgatacttttagccagaaatcagtctcataaagctatttttgagtatagtttgtgtaaaataaaaatgtttagctttggtaataacttccaagctgaactccctctagcaagatatttttcagtgcttttatttactatgcacttagactatgcactttttctgaaatatttttgtaacacttttttgtatttttgccatttgaaaaggttgtggtgtagttggtctgtaattaagttgcagatttaaaactgctgttagctttgtaaatcaaaatataggtgttttttgtcctggtatatcgtcattccatctgcagctggagctggaatcccattgatcttctagctaccattcattttcttcactgttcacaaaagaagagtgtgaaattcagtgaatgctgttactaatcctgttacgagatgaatctcatttcaccaaaattaaattatgtttttccgctaaaatgatgatacaagttgaagacacatcactctgaaattggaagacctcaccacttaaggctccacagtggcttactcagctgaactctaggttactactctttactttgttcacccattggggggtgcagtttttttaaaatgttgggagatggccattctaactactgttgaatgtctctgttttgggaaggtataacaagaaataaaaaagaatatatatgaagggagagactggttatctcctcccatatggttgtgcttatcctcttatggcttacaaatgaatatttggaggtttgctttcacaatgatttcccatcaacaaatatttttagtaggatttttcctgtttctgttagtccttgcagtactcataaatgttttaagctgagcatactgtaatagtcataagtttaatttcattataataaaaataatcaaacaaaaggactttagaacccaagacaatgagctagttttccctaaagtttgctgaactattaaggaatatgttcttatagcttttgactagaatgagtcatgggaattctaagaagggatggcctagacatttttagctcagttaaattcagcatttaatgcaggtgagttcctgggtcgttttccaactagtctggaacagtctggttctgactcaaactggtataaagcattattttaggttttctctttgccagtttttaagcagttataaccatgtaaatcaagatgtgaggacatctatatgaagtatagtaaagaagtggtgtcagcagatcaatatgtgtgtcctgggtgtgctgctctcttaagtgagactttgtgagactatactttaaatgcattattaccattgcttacattttgggggattttcttcctcctcaaaacttccatttctattgtaatattcttaatgacaatctttttttttttttagcagtgtatgtttgaaacagccaaagatggcgatgaaccaagtgtaaattgatctaagcagcccatgcagtttgtgttgaatcaacaaacagtgtattgttgaagtgaaattattttctgaaatgacttgttagaccagttttgaggacatactcaaaagtagagtaataatggctcctgggatggagaaatatgagatgaacctggaacattctattatggtgccacaaaggaaatctnnnnnnnnnnnnnnnnnnnnnnnggttggctaggagcagtggcacacgcctgcgattccagcactttgggaggccgaagtgggcaggagttcaagaccagcctggccaacatagtgaaaccctgtctctactaaaaatacaaaaattagccgggtgtggtggcgggcgcctgtaatcccagcttttcaagaggccgaggcagaagaatcgcttgaacccgggagatggaggttgcagtgagctgagatcgtgccactgcactccagcctgg

SEQ ID NO: 20306 - DNA, 613 bp, Homo sapiens
  misc_feature 1, 610, 611, 612, 613: n = A,T,C or G
ntcagcgaatttgtgtgtttgtgtttgtttggggtttttgtttttatggttcttacattagagttcatattttctgggatttaaggatacaggtgtattttcctattctcttgagaagtagactaaacaatatttgcagtgatgacagacgcacacagaagaaaacattagaagagatgcctttctatcctctcatgtggttgagcattcttacagccaaatgactaaattggctgtaaattggtttctaggaggagcagctgtcactacgtgtgatgtataatatttagccagggccaactcaggggctgtgtcatttgtcctatctttaaattgaggtcagagtgtcacacacaacccctcccctggggcagggtggactggactaggttgcatacgctggctgtcagctcagcaaaaatgccacatggggcttgtcactccgccagacactcactgactcacgggctggcaggtcacgctcggttagcgctccagggcctgactctggattgagctaaactggcagaatccactcaggccaacccttggtctactgctgtgtacagacagcccagtcctgtgttgagtctctcttctcctggatgannnn

SEQ ID NO: 20307 - DNA, 2298 bp, Homo sapiens
  misc_feature 1, 2, 3, 9, 12, 2295, 2296, 2297, 2298: n = A,T,C or G
nnnccgggnagnaggactgatgactcactgagcgtgtgtgtcccctggtggcagcaggccccatagtgaacataccataccttttctgtcctgagcgatgctcccagcagtcctgggagatggaacggtccttattcggctcacaggaaggaccgccttaactggacagacacagcaaggtgctaaagatgccttccatcagaggccaggttggaagctctaaagagacttctcttgcggttctctcacccacccccaggttgtgtgtgtcccgctgtggattctcatgtcctttctgtgcctggtggtcctctactacattgtgtggtccgtcttgttcttgcgctctatggatgtgattgcggagcagcgcaggacacacataaccatggccctgagctggatgaccatcgtcgtgccccttcttacatttgagattctgctggttcacaaactggatggccacaacgccttctcctgcatcccgatctttgtccccctttggctctcgttgatcacgctgatggcaaccacatttggacagaagggaggaaaccactggtggtttggtatccgcaaagatttctgtcagtttctgcttgaaatcttcccatttctacgagaatatggaaacatttcctatgatctccatcacgaagataatgaagaaaccgaagagaccccagttccggagccccctaaaatcgcacccatgtttcgaaagaaggccagggtggtcattacccagagccctgggaagtatgtgctcccacctcccaaattaaatatcgaaatgccagattagatgccacttccggggacagagcttaagtggactgggacgcactctctccgccttcctctgccccctcgttcaccccgcagaccagaaccagtactggagctgggtctccaggtacgtccatctcatgccttgtttgcatccagcgcctatcagccactcaccacgacgggacgcggaagtggcaggtgacgggggtgtgtgccagcagatgcggatgccaggaagagtgtgagaacaggggtgggattaccgtctgtctgggaggggctccaggtacccctcttccccgtcagacccactgggagatggctgcttgccaggcccccagaaggaacatctgtctatacggtgctgaaatcccaatcaaaagtattgtttagaaatgtatttctccacagggctgacctcctgcagctcgctgagcactcccaggtcctcagcactcccaggtcgtggctggggcagtcagtaggaactgtaactatgtctctgatgcaccacgtgtttagacacagcacagtccttttttctgttcctactgtggaagtagtttctctttgggcatgctgacagcagtttttcatagcctcacggatgagccctttctacgggagtgactccatgcttgtatacagagtatttatacaaatgttttagcatcttcatatgcggtgttaacccctagttctgtacagcatattctgttcaagtatttttttacaagcttgtgctgtaggcacatgccttctgctgcagaagtggacgcccgtggcacaccccccccccccccgtggggtgccacgccttcctgggacattgccacttctgccctggaactcgtgcaggtacgtagtagctgctactgccagaacggcaacaccaagcaagagatggtccatgcttttctgacgttctcagaatagtggctagcttcaaacctgacaagcgctgcttgaagccggaacactagagaatgttgctgagagcagaaacggccacgcgggtcacgactatgcgtgggaaagtctcaagcttccctcctgccagcaacaagaaggctttggagtaggcatgatgttttcacgtgtgcgtgccgtttctccaagcactgcaggttccaccgtgtgtcagaggctgcaagtttaacatcctcctgcctgaaaacaaataggtcctttgctgaaaagagggtaaaaaaagagctttgatcttctcagccaggagaagagggtggtgttttcacgcgggcaactgctcgccggcctacatggggttaattcaagtctgctgcgagcacgactccgcccttggcactggcctccagcaagccctgttctctttggggtacaggggaacgggatggtttagactttcctgctcagtgtgtaaaaaatgtagctaaagccactatttttgctctccttaagctgttcaataaaccggttcctcattttaaaaaaaaaaaaaaaaaaaaaaaaaaaaaaaaaaannnn

SEQ ID NO: 20308 - DNA, 951 bp, Homo sapiens
  misc_feature 943, 944, 945, 946, 947, 948, 949, 950, 951: n = A,T,C or G
ctcaaatttcaaggtgagtttttgtgttttctatgttccaacccttcatagaaaccagaaaaaaagcagtgaaggttccatgtttcagtcaaaaactcattttcccagcaggcatcattccccaagacagtggggttaacaaaagaactaatccacactgcatcaaaaataattatcattggcctagacatctggtttagcttttttgttttgttttgtttttcagacggagtctcactctgctgcccaggctggagtgcagtggcgtgattttggctcactgcaacttccacctcctgggttcaagcgattctcttgcctcggcctcccgagtagctgggattacaggcatgtgccgcgatgcccggctgatttctgtatttttggtggagacggggtttcaccatgttggccgggctggtctcgaactcctgccctcaggtgatcctcccgcctcggcctcccagggtgctgggatcacaggtgtgagccaccgcgcccggccaggcctactcatctttgggatataagaggggatgcagggatttttttccctatttattgagggctttaatactgtttttaatatttttaaatatttctgttctttgtatttcctagcaccaaatcagatgaaagccaaggaagggaggaatgtgtacagttcttcacgctatgatgattatgacagatacagacgttctagaagccgaagttatgaaaggaggagatcaagaagtcggtcttttgattacaactatagaagatcgtatagtcctagaaagtaagtgtgctgtgtagcacagtgatctgtttaaaaaatgtatttgttagcatttaatttttttttactattttgtatacttttaattatatacattgaatgtttcattgagacaaaaaatactgtaaacatttattttaaaaagttttatggtttgcnnnnnnnnn

SEQ ID NO: 20309 - DNA, 1514 bp, Homo sapiens
  misc_feature 1, 1477, 1514: n = A,T,C or G
nacccatgcgtccgagaaagggacggaaggacccttccaagtccatcctggatgttggtgtacaagaagctataaaattcagtgggtgcggtgaaaagatgtctctgaagcgaggaggaaaatacatatggagtaaggctgatctgaagctggattggtagagcggaaagtggaacgagacttcaacacaccagtgggaaaactcctagagtaactgccattgtctgcaatactatcccgttggtatttcccagtggctgaaaacctgattttctgctgcacgtggcatctgattacctgtggtcactgaacacacgaataacttggatagcaaatcctgagacaatggaaaaccattaactttacttcattggcttataaccttgttgttattgaaacagcacttctgtttttgagtttgttttagctaaaaagaaggaatacacacaggaataatgaccccaaaaatgcttagataaggcccctatacacaggacctgacatttagctcaatgatgcgtttgtaagaaataagctctagtgatatctgtgggggcaaaatttaatttggatttgattttttaaaacaatgtttactgcgatttctatatttccattttgaaactatttcttgttccaggtttgttcatttgacagagtcagtattttttgccaaatatccagataaccagttttcacatctgagacattacaaagtatctgcctcaattatttctgctggttataatgctttttttttttttgcttttatgccattgcagtcttgtactttttactgtgatgtacagaaatagtcaacagatgtttccaagaacatatgatatgataatcctaccaattttcaagaagtctctagaaagagataacacatggaaagatggtgtggtgcagcccagcccacggtgcctgttccatgaatgctggctacctatgtgtgtggtacctgttgtgtccctttctcttcaaagatcctgagcaaaacaaagatacgctttccatttgatgatggagttgacatggaggcagtgcttgcattgctttgttcgcctatcatctggccacatgaggctgtcaagcaaaagaataggagtgtagttgagtagctggttggccctacatctctgagaagtgacggcacactgggttggcataagatatcctaaaatcacgctggaaccttgggcaaggaagaatgtgagcaagagtagagagagtgcctggatttcatgtcagtgaagccaagtcaccatatcatatttttgaatgaactctgagtcagttgaaatagggtacctggccgggcggccatctgaatccatcttctcaacatgcaaaaagctggaggagtctttgacagttgagatctgtgggaaaccgctggatctgagcaacctgtccctagaaggcatcgcagtgctaaacatccctagcatgcatggtggctccaacctctggngtgataccaggagaccccatggggatatctatgggan

SEQ ID NO: 20310 - DNA, 1177 bp, Homo sapiens
  misc_feature 1, 2, 3, 4, 5, 6, 7, 1174, 1175, 1176, 1177: n = A,T,C or G
nnnnnnnactctggtggtgacttatgtagatgccatcaacagtggagcagtaccttgtctggagaatgcagtgacagcactggcccagcttgagaacccagcggctgtgcagagggcagccgaccactatagccagcagatggcccagcaactgaggctccccacagacacgctccaggagctgctggacgtgcatgcagcctgtgagagggaagccattgcagtcttcatggagcactccttcaaggatgaaaaccatgaattccagaagaagcttgtggacaccatagagaaaaagaagggagactttgtgctgcagaatgaagaggcatctgccaaatattgccaggctgagcttaagcggctttcagagcacctgacagaaagcattttgagaggaattttctctgttcctggaggacacaatctctacttagaagaaaagaaacaggttgagtgggactataagctagtgcccagaaaaggagttaaggcaaacgaggtcctccagaacttcctgcagtcacaggtggttgtagaggaatccatcctgcagtcagacaaagccctcactgctggagagaaggccatagcagcggagcgggccatgaaggaagcagctgagaaggaacaggagctgctaagagaaaaacagaaggagcagcagcaaatgatggaggctcaagagagaagcttccaggaaaacatagctcaactcaagaagaagatggagagggaaagggaaaaccttctcagagagcatgaaaggctgctaaaacacaagctgaaggtacaagaagaaatgcttaaggaagaatttcaaaagaaatctgagcagttaaataaagagattaatcaactgaaagaaaaaattgaaagcactaaaaatgaacagttaaggctcttaaagatccttgacatggctagcaacataatgattgtcactctacctggggcttccaagctacttggagtagggacaaaatatcttggctcacgtatttaagagcctgaatattccagcctgggcgacagagcgaaactcaatataaaatgaggtttattttattttaataacataacactgttgctcattttgtaagtataagtgttatagcagtttcattcaagaaaagtttaaaattaaaaagtgattatcaaagatatcaggccnnnn

SEQ ID NO: 20311 - DNA, 1202 bp, Homo sapiens
  misc_feature 1, 2, 3, 4, 5, 6, 1116, 1117, 1118, 1119, 1120, 1121, 1122,1123, 1124, 1125, 1126, 1127, 1128, 1129, 1130, 1131, 1132,1167, 1168, 1169, 1170, 1171, 1172, 1173, 1174, 1175, 1176,1177, 1178, 1179, 1180, 1181, 1182, 1183, 1184, 1185: n = A,T,C or G
  misc_feature 1186, 1187, 1188, 1189, 1190, 1191, 1192, 1193, 1194, 1195,1196, 1197, 1198, 1199, 1200, 1201, 1202: n = A,T,C or G
nnnnnncacaggctggacttctgtggcttcctcctgagccaaggtgtcgacccacgcgtccggtctcagcggctgccaacagatcatgagccatcagctcctctggggccagctataggacaacagaactctcaccaaaggaccagacacagtgggcaccatgggacagtgtcggtcagccaacgcagaggatgctcaggaattcagtgatgtggagagggccattgagaccctcatcaagaactttcaccagtactccgtggagggtgggaaggagacgctgaccccttctgagctacgggacctggtcacccagcagctgccccatctcatgccgagcaactgtggcctggaagagaaaattgccaacctgggcagctgcaatgactctaaactggagttcaggagtttctgggagctgattggagaagcggccaagagtgtgaagctggagaggcctgtccgggggcactgagaactccctctggaattcttggggggtgttggggagagactgtgggcctggaaataaaacttgtctcctctaccaccaccctgtaccctagcctgcacctgtcctcatctctgcaaagttcagcttccttccccaggtctctgtgcactctgtcttggatgctctggggagctcatgggtggaggagtctccaccagagggaggctcaggggactggttgggccagggatgaatatttgagggataaaaattgtgtaagagccaaagaattggtagtagggggagaacagagaggagctgggctatgggaaatgatttgaataatggagctgggaatatggctggatatctggtactaaaaaagggtctttaagaacctacttcctaatctcttccccaatccaaaccatagctgtctgtccagtgctctcttcctgcctccagctctgccccaggctcctcctagactctgtccctgggctagggcaggggaggagggagagcagggttgggggagaggctgaggagagtgtgacatgtggggagaggaccagctgggtgcttgggcattgacagaatgatggttgttttgtatcatttgattaataaaaaaaaatgaaaaaagtgacggaagagcgaannnnnnnnnnnnnnnnngggggggggccccctttttttttttaaaaaaaaannnnnnnnnnnnnnnnnnnnnnnnnnnnnnnnnnnn

SEQ ID NO: 20312 - DNA, 3253 bp, Homo sapiens
  misc_feature 1, 3252, 3253: n = A,T,C or G
nctgcaaggcgattaagttgggtaacgccagggttttcccagtcacgacgttgtaaaacgacggccagtgaattgtaatacgactcactatagggcgaattgggtaccgggccccccctcgagttttttttaccgggccctcctccatgtgtacgaaatggctaagtttattcaacatctcggatattcatctggatattgggtttgttttgtgatacaatacatattcaccttaactggtgctactgcaaagaaagctttcttgacctgcatgacgtgcctcagagcttctctccaccaattggaaccacccaaagcctagtctagaccaaagtgctctggagaaaaaaaacaaaacaaaaaaacagcaaacagaaaacagttgtgcccccaaaagtactcagaagtcatatgttatttacaattgggtttgtgtgggatgggaagtagggcggatgagccagtgcttttgcaatgaagatgcaatagtcattgtcctctcccactgtctcctctttcctcaccccatggcagctttcatgacccattcccaaagggtccaccgagtcctgaactcagcttcatcaccaacattcctcgccttcagttgaattcaacactgttaagggagtagaggcaaagacttgggtcagggagagggtgggaaacacagaacaaactctctcggcacaacccaagttcagagacgaggcctcctcagatgaggaagatgatgccctcagacaccatgacctgattgtcatcctgcatcttgctcagagcagcctggatctcaactgaagagaagggctcttcgctgtcccggttgatggattctgtgaggcgattcatgccgattgactgcgcatgagcttcccggaacacatccaagagggccaccttgaatgccttcaacctggattcactcaactccactttctgggattccttggtctcctgtgagtctgccgtctttggagtgtgtacttgaggcatttcctcctctgtgtcactgaagtcataggggtcgtatgaatccccatctttggcatctggctggcgagtcttccttctcttcctcttctgctcctggtcctcttggcttttctcctcttcatcttctgtctctgattcatcctcacttcgcttcttacgtttcttctccttctccagaaccttcttaaagtaagcatactggaccaactccacagcttcctctgcatcctgcaggtccacagtcttgctcatgcgggccttcgcatgggctgtggccagtcgaatcagagtttccagtgttcgggctgtaactggagatgtcctggcggtgtctgagctcatgctatcctggctgcgcaggcgtgaatactcttctgcaatgtaggtggccgactcctgtgtcaggacaggcttgatgattttggccacatggatgtacttcttcatgaatgctgcactcaccatcttctcctttttcttcttggtcccatgtagaaggttgtcatgcttctcataaatctgggtgtcctgctgatcttcctggctaaagttgggatcatctgtggccaggatatccacagcactacccaagggcatagcatcgccatcctgctccccaggtgctctgtaacggtgcatccgaaggacatggtctgagatctcccgatcctgctcaggatccatctgatccagcatgatgaagagcaagtcaaatcgtgacagcagtgagtcctgtagcccaatgttctccattggagtcttatactggtcatacctgccgtagacagggttggcagctgccaaaacactgcagcgggcattcagccgagcatggatgccagccttggcaatggtcactcgaccctgctccatcacttcatggatggctgtgcgatccatgtcagacattttgtcaaattcatcaatgcaaaccacgcctcggtcagccaggaccatggcccctgcttccagacggcgctctcctgtttcctggtctgtggtgacagcagccgtcagacccactccagaggagccccggccagtggtggggatagctcggggtgcagtgcaaagcacataccgcagaagctgagacttggcaacggatgggtctcctattagaagaatattgatgtccccacggatgtggctgccattttctaggtctcgttccacccctcccaagagcaagcagaggattgctttcttgacatagtcatgcccatggatacttggggccaatgacttggccagctggtcaaagatatccttggatcgggttttactgaacttcttgatcttggctatatcctcagcagagaaagagggctgagcatccttgctcatctgcttaacattacaggcaatcaggacagtcctgaaggtcccagaggtgtagcctcccttctttccaggaaggcaacggtaggttcccaccacctgaacccggtcaccaggcttcgctttatccaccaagtcatcatccagaatgacgtccacagagcgggggagctggccggctggggccttctccggcatctcctggatggtgatggtctggtgatccttgtagacagaaaggccatattctgtctcaaggggattgttctcctcatccttggtaggatagacagagctggagggaaaggccaccagggtggtgagatcagaataacgtcgctctatggtcttcttagtagcaggacagtagtggacactgcggacgactttgggacgaactagagaacatttagtgacaatgccctccacacagaccacacagctgaggaagcaggaggtaagagtccgcggggagacgtgcttggagccaaagctgccttccagtcctacgtagaactcctcatactgcttggcataggtagcatcaatggaggccacaaaatcctttaaggcccgctggaaggcaaccagctcctcaaaggcattgttcagaagccggttagccctcttctcgtttttcctgcgcaggtcattcacattgacaatcagccggtattggttgtcactgatcagctcccgaactttgctctgataaattccctggtcttcctcgtcgtccaggaagtccaggtaatctctctgagcctcccgcagctccacatcgtccagcaccacggtacccgccatgcccgctgccaaagaactacctccaccaaagtcgcgtggaggttcccaggatgactccaccccggcgcgaaaacttccgaaccttcctacttaagccgcggacgcgtnn

SEQ ID NO: 20313 - DNA, 898 bp, Homo sapiens
gccacaccactaagttgttgcacaaagactcagtggacagtgctccaatcctcactgcatttaacagctcacacaaaggacggattaactgtaatagtaacactacacccatagtttttgtctcaagttaaaataccaataactattacagtgtctactggatttatgtctatataacaaatcttgatactgcatccacaacattactggcgtgctttttgctttgcttttgtgtgcttttgtgtgtctgcctattaatacgtccgctgcttttgtctgtgtctacatacacatccttaataatattggtattaatacgtccgggcaggtacgcggggaactgaaaatccacaagacagaatagccagatctcagaggagcctggctaagcaaaaccctgcagaacggctgcctaatttacagcaaccatgaggaaaggccacttaaggatgcagcaagaaggagccatctgcaatccaggaagaaattccttgccaggaaccaaattggttgtcaccttcatctaggacttctagcctcgagaacttacaaatggtgatgatcatcaggtcaaggatagtctggagcaattgagatgtcactttacatgggagttatccattgatgacgatgaaatgcctgatttagaaaacagagtcttggatcagattgaattcctagacaccaaatacagtgtgggaatacacaacctactagcctatgtgaaacacctgaaaggccagaatgaggaagccctgaagagcttaaaagaagctgaaaacttaatgcaggaagaacatgacaaccaagcaaatgtgaggagtctggtgacctggggcaactttgcctggatgtattaccacatgggcagactggcagaagtccagacttacctgga

SEQ ID NO: 20314 - DNA, 2059 bp, Homo sapiens
  misc_feature 2058, 2059: n = A,T,C or G
tcgacccacgcgtccggcgcgccgcagactgtgctcaacttggcacgcggccgggaccggcggttgtctgtggccggaggctgatcagtgttctagaacagatcagacattttgtaatgatgcctgaaataaacactaaccacctcgacaagcaacaggttcaactcctggcagagatgtgtatccttattgatgaaaatgacaataaaattggagctgagaccaagaagaattgtcacctgaacgagaacattgagaaaggattattgcatcgagcttttagtgtcttcttattcaacaccgaaaataagcttctgctacagcaaagatcagatgctaagattacctttccaggttgttttacgaatacgtgttgtagtcatccattaagcaatccagccgagcttgaggaaagtgacgcccttggagtgaggcgagcagcacagagacggctgaaagctgagctaggaattcccttggaagaggttcctccagaagaaattaattatttaacacgaattcactacaaagctcagtctgatggtatctggggtgaacatgaaattgattacattttgttggtgaggaagaatgtaactttgaatccagatcccaatgagattaaaagctattgttatgtgtcaaaggaagaactaaaagaacttctgaaaaaagcagccagtggtgaaattaagataacgccatggtttaaaattattgcagcgacttttctctttaaatggtgggataacttaaatcatttgaatcagtttgttgaccatgagaaaatatacagaatgtgaatatgtaggtaaatgattacagaaaaatttatctgcttaacaaacttagaatgactttttccttttaaatttagttctatcattaatttatcattaaatttagttctatcatttggtactatcattaatgtattatatacactgatactttaaaacttgtgtggaaaaaactaacttataattttgtatcacacaccctggatatgtgttctgtttctaagcgacatttgtgagagattattgtaaaatgagagcgagcaaataaaacttaatttaatctttgcagatacatacttatgggaaatttgaacaaatgagtgaaactctgtgtttttagtaggctgtgataaacatttccggagcacttgcagaggacttgctatttgccaggtgctttatgtatcattaaatttttctcatagttcagaaaaatgtgcaaaggaaactattgtctcgctccttcaaaacagtcttaattaactttcatattagcagattaaactagcagagcaggttcaagggaaattaaatgatatggaccctaatttgtatcattctgagttgattgtgtggtttattcattctggaaacatgttgatacttacagtcagccactgcttttgataagtgatattgattaggttgaatcttcttgtaaatagtatttaccagttagcaaagtctgtgttttcagaattacagtgagcacagaggtgttcataaaatgggaattgagtcccactcggtaagagttgcttaaacttgacactgttgacatttgggctggataaaacccctgtggtggggtctgtgctgtgcattgcaggatggtgagcagcgtccctctcatgtgacacccacagttatgccggatgttgccagatgcccctaggggacagagtcaacccccaactgaggaccactgtcctacagagtcaggaaatattgtagggagaaaaaaataacaacaacaaaggcctgtgttaatgttaaatagatgagattatggaatgtgtatattaatgttaaaaattgtaccttgatcaatgtactttttataaacttgccatagatatctcagatttgaaacctcaagacagatttattattcttaaatgctgtatgataatgaagaaaaataaaaatttatttcttgcaaagttaaaaaaaaaaaaaaaaaaaaaattcctgcggccaatttagtagtagtaggcggccgctctacaggatccaagcttacgtacgcgtgcatgcnn

SEQ ID NO: 20315 - DNA, 322 bp, Homo sapiens
  misc_feature 314, 315, 316, 317, 318, 319, 320, 321, 322: n = A,T,C or G
ggccgagaggtggttacattcgttgaaggacaccagctgcggaatttgcggctttggcagattgaaatcatggcaggtccagaaagtgatgcgcaataccagttcactggtattaaaaaatatttcaactcttatactctcacaggtagaatgaactgtgtacagaatccattctcattctttacttgctacattatgaccatgaggagggcagagtagaggtgaactctctgtatacttgctgaaagtcttcttgtacacattgctttttgtacccgtcgcttctagcctcgtgccgaattcttggcctcgannnnnnnnn

SEQ ID NO: 20316 - DNA, 2142 bp, Homo sapiens
  misc_feature 1, 2140, 2141, 2142: n = A,T,C or G
nccgctgtcgctttgttacactgccggggatttccgtgtggcccgccccccagtggatcggtgcccccccgcccattgttacttacccgttaggggccatttactcccggggagaggtctgattcaatggtgagcaaattgttgtgtcccagcgggcccattggcccatctcgagtcacgcaacgtggcctcctgggttcaagccatctccgctcagtctcccaagtacctggatccacaggcacccccgacacactcagcctgatttttttatctttagtagagacggggttcaccatgttgccacgctggtctcgaactcctgacctcaggtgatctgcccgcctcggcctcccaaagtgctgggattacaggtgtgagccaccgtgcctggcggaactaagattaaagcaaagaccacgatcaattacttaacaagaacaccacattttgatgctctctgtagggtcatttttttttgtcaggaaaatatctgatctgattcttcccagcttgcttcccctacaacttaataagcccttcactaacccctgtatgtattaactgcaattgcctagcccggcatttacactctcaaaagatttaacgcaattacaatcaaaaaacacttgtcatatataacactttttcacatggaaataaattggtggtttaaggtttacaattcctttgaataaaatttcagttattagttacaaaatgctaagacagattgaggtctcaaagaaagaacttgagaaaattatgttttaaaggacttcacaaatatgaagcataattgttagaatcctgatacaaagtaacttttcctaggtttaaggttcaagtctgaattcttgaattgtccagcatcaacgagacctcatttatattttttatttttatcattactttcagatacagggtctctcactattttgcccaggttggactgctgggctcaatggatcctccccgcctcagcctcctgagtggctgggattacaggcatgcaccacgcccagtgctacaattttttttttaaaaaagcccggaaacacaatgggcttgcatcgtgttggcagcaggtgcctctcagctggtgctggacagaaggggcttgcagtatttgcactgaatccaaacccggtacattgtcagttgctttcctcggttcacctgcagtcggcgatccaccaggttctgaactttttccagtccagcagtggtgaaaagcgtgtccagttcctcttgtgtgaagaagtaaactctggttccatcacctctcacgtagaaatttccagatagacactgaccttttttaaaccgaagctgagccatgtcatagcggccgtaatctcgcagaagcatcatcccgccaggtttcagaagcctgctcagcctgttgatagccttctgcatcttgtctggaacaattgctgaaagaacaaatatgagaatgataatatcaagactgcccttgggcactgggtaactcttctcttcatcacacaggtcgtgaacaaaggcaaaacaccgagaaggatcatattctgaatttgtctggaccagttctatagctgtggaagaaaaatcacagcaataaacaaagagtcctgggtcattgttcgtttgtaaaattggaaagactgtgtttcccacaccacagccaacctccagtattcggtaggtggctgaggatccaggaaactcatcagcacaaatttccaggtcactaattttctgagttacattctcctccacaggaggtgtctgtgttttatgttcaaggctcttcgaagaacacttgtgctgttcttccattattaaaccaggtccatcctcattgtttctacattcacatacttcactcttgttctccaagaaccaatccttcaaatgattttgattttggctaggtgccagctcagggaattcggtaaaaagccaatgtctatccttgaaaaacccattttcgtggattttgtagaagtcattccagtatttgtgggcattgatctcataatcaacaggcattgtggtggaagacccgcgccggatcgctcaggaaccggcttccgaactgctgcctcttatcggcgaggattgcaggtgcaccttcagggtaggagccggccannn

SEQ ID NO: 20317 - DNA, 353 bp, Homo sapiens
aggtaccttatcagctaattgggctcctttgaaatgctgaggatctgcttacgcaggttaactctttgaggaagggggttgggtaagtagcccttaatgtcttgtaaatcaaggggccagatggcgttcgtcaggctttcccagctaagggagagtctactcatatgggaaacaagcctaggtaattaaggagacaaaaagggaaaatttaaaaatagggttagtaaaaacaaggttaaaatagggttagtaaaaaaacaaggtcaggcattacaaaaggattctcctgtctcagcctccactgggattacaggctcgcaccaccaagcccagttaacttttgtatttttagt

SEQ ID NO: 20318 - DNA, 2324 bp, Homo sapiens
  misc_feature 1, 2, 3, 2323, 2324: n = A,T,C or G
nnngcaacttaaacatccattccccgggctttccaccattcagtgttaacaatctatttctatgtttcgtgcgttcccggttgcaaagaactgtgacaacaggataaacaaataatgtttactttatttatacatccccaggatttctgacacgcatttgttccttaacctgatgtttcaggctcaacactaatctgtcacctggtgtacgaaagcagtaatagaatcctgaaattgtaatataattcatttcttgcttaaccagcatcaaatggttttcgtaaatcaatgtggcctaattttggttaacatagcacatggagataatcatctgaaagttatagggcactgccactgctgaatcagagcatgcccaatatttgaggtggctctgatttcctggcagctgaactcgggtagtccagtggcctagctggtaccacatctattcccatccagagacattctctggcaagtgttctcagctgaaaagtggttggggatgattcttaccttggtaattaaatgaagctacacatttgggtaatctagcaaatgaagtattttttccctcttggcaacttgtgtcagagttactctggtctgagtcaactttcgctggggaaaacctatggaacctactgcaaaaagattgtccaaaatgcctaagaaaatactcctctgatgcatttagccttcaaccctacctgtcttgctgaagggagaaaaatgttttagtacattataggcccagcagcttttattcatgtccaccagctagttgcacagagaatcatgtgtacctaactaaggatgatctaggataagtaactcctgttttatattgagtattttagggaagtctttaaaagacttgttttatatctataaatctaggttattacaaatacaagaattttgtaccttaaataagcctcatttctatttcttcttcattaattctccatctagtcttgtgaaaaaaaaaaaaaaaaaaccctcagagatagtctttgtgaagagcttctgacagaatcactgagtaccttccttcccccagatgaggaagacaagggggtctcagtgtctgtgctgtctcctcttctcttccccaaccaaggactgtgccattactgcccgtctcaactgtccatgcaggaggacagagttgcctggtactcttacccttgtccctctcctaaagggagcacaaggaaactgaagagactgaaaaagaagagagtttgtagctgaaaaagaatagggatagcaaggaaacccagaactgcattcccctaagtggggccatcccatgtgattgaattgtccatagcttgcctatggtgagaaatgtgcatgctccgtgagctggtctcttgaaacaggacttatgcttcctctatattctggttaaattttccaaacacataagttcactgagcacagatttcttatccagagacaagtagaatctaaccgcagactgttggcagagtttccaggcacttagccatgttcccttcctgactcaaatccccaaaggccttcactctcactgagaatcacactactgtcccatagataaggcaggcattgaagcacctgtcgtgatcctctaggggggagaatgaaaggttatttcctgcattgcatcatcatagcttttaatataatgctacagaatcatatccacattaggttagagttcagatatttggatatgaatacctaacctagccatatccatggccatctctgttcttttcagcaatgttttccatattatattagcaatgacagaaacagaacaagccaagatccagtcagttcttgggagcttgtctagagcaccaagtaatgaaatagccaggtagtgggatgactgtacctttaaaaatacataatttagtttgcaagctatattatgctactttctatttttccttgttactttatagcaattcattttaccctcaccaaagtcaatttagaaacttattattaactgggatgtgtattgatatgttgggcccggcgttcagtggtcaaatccaggtactttcgctacgaatgacttcgcacggaggcccgtgtgtgactcggtgaacccaccaatttaaaaccttgatgtccaactggggtgcacggataaataaaccaacgaaggggaaacggaaacgcatccggggggaaacgaagaagggcaatatacgaagaggtccacaggtcagatgtagcagcaacaacgcaaaaagtcaaaaaaacaaggggcgcggaaacagacgagaaacgacaacaacgagaaagcccaacatgagaccann

SEQ ID NO: 20319 - DNA, 4182 bp, Homo sapiens
  misc_feature 1, 2, 3, 4, 5, 6, 7, 8, 9, 10, 11, 12, 4181, 4182: n = A,T,C or G
nnnnnnnnnnnnaccgggtgaggggcctgacggcagagtcggtccagaactgcccggacagcgacgcacagcgaggagccaaaatggaagagggtgcaagtcccctcctggggccccagacgccccctcctttcttgctgcctggagcaggggcagtgctgttagtggctactcctggtgtgaacagcccatcctggccaccttccacaggaaacctgacctgaaggacagaagaggaaggaagcaggctttgccacaaatgtcagtgcagaactctggctggccccaccaagaagacagccccaagccccaggatccaggtccaccagccaactcagacagtgactcaggccacctgccgggggaggaccctgaggatacccatgctcaggaattcctgtctctgcacctgcttagaacatggggttttgactttaaactcattcacatgagtattcattatctctcctagggggtctgtattgtcaaaccagactctaggggctttggccccaaggcgtgaagggggttaagaagggaaagcataagaagggaagctgttttggggtgtggggcctccccagcctccctcaaggaagaccacacatgcaggcatcagtcagctatccttgcactcagtgaggatctgcaaggaggaccctcccaaatggagggcatgcttagaagctgctctagattggagaagaggtggcaatgatgagggggaaagaaggagaaaggaaagaaaaacctagtttcactcctccccttcttccatgtctcctcagggtcctgcagttctgagcttgggttccctttgcctggacaccaaccaagcccccaactggactggacttcagaccctcctgcagcaactccctccgcaggacattgatgagcgctactgcctggcccttggggaggaggagcgggccgagctgcagctcttctgtgccaggcggaagcaggaagccctgggacagggggtagcccgcctggtacttcccaagcttgaaggacacacctgtgagaagtgtagggagttgctgaagccaggggagtacggagtgtttgcagcccgggcaggggaacagcgctgctggcaccagccttgctttgcctgccaggcctgtggccaggccctgataaacctcatctacttctaccatgatggacaactctactgcggccgtcatcatgcagagttgctgcgcccgcgctgcccggcttgtgaccagctgatcttctcctggcgctgcaccgaggcggagggacagcgctggcatgagaaccacttctgttgccaggactgcgccgggcctctgggcgggggacgttatgccctgcctgggggaagcccctgctgccccagctgcttcgagaaccgctactcggatgcaggctcgagctgggccggggcactggaagggcaggcattccttggagcgcccccaccgcaccccccagacccaagcctcggggcccgcagctctcaccgcgcatccctggccggagcgttccaagggccgcccgaacccaccccgcgccgcggtcggggttgcggcgccagactccctcccaggcgcgggaggcggacgccctctggtggaggcgggggaccctggcgaggactctcggcggcggcggcggcgcgcacggcccaggggctgggcggggcgggaggctgggcctcacccccactagctgcggtgtaggtccagctccgcggctctgagaccagcgtttccgacccggcccggaacaggggagactggactcgaccgaactgaaggaagggaccaaacctcggtgaactctgcaaccctctcccgaacactccttctcgctgctgccggcggttccagcctgcaaactcagagggggctgcctggatccagtccccagcaggagaaccgacctggggacaaagcggaggcacccaaagggcaggagcaatgccgcctggagactattcgtgatcccaaggacacccctttctccacctgctcctcctcctctgactcggaacctgaaggatttttcttaggcgagcgccttccccagtcctggaagacccccggaagcctccaagcagaggacagcaacgcctctaagacgcactgcaccatgtgctagtggcgcagctcagagaggggatgtgagtgggaggaaaggggtctgtaaagcgggagaacaaggctagcctccccctaacaatcctagactgagacgcagtcaggcgcacgcccgcaagaggcggcgaggtgacaagtttggagtgcgcccccttcagtactgcgcgttctaagacttttggcggagactttcttggcaaaacccattccccaaagctacgcttcccctgctgagatagcccctacccccacctccacaggctgggacagccccgtccccaccatcctcctcccaagccaattaaatgatcacagcacgcgtgacagttaccggctggagagccggaggtgggaccgggagcaggggaccgtagaaccgggccgcgctcctcccctcctagagttcgtggaggcgcagcagagggccgtccctcttccggatgtcggactaagcgaacagcgcccccactgccggccggtagcagccggaagtgccagaccggaggtgcgtcattcaccggcgacgccgatacggttcctccaccgaggcccatgcgaagctttccactatggcttccagcactgtcccggtgagcgctgctggctcggctaatgaaactcccgaaataccggacaacgtgggagattggcttcggggcgtctaccgctttgccactgataggaatgacttccggaggaacttgatactaaatttgggactctttgctgcgggagtttggctggccaggaacttgagtgacattgacctcatggcacctcagccaggggtgtagccaagtagttctaatgccacctgtcgtcttatcatctgattgcagacaaatggaatcctgtgctgaacccgaatcttccaaaaaacagcctacaatctgtgaccaccacaagatgtgccctgatggcagctgaagtttgattcagatgggcacttttcttccccttccctgcctagtttccttttgttccttgagtccacgcagaattccattctctggtcagcagacaggcttaagctaaagtattgcctctattctgtaaagttctgtacatagttcccaagcttctgcagggggtgatttttgctcttgtcctgagaaataacagtgctgttttaaaaaacatttgaaataaataccgcacacaaaggaaaaaaaaaaaaaaaaatcaaaaaaaaactcgagggggggcccaggaatgacttccggaggaacttgatactaaatttgggactctttgctgcgggagtttggctggccaggaacttgagtgacattgacctcatggcacctcagccaggggtgtagccaagtagacaaatggaatcctgtgctgaacccgaatcttccaaaaaacagcctacaatctgtgaccaccacaagatgtgccctgatggcagctgaagtttgattcagatgggcacttttcttccccttccctgcctagtttccttttgttccttgagtccacgcagaattccattctctggtcagcagacaggcttaagctaaagtattgcctctattctgtaaagttctgtacatagttcccaagcttctgcagggggtgatttttgctcttgtcctgagaaataacagtgctgttttaaaaaacatttgaaataaataccgcacacaaaggcaaaaaaaaaaaaaaaaaaaaaaaaaaaaaaaaaaaaaaaaaaaaaaaaaaaaaaaaaaaaaaaaaagggaaaaaaaaaaaaaaaaaaaaaaaaaaaaaccttgtgggccgcctggcccaagtcgattttagactggggcaggtttatgcatgcggccgaatttcgggctaattgggccaattcgccctatagggggcggaataacaatcaacggcccggcgtttaaaacggtggggattggaaaaaccctggggttcccaaactaaatcgctttgcagaaaatccccttttcgccagttggcgaaatagcaaagaggcccgaaccgatcgcccttccaaaagtgtggcaccctgaatgccaaaggaaattgaagcggttaatatttggnn

SEQ ID NO: 20320 - DNA, 1362 bp, Homo sapiens
  misc_feature 1, 2, 3, 4, 5, 6, 7, 8, 9, 10, 11, 21, 22, 23, 24, 44, 59,60, 61, 62, 63, 64, 65, 66, 67, 68, 69, 70, 71, 72, 73,74, 75, 76, 91: n = A,T,C or G
nnnnnnnnnnnaaaaaaaaannnncccccccccccccccccaanttaagggaggggggnnnnnnnnnnnnnnnnnnggtaccccacccggngtggaaaatcgatgggcccgcggccgctttttttttttttttttcaaagtatataactgataattctttattactaaaggtttatttacatagtgtttaaagcataataaaaaataaattacaatacaaaagtgctctttaggaaggagacactaaacaacaggcccatattaccccttgactatttagccaagacataagctacaaattttgccggaaaaactgtccatacatttttaactacttcttcattattcttatggaccatcatccaggacatctgtttgaagaaatatccagttataatattttcaaaggttagaattgtgaagaaaaaatataaaatgtgattaaaggatatatagccttcagatgtaatttacagttttaaaattgcactttaaaactttgcttttttagacagtataaaaggcagaatgagacagatatgtaatgaatttcagaactgaggttcatatgtaaatcatacaattttttaaaaaatagtattggaaaaatatcaaggtctatacatttaaatacagataatctgtttgaaaattccagtttgttaaaagaaaaaacatctgcagtccagtcgattaaaaactgaaaatatcaatctgtaaagattgatcttgagcctaaacttttagatgctttctatcctttgaacaaatgcttctgtatcttaagcttgtaacttttctttcaatagcccacttataaagtttgctttatctaccagtatgggggaaaaaaagaataaagttggttttattccatttaaagtagttttggtatttctttgctccataccaaagtcttcctcccccaaaataaacaagtgaattagaattaaaaaagaaaaaaagttaataatttcttctagttctcagagttttatataaaactgtacaaaattatcatcatttagagttgatttttttcaccagccctgaattttcaaacttgtaatatgctgtttcacaatctttttattaaattacttaatgattccagtctgcaaatgagcatagactttgctctgttgttatagatcattgaattgggggggaaacatagtaagctaaactatccgtcactgctcatgaaagacccacattgttgattatttttcccagcacagaagaaaagtgacaagtgattcatcctgcaatggcctctgccaatcttttcatatctatgtaaccttttgtagttactgtgtgatccagcgttgtgctattgtaaatcttgcattaattaat

SEQ ID NO: 20321 - DNA, 2547 bp, Homo sapiens
ccgggcaggtacgcggggagagggaggaaggacatcagaccagacagtcacagcagccttgacaaaacgttcctggaactcaagctcttctccacagaggaggacagagcagacagcagagaccatggagtctccctcggcccctccccacagatggtgcatcccctggcagaggctcctgctcacagcctcacttctaaccttctggaacccgcccaccactgccaagctcactattgaatccacgccgttcaatgtcacagaggggaaggaggtgcttctacttgtccacaatctgccccagcatctttttggctacagctggtacaaaggtgaaagagtggatggcaaccgtcaaattataggatatgtaataggaactcaacaagctaccccagggccccatacagtggtcgagagataatataccccaatgcatccctgctgatccagaacatcatccagaatgacacagggttctacaccctacacgtcataaagtcagatcttgtgaatgaagaagcaactggccagttccgggtatacccggagctgcccaagccctccatctccagcaacaactccaaacccgtggaggacaaggatgctgtggccttcacctgtgaacctgagactcaggacgcaacctacctgtggtgggtaaacaatcagagcctcccggtcagtcccaggctgcagctgtccaatggcaacaggaccctcactctattcaatgtcacaagaaatgacgcaagagcctatgtatgtggaatccagaactcagtgagtgcaaaccgcagtgacccagtcaccctggatgtcctctatgggccggacacccccatcatttcccccccagactcgtcttacctttcgggagcgaacctcaacctctcctgccactcggcctctaacccatccccgcagtattcttggcgtatcaatgggataccgcagcaacacacacaagttctctttatcgccaaaatcacgccaaataataacgggacctatgcctgttttgtctctaacttggctactggccgcaataattccatagtcaagagcatcacagtctctgacggacgattcagcatctggaacttctcctggtctctcagctggggccactgtcggcatcatgattggagtgctggttggggttgctctgatatagcagccctggtgtagtttcttcatttcaggaagactgacagttgttttgcttcttccttaaagcatttgcaacagctacagtctaaaattgcttctttaccaaggatatttacagaaaagactctgaccagagatcgagaccatcctagccaacatcgtgaaaccccatctctactaaaaatacaaaaatgagctgggcttggtggcgcgcacctgtagtcccagttactcgggaggctgaggcaggagaatcgcttgaacccgggaggtggagattgcagtgagcccagatcgcaccactgcactccagtctggcaacagagcaagactccatctcaaaaagaaaagaaaagaagactctgacctgtactcttgaatacaagtttctgataccactgcactgtctgagaatttccaaaactttaatgaactaactgacagcttcatgaaactgtccaccaagatcaagcagagaaaataattaatttcatgggactaaatgaactaatgaggataatattttcataattttttatttgaaattttgctgattctttaaatgtcttgtttcccagatttcaggaaactttttttcttttaagctatccacagcttacagcaatttgataaaatatacttttgtgaacaaaaattgagacatttacattttctccctatgtggtcgctccagacttgggaaactattcatgaatatttatattgtatggtaatatagttattgcacaagttcaataaaaatctgctctttgtatgacagaatacatttgaaaacattggttatattaccaagactttgactagaatgtcgtatttgaggatataaacccataggtaataaacccacaggtactacaaacaaagtctgaagtcagccttggtttggcttcctagtgtcaattaaacttctaaaagtttaatctgagattccttataaaaacttccagcaaagcaactttaaaaaagtctgtgtgggccgggcgcggtggctcacgcctgtaatcccagcactttgatccgccgaggcgggcggatcacgaggtcaggagatccagaccatcctggctaacacagtgaaaccccgtctctactaaaaatacaaaaaaagttagccgggcgtggtggtgggggcctgtagtcccagctactcaggaggctgaggcaggagaacggcatgaacccgggaggcagggcttgcagtgagccaagatcatgccgctgcactccagcctgggagacaaagtgagactccgtcaaaaaaaaaaaaaaaaagtctatgtggtcagtcactactcttgctgcagttatgaaaaccacgaggccaagtttgatgaaaataaccctattttgaaa

SEQ ID NO: 20322 - DNA, 2553 bp, Homo sapiens
cagcgtccgagcacacagagctcttttccctaacatcactgtgaataatagtggatcctatacctgccacgccaataactcagtcactggctgcaacaggaccacagtcaagacgatcatagtcactgagctaagtccagtagtagcaaagccccaaatcaaagccagcaagaccacagtcacaggagataaggactctgtgaacctgacctgctccacaaatgacactggaatctccatccgttggttcttcaaaaaccagagtctcccgtcctcggagaggatgaagctgtcccagggcaacaccaccctcagcataaaccctgtcaagagggaggatgctgggacgtattggtgtgaggtcttcaacccaatcagtaagaaccaaagcgaccccatcatgctgaacgtaaactataatgctctaccacaagaaaatggcctctcacctggggccattgctggcattgtgattggagtagtggccctggttgctctgatagcagtagccctggcatgttttctgcatttcgggaagaccggcagggcaagcgaccagcgtgatctcacagagcacaaaccctcagtctccaaccacactcaggaccactccaatgacccacctaacaagatgaatgaagttacttattctaccctgaactttgaagcccagcaacccacacaaccaacttcagcctccccatccctaacagccacagaaataatttattcagaagtaaaaaagcagtaatgaaacctgtcctgctcactgcagtgctgatgtatttcaagtctctcaccctcatcactaggagattcctttcccctgtaggggtagaggggtggggacagaaacaactttctcctactcttccttcctaataggcatctccaggctgcctggtcactgcccctctctcagtgtcaatagatgaaagtacattgggagtctgtaggaaacccaaccttcttgtcattgaaatttggcaaagctgactttgggaaagagggaccagaacttcccctcccttccccttttcccaacctggacttgttttaaacttgcctgttcagagcactcattccttcccacccccagtcctgtcctatcactctaattcggatttgccatagccttgaggttatgtccttttccattaagtacatgtgccaggaaacaagagagagagaaagtaaaggcagtaatgccttctcctatttctccaaagccttgtgtgaactcaccaaacacaagaaaatcaaatatataaccaatagtgaaatgccacacctttgtccactgtcagggttgtctacctgtaggatcagggtctaagcaccttggtgcttagctagaataccacctaatccttctggcaagcctgtcttcagagaacccactagaagcaactaggaaaatcacttgccaaaatccaaggcaattcctgatggaaaatgcaaaagcacatatatgttttaatatctttatgggctctgttcaaggcagtgctgagagggaggggttatagcttcaggagggaaccagcttctgataaacacaatctgctaggaacttgggaaaggaatcagagagctgcccttcagcgattatttaaattattgttaaagaatacacaatttggggtattgggatttttctccttttctctgagacattccaccattttaatttttgtaactgcttatttatgtgaaaagggttatttttacttagcttagctatgtcagccaatccgattgccttaggtgaaagaaaccaccgaaatccctcaggtcccttggtcaggagcctctcaagattttttttgtcagaggctccaaatagaaaataagaaaaggttttcttcattcatggctagagctagatttaactcagtttctaggcacctcagaccaatcatcaactaccattctattccatgtttgcacctgtgcattttctgtttgcccccattcactttgtcaggaaaccttggcctctgctaaggtgtatttggtccttgagaagtgggagcaccctacagggacactatcactcatgctggtggcattgtttacagctagaaagctgcactggtgctaatgccccttggggaaatggggctgtgaggaggaggattataacttaggcctagcctcttttaacagcctctgaaatttatcttttcttctatggggtctataaatgtatcttataataaaaaggaaggacaggaggaagacaggcaaatgtacttctcacccagtcttctacacagatggaatctctttggggctaagagaaaggttttattctatattgcttacctgatctcatgttaggcctaagaggctttctccaggaggattagcttggagttctctatactcaggtacctctttcagggttttctaaccctgacacggactgtgcatactttccctcatccatgctgtgctgtgttatttaatttttcctggctaagatcatgtctgaattatgtatgaaaattattctatgtttttataataaaaataatatatcagacatcg

SEQ ID NO: 20323 - DNA, 588 bp, Homo sapiens
actacttttttttttttttttttttttgactttatatataatactttattttatacaattcagtatatcatgttaacatatttcacttttaattttatgatatgtgtgacatatttttaattttatggattcaattatactatcataatttttttaaagtttgtatctttcattaataaggaggttccttattaatggattttttttcctgtagcttctgagaacacatttttagatacccggcttctagttatacctgaagctccacagtgtagacatgttttggccaaccttgttttatcggtgtatgaaatttgtgctaataggatggatccaattgtcattacattagaaaactaaatgggaaacatttcttctacattctgtgcaacataacaaaattatacatagagattattcaactaaataaagtgataatgttgatatcaacagagtggcgttcgttagttctttctatgtttaggggttatgtcatgcatgtatgacacatagggacattatacttatatgaatcatatagcaagaatatctacatgaatctatatacagttgtatcatctgcaaagt

SEQ ID NO: 20324 - DNA, 1066 bp, Homo sapiens
cgcgtccggcccagctgaaggcagtaagctcggctcacagtcgcaggagagttctggggtacacgggcaaaggggcttgagaaggcccggaggcgaagccgaagagaagcaactgtgccccggagaagagaagctcgcccattccagactgggaaccagctttcagtgaagatggcagggccagaactgttgctcgactccaacatccgcctctgggtggtcttacccatcgttatcatcactttcttcgtaggcatgatccgccactacgtgtccatcctgctgcagagcgacaagaagctcacccaggaacaagtatctgacagtcaagtcctaattcgaagcagagtcctcagggaaaatggaaaatacattcccaaacagtctttcttgacacgaaaatattatttcaacaacccagaggatggatttttcaaaaaaactaaacggaaggtagtgccaccttctcctatgactgatcctactatgttgacagacatgatgaaagggaatgtaacaaatgtcctccctatgattcttattggtggatggatcaacatgacattctcaggctttgtcacaaccaaggtcccatttccactgaccctccgttttaagcctatgttacagcaaggaatcgagctactcacattagatgcatcctgggtgagttctgcatcctggtacaccacaatggctgagcacttcctgacgttgctggtagtgcctgccatcaagaaagattatggttcccaggaagacttcactcaagtgtggaacaccaccatgaaagggctcaagtgctgcggcttcaccaactatacggattttgaggactcaccctacttcaaagagaacagtgcctttcccccattctgttgcaatgacaacgtcaccaacacagccaatgaaacctgcaccaagcaaaaggctcacgaccaaaaagtagagggttgcttcaatcagcttttgtatgacatccgaactaatgcagtcaccgtgggcggtgtggcagctggaattgggggcctcgagctggctgccatgattgtgtccatgtatctgt

SEQ ID NO: 20325 - DNA, 748 bp, Homo sapiens
  misc_feature 1, 2, 3, 4, 5, 6, 7: n = A,T,C or G
nnnnnnngagatggctcctcttggaactatgcatctctcctgatacttggatgcttttcctctgactgatgaagatccctgaatccccaaagagggcccgcctgacagggccctaggcagtacacttctagcacctagcagagagaggcttcactacatcatgcttcctgacatctctccctttgaagagcagtcagactcctgctttgctcttcagacttaatttgggggtttaacaggtgaggttgctgggggaactcttttacaacatctctctgaaagaatccgggctgccagtttcatttggtttgggtgtcagtagcatgatggaaagacaaaaaaacacaacttgacatctgcagaaatgggttcaaattttacctgcaactcaccaattctgtggccttggttcagcaattaaactccctaaaattcagttttttctttgtaaaatggggttatgaacagtaccaaatgaagtgtgaagacaaggccatccaccactttatagagggtgtaaaaataaaccagaaatcaagggagaaagaaaagatgaaagacaaactgcaaaaaattgccaaaatgcgactttctaaaaatggagcagattctgaggctttgcatgtcttggcattccttcaggagctgaatgaaaaaatgcaacaagcagatgaagactctgagaggggtttggagtctggaagcctcatcccttcagcatcaagctggaatggggaatgaagaatag

SEQ ID NO: 20326 - DNA, 490 bp, Homo sapiens
  misc_feature 468, 469, 470, 471, 472, 473, 474, 475, 476, 477, 478, 479,480, 481, 482, 483, 484, 485, 486, 487, 488, 489, 490: n = A,T,C or G
ggcggccgcccgggcaggtacgcggggacacaagacatcatcttgaaggaaggatggctttggccagaccaagaccgagacttggagacctgattgagatttctcgctttggctatgcacactgggccatctacgtgggagatggctatgtggtccatctggctccggcaagtcactggtgcagtcacgacagtaggtgtggcagcaggcctgctggctgccgcaagccttgtggggatcctgctggccagaagcaagcgggaaaggcaataaatccaagaaattgtcccaacaaccaccaattcttacggaggaatattatttagccagcaggagtggagtttggtttactgattttactgttttgtgttcatgaatctttattttaatggagttaaaagcacaggaaaatgtatttggaaatgcagcttagtatgaattctattaaagacacaattgggctctgcnnnnnnnnnnnnnnnnnnnnnnn

SEQ ID NO: 20327 - DNA, 264 bp, Homo sapiens
ccgggcaggtaccatttggagtttaattgcttcgctccgatgaatgaattcctggccaatgcaccaaaatgatacggctccgatgactggaggaacaccagggtccttggtctcgcaccagtttagataaaatgacacagacacacatgtaatggttttaaggagtggagagtttattaggcaagaaggaaggaagaagaaaacagctcccccatacagagacagagggaggggggattagaacaaacagaaacttccccgcgt

SEQ ID NO: 20328 - DNA, 3988 bp, Homo sapiens
gtgggccgggctcgcaagtgcgcgtggccgtggcggctggtgtggggttgagtcagttgtgggacccggagctgctgacccagcgggtggcccaccgaaccggtgacacagcggcaggcgttagggctcgggagccgcgagcctggcctcgtcctagagctcggccgagccgtcgccgccgtcgtcccccgcccccagtcagcaaaccgccgccgcgggcgcgcccccgctctgcgctgtctctccgatggcgtccgcctcaggggccatggcgaagcacgagcagatcctggtcctcgatccgcccacagacctcaaattcaaaggccccttcacagatgtagtcactacaaatcttaaattgcgaaatccatcggatagaaaagtgtgtttcaaagtgaagactacagcacctcgccggtactgtgtgaggcccaacagtggaattattgacccagggtcaactgtgactgtttcagtaatgctacagccctttgactatgatccgaatgaaaagagtaaacacaagtttatggtacagacaatttttgctccaccaaacacttcagatatggaagctgtgtggaaagaggcaaaacctgatgaattaatggattccaaattgagatgcgtatttgaaatgcccaatgaaaatgataaattgaatgatatggaacctagcaaagctgttccactgaatgcatctaagcaagatggacctatgccaaaaccacacagtgtttcacttaatgataccgaaacaaggaaactaatggaagagtgtaaaagacttcagggagaaatgatgaagctatcagaagaaaatcggcacctgagagatgaaggtttaaggctcagaaaggtagcacattcggataaacctggatcaacctcaactgcatccttcagagataatgtcaccagtcctcttccttcacttcttgttgtaattgcagccattttcattggattctttctagggaaattcatcttgtagagtgaagcatgcagagtgctgtttcttttttttttttttctcttgaccagaaaaagatttgtttacctaccatttcattggtagtatggcccacggtgaccatttttttgtgtgtacagcgtcatataggctttgcctttaatgatctcttacggttagaaaacacaataaaaacaaactgttcggctactggacaggttgtatattaccagatcatcactagcagatgtcagttgcacattgagtcctttatgaaattcataaataaagaattgttctttctttgtggttttaataagagttcaagaattgttcagagtcttgtaaatgttattttaataatccctttaaattttatctgttgctgttacctcttgaaatatgatttatttagattgctaatcccactcattcaggaaatgccaagaggtattccttggggaaatggtgcctcttacagtgtaaatttttcctcctttacctttgctaatatcatggcagaatttttcttatcccttgtgaggcagttgttgactgagtttttcatccttacaatcctgtcccatggtatttaacataaaaaaaaataaaactgttaacagattcttgctcgatagcttgtttgtgtctgtcgtgttattagagggaactccactatatatggtcacttgaaattatgatgcaaaggtttctcttgcattgaaaccctcttggatattacagtatttttaattgaaagtcctaattctgttaaggaaaggagttgattaaattttaaggtaccactggtattttgggagattataatcagtttgttttcaagataatagaaaataaggtccatgagaatagaagttatgtgatttcagtgagttgatgtgtacagcatggctgtgctccatctgatttaccccattcttaagttctgagagtatgttctcaaggaagatttaactctctttggttttaaattactttttaaccagcctaataaataagtcttactacttttcataatatttcataatagttaaaagtaggtgtttttttcgtgctcaatttggcactcaaaataatgttcattatggaagtttggtaatactgagcaagcctgtggaattttctttatgaaaaatgattttagcctttgcaaatgttaaccatgtgaaacacattttcagtataagtatgcgttacagggtttgatactttcctgcacttaggtttgtcctattcttcatttattcatactaggatagaaaattttggaatcagaaaatagatccagtgtttagctacatacaatctagtacaagtgaatttttattcttaaacataggtgtgttggctctttttttaaaagatgcgctctacctgaaaaggaaattggattttagaactggatgtggtgcagtgaagtattttaggcccaggtctgtgtacacattttatagaagaatgaagtactctgaagtattttggttgccttttcatttcaactgtgttttgaatttgtcagatcacacatatattgtgttattgggcgctgtggtatcttttataaaacctcttgcttgtgtgcaaaagttcctaaaaggaaacacaagtaatgcctatccattactagcatgctatgctgcatgctttactgccattgctgtatgctttactgtctttgtaaaaatccccctctccccttttctggtaactggaaaagcatgctaaaaatagtcttatattttcaccccataaatgcagaatcagtaattccttggcttaaagctcttatataatcaatattattggtggtaaataccaagtttggtatctcatagctatctttttttaaagaaattaagttcttgaaaatttagccaaatcccgttttatgggaatgctctttagaattcattttgttcagcccctttgttctatggttgagaaatctgaggccttacgaaggttaagagaactttccccgtgtctcacaggtaggtagaggcagagctggaactagatatctggtctgttgactctagctcagtgtcttctggtaactgttgaaaattgtcttagtttgagagatggctgaaataatgaacataaaatgctatttataataacaagtatatgtgaaatttcttattgtaagactactaccggcttactgttgaatagtttggttatagtgtttaggctagaaatgcctcccacattggtaataaacattacaaaatacaatgtatttttaggtaggcattttataaaatgcattatgccatggttgcttttgagatagattgtagtctgggtagcatctttaaaatgtatgtgggcttaactgttgttcatatcaggagatgctctgattgtataggtgagactctgtttctgttatttttaattgctgtatgaaatgtgatcagattattttactaccaacagttatagtttgaaagtccaactgtattaattgactgataatatgataatatagagattaaattgtttgtcttcattccttatatgtttagaagtttttgctttgtctgcctgcttacttgtatatgtaagcatgagggaaatacactgttgctaatactgaaattacaatcaagtaactaaggccttgagttcatatgtgacactgaatgcactagcttccttcgttctataactaatgtaccttaacttcccccattcttatatttacaagaagctaagtcattatgttctgagtgtgtggtatgttcccttaaaaaaaaatgacacttggaagaaaaatgtatgaaattcagaaattccgatcaaagaaaagtaattctttctttttcattttgagacagagtcttgctttgttgcccaggctggagggcagtggtgtgatctcaccttactgcagcttccgcctcctgggttcaagtgattctcatggctcagccgcctgagtagctgggattacaggtgtgagccaacaagcccggctaattt

SEQ ID NO: 20329 - DNA, 2551 bp, Homo sapiens
  misc_feature 2540, 2541, 2542, 2543, 2544, 2545, 2546, 2547, 2548, 2549,2550, 2551: n = A,T,C or G
gcgtccgcggacgcgtgcccagacgccaaggttgcgggtcatggagtcccgaaccctcctcctgctgttctcgggagccgtggccctgatccagacctgggcagattacaattacaatcaaggcagaaatgatctcatttttacattacaactctggaaaaggcaatagactgagatgcaagtgtgcccccaagtgatgggcagaaggagagaaggtgttttggatgcattctagaacacaggtaatctaaggagagttgatcaaggccgtggaagagtcctccagccactattggccatcaaaggagtcctctgtgtcccaggaatggtcctgctttggtgtccctggtgtgacccatcacccgctgggaacagcctgagagaagtagggcctctgcaccaatgctgctgaggatgtcagagcacaggaacgaggccttgggaaattacctggaaatgcgactgaaatcttccttcctgaggggtctgggctcttggaaatcaaaccctctcaggttgggtggctggacgattctcctcacacttacaatgggacaaggggaaccaggaggcccccaaggggatccctgggttccacacgaactcctcctaccctcattgtgtgacagcagccatgcctcctcctggggatcaggatctattacctgtgcctggagaggaggggactcctcttctcacccgctggtctctggacacatactgtccaattcccctgtggcagctgtaatgtgtagttcaatgggcactcatttgtccccttttaagggtaccctcctttagaatccaggaccttctaccctgcagagtgtggttttgggagagaagtgcaaaatcccacgacaggtgagttgaaggaatgggatatggagccacatccacttccaccccttggtatctggacccacgtgttcttcctactgagattacagaactgtagagatgtctttgatttttaaaatgcaccatgtcctgaaagatggcaccctcccacccgcagagtgcttcctgcaagctggcgttgagctgtgcctatagaagctcttttcaacattctttatggtcagcagcccttggttggtgcagatggtgataggaccagtgggtcccacagcatggccacactgcacctccttcgctgtcaagtgggtcccccacgaagatactgcacggagagcagtgccaagcctgtggatcaggaatatcaacagcccccagagagtggtgctggctgagggtctgagagcaggacaggaaaacccacctatggaataggtgcctatccctgtgaagatgaacctctggcccttccaggatggaaggagtgcaatgtagtcaactcctcacttagggtctggttggtcacctaaagaaatagagccctaccagggaagatcattgggttcaaatgctgatgagtaggacatttagaggtggcagtgtctggatctaccttggtaggagggagtcagtactgttggacccataggtagcctcatccctgccactgtgtttgctccatttatgtacccatcctacccggcctgggctgacccatggggaaggctggctaatttcagtgcttctgcttggttgttcagggccatttcaggtttgggtgttttctggggatgttaacatgggattcaggctcaactcacaagaaacttttccatctcatgatggatgctgttgggcatgtccaatgtatgacttcatgagttacacagatgctaattcgtaggggcacttggaatcacatggttgttttgtgtcccatggtcaagcattctatcttatcagggcctacagtaacatgccaaaagttgcttccaacatatttctctgctttggatggggcatatttctgtgctgtggatgacatggccttactccagaatcccaggccctccactgtgactctcctactggtgcttggttcagctccaccccaaatcttaccccaccactggcactttcagcaccagggggtctgaaggatggtgactgcgccatggcctggatctgctgcagtgtcctttcctgtggaggctccactcaaagctggcatcctcctatgtcacctagagtgtgggtcaaagcaatacacctacatgtagaatgtgatgtcagaactcaaacaggctcaccaggcagtgtgcttccttccttgcatgaggatgcaagatgcaacagtttgtctttcacattggaagggacacccctggatgcccctaaccactagacctgtaaaacttcactgcagtggccacttctgaatctctgtaaggtttatttatcttcaccctctggagagaagatgttttaccaaagcctctagtgtaccttcctcctcttactcatccatcccagtcaacatgatgttgtcaatgaaataaaggaatttaatattctatagtatatccaggttctccagatctcttaagactgtactatagaggcctggggaattataatagccctgaggcaaactatgaattaaagtgttgtggatcccacannnnnnnnnnnn

SEQ ID NO: 20330 - DNA, 1074 bp, Homo sapiens
  misc_feature 1, 2, 3, 4, 5, 6, 7, 8, 9, 10, 968, 1074: n = A,T,C or G
nnnnnnnnnngtggtgtttctctcgttcgtcgccgtatcctggtacgtttcttctctctgctgtctttttcgtctgtgtcgtcgtgtgctcggtgctgtttgcgctcgtcgtgttgtagtcgtttcgtggtctacttgcttgctttcttccctcggcgccggattattcggtcctcgtctctctggtatgtccctcttgcctcggcatcccttttggttggtttccaaaaccgtcgcggtttcctccccggcccttttttttggggggaactcccgcacctgggtcttcgtccccggttttcttccgtggtaaccttctgtgctccattgtcctttccatcattgtgggtccgtcggccccccactgaattgtgttgaaaacctttcccgggcctgccgcgccccaacagtttttttttcttttttttctttttttttttagggaccacaaaaaaagtctatatttttatattggggggagggagtagaaaagcaagcccctatactgggccctattcagtggcagcttcttgttccataggattaaggaagactctgaggaaataaaagttgtttggaaaaatccaggtgtagttgctttgtatgttgtgatgggtagaagggatgaagtgaagtgtgaaggcccctcataccctccatcttgcctcagactatgtcctggaaccctggggcggagaaagcgccactttcattcctgcttcttgggattgttgacggccacgtagtgatagagaacgacaagcaagaagagcgacacgcccagcatgttggcgaagatggcgagctgcacgtccgtgatcatcctgaccagtccggctcggctccgacgccaccagcgaacaagcccgaagtcagagacctggaccggaacttcgtagcccccgcgcgggcccgcggcagaccagaatctcagagttgtttaggcccaagaaaagcggggattccgntcagcacttctcccagaatcgtaagggggctgacggaggatgagagggggcacccagagatcggagagtgctatggccgcggctcaaggaggtccgggagtacaan

SEQ ID NO: 20331 - DNA, 747 bp, Homo sapiens
gtagtcccagctactctggaggctgaggcaggagaatcaattgaacccgggaggcggagcttacagtgagctgagattgcgccactgtactcctgggcaacagcgagactccgtctcaaaaaaaaaaaaaaaaaaagaaaccatttattttaaaaatgattagattgctatgcctcaactcatagaagatgaacccttcaagaaaacgtgaagtagaacgggtgggccagaaatgaaaacaggcaagtaaagtatttcttcggaaaacattttatcaaaccaaatgttaaaaagactttccttttgtaaaactggattagagaagacttttcaatgggttatctctaggatgatcagtagttgagcacttaaaaactgcagagaaaactgaaagttatgttccagataactttccgttgtttaccaaattttcttagacttggtcatcatcaggaagcatttgtaaaaataaaaatctccaccaattactggcccatctcggacttgctgaatcaatttgataggattaatctccagtgaagctgtgtttacagggcattccaagtgattcttatcaggaagtgtgaaaaacactcctgtacataatcggttaatttaaaattttacttaataagtgaacaattaatgaagatttcacctgtttacttagggtatctacccagacccatcgatcctgagttcgggagatgattttgaaattactgttttccaaataaaggtgctccc

SEQ ID NO: 20332 - DNA, 2824 bp, Homo sapiens
acgcggggactcgcgtcggttggcgactcccggacgtaggtagtttgttgggccgggttctgaggccttgcttctctttacttttccactctaggccacgatgccgcagtacgcgggggggtgaagaaggggccggccttcaagcaacagcgacgcaagatggcagccaccacgggctcgggagtaaaagtccctcgcaatttccgactgttggaagaactcgaagaaggccagaaaggagtaggagatggcacagttagctggggtctagaagatgacgaagacatgacacttacaagatggacagggatgataattgggcctccaagaacaatttatgaaaaccgaatatacagccttaaaatagaatgtggacctaaatacccagaagcacccccctttgtaagatttgtaacaaaaattaatatgaatggagtaaatagttctaatggagtggtggacccaagagccatatcagtgctagcaaaatggcagaattcatatagcatcaaagttgtcctgcaagagcttcggcgcctaatgatgtctaaagaaaatatgaaactccctcagccgcccgaaggacagtgttacagcaattaatcaaaaagaaaaaccacaggcccttccccttccccccaattcgatttaatcagtcttcattttccacagtagtaaattttctagatacgtcttgtagacctcaaagtacggggggaaaatccacaagacagaatagccagatctcagaggagcctggctaagcaaaaccctgcagaacggctgcctaatttacagcaaccatgagtacaaatggtgatgatcatcaggtcaaggatagtctggagcaattgagatgtcactttacatgggagttatccattgatgacgatgaaatgcctgatttagaaaacagagtcttggatcagattgaattcctagacaccaaatacagtgtgggaatacacaacctactagcctatgtgaaacacctgaaaggccagaatgaggaagccctgaagagcttaaaagaagctgaaaacttaatgcaggaagaacatgacaaccaagcaaatgtgaggagtctggtgacctggggcaactttgcctggatgtattaccacatgggcagactggcagaagcccagacttacctggacaaggtggagaacatttgcaagaagctttcaaatcccttccgctatagaatggagtgtccagaaatagactgtgaggaaggatgggccttgctgaagtgtggaggaaaaaattatgaacgggccaaggcctgctttgaaaaggtgcttgaagtggaccctgaaaaccctgaatccagcgctgggtatgcgatctctgcctatcgcctggatggctttaaattagccacaaaaaatcacaagccattttctttgcttcccctaaggcaggctgtccgcttaaatccagacaatggatatattaaggttctccttgccctgaagcttcaggatgaaggacaggaagctgaaggagaaaagtacattgaagaagctctagccaacatgtcctcacagacctatgtctttcgatatgcagccaagttttaccgaagaaaaggctctgtggataaagctcttgagttattaaaaaaggccttgcaggaaacacccacttctgtcttactgcatcaccagatagggctttgctacaaggcacaaatgatccaaatcaaggaggctacaaaagggcagcctagagggcaaaacagagaaaagctagacaaaatgataagatcagccatatttcattttgaatctgcagtggaaaaaaagcccacatttgaggtggctcatctagacctggcaagaatgtatatagaagcaggcaatcacagaaaagctgaagagaattttcaaaaattgttatgcatgaaaccagtggtagaagaaacaatgcaagacatacatttccactatggtcggtttcaggaatttcaaaagaaatctgacgtcaatgcaattatccattatttaaaagctataaaaatagaacaggcatcattaacaagggataaaagtatcaattctttgaagaaattggttttaaggaaacttcggagaaaggcattagatctggaaagcttgagcctccttgggttcgtctacaaattggaaggaaatatgaatgaagccctggagtactatgagcgggccctgagactggctgctgactttgagaactctgtgagacaaggtccttaggcacccagatatcagccactttcacatttcatttcattttatgctaacatttactaatcatcttttctgcttactgttttcagaaacattataattcactgtaatgatgtaattcttgaataataaatctgacaaaatattagttgtgttcaacaattagtgaaacagaatgtgtgtatgcatgtaagaaagagaaatcatttgtatgagtgctatgtagtagagaaaaaatgttagttaactttgtaggaaataaaacattggacttacacgaaatgtttaattcattcattttattgtgaaataaaaataaaatccttagctcctccaccaactgaacagaccctcttggccaaggagaccccagaaaccttaaaaactaagtttcccaaccatgacaagatgagagatcattcacacctcattatattccctcccttgctaactgccattggactttttccactgagttaaacagaaacccatggaaaacaaagaacagaagactcactccttggctgacttcacctagctcactccacgtgcgccacagccagactcccctcccctctgcgttcaaatga

SEQ ID NO: 20333 - DNA, 1539 bp, Homo sapiens
  misc_feature 1, 2, 3, 1476, 1477: n = A,T,C or G
nnnatagaagagctatgacgtcgcatgcacgcgtacgtaagcttggatcctctagagcggccgcccattgccgccagccggtccaggcctctggcgaacatggcgcttgtcccctgccaggtgctgcggatggcaatcctgctgtcttactgctctatcctgtgtaactacaaggccatcgaaatgccctcacaccagacctacggagggagctggaaattcctgacgttcattgatctggttatccaggctgtcttttttggcatctgtgtgctgactgatctttccagtcttctgactcgaggaagtgggaaccaggagcaagagaggcagctcaagaagctcatctctctccgggactggatgttagctgtgttggcctttcctgttggggtttttgttgtagcagtgttctggatcatttatgcctatgacagagagatgatatacccgaagctgctggataattttatcccagggtggctgaatcacggaatgcacacgacggttctgccctttatattaatcgagatgaggacatcgcaccatcagtatcccagcaggagcagcggacttaccgccatatgtaccttctctgttggctatatattatgggtgtgctgggtgcatcatgtaactggcatgtgggtgtaccctttcctggaacacattggcccaggagccagaatcatcttctttgggtctacaaccatcttaatgaacttcctgtacctgctgggagaagttctgaacaactatatctgggatacacagaaaagtatggaagaagagaaagaaaagcctaaattggaatgagatccaagtctaaacgcaagagctagattgagccgccattgaagactccttcccctcgggcattggcagtgggggagaaaaggcttcaaaggaacttggtggcatcagcacccccctcccccaatgaggacaccttttatatataaatatgtataaacatagaatacagttgtttccaaaagaactcaccctcactgtgtgttaaagaattcttcccaaagtcattactgataataacattttttccttttctagttttaaaaccagaattggaccttggatttttattttggcaattgtaactccatctaatcaagaaagaataaaagtttattgcacttctttttgagaaatatgttaaagtcaaaggggcatatatagagtaaggcttttgtgtatttaatcctaaaggtggctgtaatcatgaacctaggccaccatggggacctgagagggaaggggacagatgtttctcattgcataatgtcacagttgcctcaaatgagcaccatttgtaataatgatgtcaatttcatgaaaagcctgagtgtattgcatctcttgatttaatcatgtgaaacttttcctagatgcaaatgctgactaataaagacaaagccaccctgaacctaagaaaaaaaaaaaaaaaaaaaaaaaaannccgccagtcatgcggcaggcaggggacacggctctgacaggcgctctgtccctggcctcagt

SEQ ID NO: 20334 - DNA, 596 bp, Homo sapiens
  misc_feature 568, 569, 570, 571, 572, 573, 574, 575, 576, 577, 578, 579,580, 581, 582, 583, 584, 585, 586, 587, 588, 589, 590, 591,592, 593, 594, 595, 596: n = A,T,C or G
actcactgagctcaagacacacttggtgcttgcagtgctgatacctgctctttgccggcccccgcgtaccatcccatgtggaatctgtgagtgtcctcttaagtagcgtgggctagccaatctgccgttcatggtgtattgtaaactccgaattccatatgtaataggatgcaagtctaagcgtttcatgtggacataaatgtatctaaataaaactttccctagcactgtggctgacctcacccttacttttatactttagtatgaaactgatgagaactttggtagtgagtattttttttatatatatacatatatatgtatctatctatatatatatctcaagcatctttcaggtctttgtgtgtggctttcttaaagccctgttgtaaaaaattactatgtggatggcagtctctcacatcacagatgtggaaagtataattttatatttgtattttcaaataaataagtttgtgaaaggtttccatcctctactgtggtcccagaaatcaatgtggttgtctggcaaaaaaaaaaataaaataaaataaactgttttgaactnnnnnnnnnnnnnnnnnnnnnnnnnnnnn

SEQ ID NO: 20335 - DNA, 1606 bp, Homo sapiens
  misc_feature 1597, 1598, 1599, 1600, 1601, 1602, 1603, 1604, 1605, 1606: n = A,T,C or G
aggtacattgacagtgcttctggtttcagcacacatggagatatagaattgaaattgctctgctttctttacaaatgactcagagtgtgcttgttcttccctaaaatgttgccagcatgtaaaggattttcaatgagcagtgcaataagccagcaactgggaaggcttggagcggcactgatataacgtggtgctgtcacacagataatcagggctggagccaagtctcggtagcgctgtgcattatcctggtcacatactggaagttttgtttatccaacttggttgctcttgaagctggtgagagccctgccaggatgtggagtggacttcctagcagaggcagtactcatggggttcacatggttttgaatcaccagggccgcccatcaggagatgcctttatccagatgaagtctgcggacagagcatttatggctgcacagaagtgtcattaaaaaaacatgaaggacagatatgttgaagtctttcagtgttcagctgaggagatgaactttgtgttaatggggggcactttaaatcgaaatggcttatccccaccgccatgtaagttaccatgcctgtctcctccctcctacacatttccagctcctgctgcagttattcctacagaagctgccatttaccagccctctgtgattttgaatccacgagcactgcagccctccacagcgtactacccagcaggcactcagctcttcatgaattacacagcgtactatcccagccccccaggttcgcctaatagtcttggctacttccctacagctgctaatcttagcggtgtccctccacagcctggcacggtggtcagaatgcagggcctggcctacaatactggagttaaggaaattcttaacttcttccaaggttaccagtatgcaaccgaggatggacttatacacacaaatgaccaggccaggactctacccaaagaatgggtttgtatttaagggccccagcagttagaacatcctcagaaaagaagtgtttgaaagatgtatggtgatcttgaaacctccagacacaagaaaacttctagcaaattcaggggaagtttgtctacactcaggctgcagtattttcagcaaacttgattggacaaacgggcctgtgccttatcttttggtggagtgaaaaaatttgagccagtgaagccaaatcgtaacttacagcaagcagcatgcagcatacctggctctttgctgattgcaaataggcatttaaaatgtgaatttggaatcagatgtctccattacttccagttaaagtggcatcataggtgtttcctaagttttaagtcttggataaaaactccaccagtgtctaccatctccaccatgaactctgttaaggaagcttcatttttgtatattcccgctcttttctcttcatttccctgtcttctgcataatcatgccttcttgctaagtaattcaagcataagatcttggaataataaaatcacaatcttaggagaaagaaaaaaaaaaaaaaaaacaaaaaaaaaaaaaaaaaaaaggggggggccccggaataaaagggggcgaagggggggggcacaagggcccagccnnnnnnnnnn

SEQ ID NO: 20336 - DNA, 1865 bp, Homo sapiens
  misc_feature 1, 2, 3, 1861, 1862, 1863, 1864, 1865: n = A,T,C or G
nnnccggttctagatcgcgagcggccgccctttttttttttctttccggtaggtcgccagctgaggcggtttgtaagttttgggtcgcagtatgctagaattttgaggctcccttctgatgaaaattgagctgtccatgcagccatggaacccgggttacagcagtgagggggccacggctcaagaaacttacacatgtccaaaaatgattgagatggagcaggcggaggcccagcttgctgagttagacctgctagccagtatgttccctggtgagaatgagctcatagtgaatgaccagctggctgtagcagaactgaaagattgtattgaaaagaagacaatggaggggcgatcttcaaaagtctactttactatcaatatgaacctggatgtatctgacgaaaaaatggcgatgttttctctggcctgtattcttccctttaaatacccggcagttctgcctgaaattactgtcagatcagtattattgagtagatcccagcagactcagctgaacacagatctgactgcattcctgcaaaaacattgtcatggagatgtttgtatactgaatgccacagagtgggttagagaacacgcctctggctatgtcagcagagatacttcatcttcacccaccacaggaagcacagtccagtcagttgacctcatcttcacgagactctggatctacagccatcatatctataacaaatgcaaaagaaagaatattctagagtgggcaaaggagctttccctgtctgggtttagcatgcctggaaaacctggtgttgtttgtgtggaaggcccacaaagtgcctgtgaagaattctggtcaagactcagaaaattaaactggaagagaattttaattcgccatcgagaagacattccttttgatggtacaaatgatgaaacggaaagacaaaggaaattttccatttttgaagaaaaagtgttcagtgttaatggagccaggggaaaccacatggactttggtcagctctatcagttcttaaacaccaaaggatgtggggatgttttccagatgttctttggtgtagaaggacaatgacatcaagagtagttgaaagtatcttgccactgttggccttttgatttttttttcccactttttcttgaaagattaagtaattttattttagttccattctagaatgttggggagtggggcacaagaaaaaatagtatagctgaaatgcatctgttaaaaatgtcatgattgaaagcagaactgagtttcaaattacaaccttaaaattgttgttagatatttcttcacatatcagctgcccattttgaaaaagaaattatccataaaggtaatgttggtgctccaatttgccagccattcccaacccccttctcccttacctgccttcactaaagaacccagaaaagctaattgctcccctttcagcctctgttgcaactaacaactctcagtggcctcaggacacagctttggccttgggaattctgggaaaacttttacttcctgattaaagatacatatgcagctaggccacctcctcccccccttactgccataaacaccaaagtgatgactggagctggaggagttatttgaaccacgacggaagggccaagagaaccacgaagatgccagttgccacattgttgagctgctgacccaacaccagccattgcctgtctctaaacatcttatgaaataaaaccagttttgttcaatttctaggctttttttttaaatagacggagtcttgctctgtcgcccgggctagagtgcaatggtgcaacctccgctcactgcaacactgcactccagtctgggtaacagagtgagactctgtcnnnnn

SEQ ID NO: 20337 - DNA, 142 bp, Homo sapiens
aggtactcatcggccagcacggagatgcacaggttaaatggtttaccatcctgaaagggcatattgtggcatgtcacctcatactgccaagccccattcacgcggctgttcatgaccacccaatgaccaaagtacctgcccg

SEQ ID NO: 20338 - DNA, 854 bp, Homo sapiens
  misc_feature 854: n = A,T,C or G
gcgtccgcccacgcgtccggtcatctataaaaatactcacattaagacagtagcaattccagccttgagctccgcggacgcgtgggtctgaatttgtgtacaaagactattgtagagactatccgggttagtttgcaagggaagccaatgatgagtaatttgaaagaaattcacctggtgagcaatgaggaccctactgttgctgcctttaaagctgcttcagaattcatcctagggaagagtgagctgggacaagaaaccaccccttctttcaatgcaatggtcgtgaacaacctgaccctccagattgtccagggccacattgaatggcagacggcagatgtaattgttaattctgtaaacccacatgatattacagttggacctgtggcaaagtcaattctacaacaagcaggagttgaaatgaaatcggaatttcttgccacaaaggctaaacagtttcaacggtcccagttggtactggtcacaaaaggatttaacttgttctgtaaatatatataccatgtactgtggcattcagaatttcctaaacctcagatattaaaacatgcaatgaaggagtgtttggaaaaatgcattgagcaaaatataacttccatttcctttcctgcccttgggactggaaacatggaaataaagaaggaaacagcagcagagatttttgtttgatgaagttttaacatttgccaaagaccatgtaaaacaccagttaactgtaaaatttgtgatctttccaacagatttggagatatataaggctttcagttctgaaatggcaaagaggtccaagatgctgagtttgaacaattacagtgtcccccagtcaaccagan

SEQ ID NO: 20339 - DNA, 1099 bp, Homo sapiens
  misc_feature 1093, 1094, 1095, 1096, 1097, 1098, 1099: n = A,T,C or G
acccaggacaaatctctccacttggaaggagatcccaatccttctgcagccccaacatccacctgcgcacctaggaaaatgcccaaaaggatttcaatatccaaacaactggcttcagtgaaagctctgaggaagtgctcagatctggaaaaagctattgccaccactgctctgattttcagaaattcttctgactctgatggtaaacttgaaaaagctattgccaaagatctgctgcaaacccaatttaggaatttcgcagagggacaagaaaccaagccaaaatacagagagatcctttctgaacttgatgagcacacagaaaataagctagattttgaagacttcatgatcttgctcttaagcatcactgtcatgtcagatctgctacaaaatatacggaatgtaaaaattatgaaatgaacagttttaaatatgctgtataaaataatggcaaaagacagtgttattaaaatgtttccatcttatttttgattaattgaatatatctatcatgcatctgaaattgcctaggatggttctgattgctggtattcagatccaatgtaactccaaatatttacccatacacttcaagaatgtttgaatgataaggtctctgtgtgctttacaataggatagatttgataccactgaataataaatggcttttgctgagtcagtagcgacctagagcactctacttatagtcattgagtcactcatttattcactaaacatttgttgagcatctacttgatggaactgctgaggatacagtaatgaattggccaggcaattccttccttcagacatgtttgcagaagtctagcagaagagatagacattgaacaatttttaaataattgcatacacagtataattagaattgaaataagggctataggatgctaaaagagattatcacctgatcggagttcaaaggtcagaaaagctttactgacattctataaagagcagaggaaaaaaaaaaaaaggtgccctggggcggaacccccctagggggaaattccccccccctggggggcttttttaggggatcccggctggggcccaaattgggggaaaaaannnnnnn

SEQ ID NO: 20340 - DNA, 891 bp, Homo sapiens
  misc_feature 711, 712, 713, 714, 715, 716, 717, 718, 719, 720, 721, 723,725, 727, 728, 731, 737, 738, 778, 779, 873, 874, 875, 876,877, 878, 879, 880, 881, 882, 883, 884, 885, 886, 887, 888,889, 890, 891: n = A,T,C or G
gggcgaattggagctccccgcggtggcggccgaggtacaaaagttgaaagtcacaaaaccatagaaaagtctcagtttcctactgtagaattcttgtcatttcagtagtcacagttaaacttgttctaggtttttcagatgctcttttccaggacttcatatgttttgatatttttaaaaattctttctttcaacttttttgattataagccttgcttgcttcgatttgggatttaggcatcgttgtcctttattttctttcagggcaataatcacttctattttgtcacagttgttacttgggtacctaaaacccgaagaaccttctgtaagaagtgtggcaagcatcagcctcacaaagtgacacagtataagaagggcaaggattctttgtatgcccagggaaggaggcgctatgatcggaagcagagtggctatggtgggcagacaaagccaattttccggaagaaggctaagaccacaaagaagattgtgctaaggctggaatgtgttgagcctaactgcagatccaagaggatgctggctattaagagatgcaagcattttgaactgggaggagataagaagagaaagggccaagtgatccagttctaaactttgggatatttttcttcaattttgaagagaaaatggtgaagccatagaaaagttacccgagggaaaataaatacagtgatattcttaagcgcnnnnnnnnnnncncncnnccncccccnngccttgggcgggaacccccttaaccaaattcgaaggacgnntgaatagataagagaaaaaaaaataaaaaacaatattttgatattaaaacaaaaaaaaaatgggggcgcccgtttaaatttttttaaaaaaaannnnnnnnnnnnnnnnnnn

SEQ ID NO: 20341 - DNA, 1102 bp, Homo sapiens
  misc_feature 1, 2, 3, 1101, 1102: n = A,T,C or G
nnnaagcttttaggccaaccctcctgactggatgggggcggcgggcgtggcatgcatgaaaagtaaacatcagagacctgaagaagcttataaaatagcttgggagaggccagtcaccaagacaggcatctcaaatcggctgattctgcatctggaaactgccttcatcttgaaagaaaagctccaggtcccttctccagccacccagccccaagatggtgatgctgctgctgctgctttccgcactggctggcctcttcggtgcggcagagggacaagcatttcatcttgggaagtgccccaatcctccggtgcaggagaattttgacgtgaataagtatctcggaagatggtacgaaattgagaagatcccaacaacctttgagaatggacgctgcatccaggccaactactcactaatggaaaacggaaagatcaaagtgttaaaccaggagttgagagctgatggaactgtgaatcaaatcgaaggtgaagccaccccagttaacctcacagagcctgccaagctggaagttaagttttcctggtttatgccatcggcaccgtactggatcctggccaccgactatgagaactatgccctcgtgtattcctgtacctgcatcatccaactttttcacgtggattttgcttggatcttggcaagaaaccctaatctccctccagaaacagtggactctctaaaaaatatcctgacttctaataacattgatgtcaagaaaatgacggtcacagaccaggtgaactgccccaagctctcgtaaccaggttctacagggaggctgcacccactccatgttacttctgcttcgctttcccctaccccacccccccccataaagacaaaccaatcaaccacgacaaaggaagttgacctaaacatgtaaccatgccctaccctgttaccttgctagctgcaaaataaacttgttgctgacctgctgtgctcgcagtagatcaaagggcgcgaccgggccacatcccagttgactgccacggctacggagggtcagagggaaccgatggactgggcagacaacgaatagcgatggcgtgtaaaaacagacgcgtcaggactcnn

SEQ ID NO: 20342 - DNA, 2464 bp, Homo sapiens
  misc_feature 1, 2, 3, 4, 5, 6, 2441, 2442, 2443, 2444, 2445, 2446, 2447,2448, 2449, 2450, 2451, 2452, 2453, 2454, 2455, 2456, 2457,2458, 2459, 2460, 2461, 2462, 2463, 2464: n = A,T,C or G
nnnnnncctgcccccgctaaccggctttttgcccaaatgggccattatcgaagaattcacaaaaaacaatagcctcatcatccccaccatcatagccaccatcaccctccttaacctctacttctacctacgcctaatctactccacctcaatcacactactccccatatctaacaacgtaaaaataaaatgacagtttgaacatacaaaacccaccccattcctccccacactcatcacccttaccacgctactcctacctatctccccttttatactaataatcttataaaaaaaaaaaaaaaaaaaaaaaaaaaaaagaaaaaaaaagaggtttggggcgcgcccggcctatgacggcgtccttgcggaagtacgggtgccgagagaagcagtagtcaataaagagagtgccgtatttcgcagattggagctgagctgtggctgccagaagatagcgaacgaatggaaactgaaagtggaaatcaggaaaaggtaatggaagaagaaagcactgaaaagaaaaaagaagttgaaaaaaagaaacggtcacgagttaaacaggtgcttgcagatattgctaagcaagtggacttctggtttggggatgcaaatcttcacaaggatagatttcttcgagaacagatagaaaaatctagagatggatatgttgatatatcactacttgtgtcttttaacaaaatgaaaaaattgactactgatgggaagttaattgccagagcattgagaagttcagctgttgtagagcttgatttggaaggcaccagaatccggaggaaaaaacctctgggggaaagaccaaaggatgaggatgaacgcacagtgtatgtggagttacttcccaaaaatgttaatcacagctggattgaaagagtatttgggaaatgtggcaatgttgtttatataagtataccacattataagtctactggagatccaaagggatttgcgtttgtggaatttgaaacaaaagaacaagcagcaaaagcaattgagtttcttaacaacccaccagaagaagcaccaagaaaacctggcatatttcctaaaacagtgaaaaataagcccattccagccttaagagttgtggaagagaagaaaaagaaaaagaagaagaaaggcagaagcttccaaggaaaatagagatatagaaatctctactgaagaggaaaaggatactggagatctaaaagatagctctctcttgaaaacaaaaaggaaacataagaaaaaacataaagagagacataaaatgggagaagaagttataccattaagagtgctatcaaagagcgaatggatggatttgaaaaaagagtatttagcgctacaaaaagctagcatggcttctttaaaaaaaacaatatcccaaataaaatcagagtcagaaatggaaacagacagtggagtacctcaaaacactggaatgaaaaatgaaaaaacagccaacagggaagagtgtcgcacccaggagaaagttaatgcaacaggaccacagttcgtgagtggagtgattgtgaagatcattagcacagagcctctacctggcaggaaacaagtccgggatactttggcagcaatctcagaagttctttatgttgatttgctagaaggggatacagaatgccatgctagatttaaaactcctgaggatgctcaagcagtaataaatgcctatacagaaattaacaagaaacactgctggaaactcgagatcctttctggtgatcacgaacaaaggtattggcagaagattttggttgatagacaggcaaaacttaatcagcctcgggaaaagaaaagaggcactgaaaagttaatcaccaaagctgaaaagattagactggcaaagactcaacaagcgagtaaacatataagattttctgaatatgattgaaaaaaaaaacagttcacctcttaatacttcacaagatacttgagctgttcttgggagattcacttttattatggtagcactgcataattaatgtgtttttaattaaaagaaatatctttgttcctcaacttgtaaataagacttttttctagagacaaatatgatgtataccacaatttttcttaaacattttatttgttgaaattatcttagatgtcagtgtcaggtgatttagtaaataaatgtgttttgaacattatttggaaatgtgttgattttgtttttatactgtaaaaacaaaacataattgcaaaaatactacatgaatatatataaagtttagagaaatgtttaaccctaaactctccctgtacttagtttgtaacttgcaataccttcaataccttttcatgttgatttatacagacatgtttaatagttcattctattcattcccctttgcctatctgagcttccattgaacaatagaccatagggattggttctaattaaaatgctaaannnnnnnnnnnnnnnnnnnnnnnn

SEQ ID NO: 20343 - DNA, 3766 bp, Homo sapiens
cgcgtccgctggaaccctggggactacgacgtccctaaaccttgcttctaggagataaaaaggcctcacctcctgccggctccgcccggcccggcccacctcgcccccacctcggcgcccacccattgtcccctcgcgcagtcaccgagcgcagatcccgcgctctcgattggaacgcctccccatcactcagccacactcaggggctggacgcctcactcccgtttccgagccataaaaggtctaggaccgcttcccccgagccagcagcagcgtttgacgtcatcgtgcgtgtggtgcccctgctgccggggctggtgattggaggaaaccccgtgtctgcggagcggctgtagcctgtgagcagcgagatccagggacagagtctcagcctcgccgctgctgccgccgccgccgcccagagactgctgagcccgtccgtccggccgccaccacccactccggacacagaacatccagtcatggataaaaatgagctggttcagaaggccaaactggccgagcaggctgagcgatatgatgacatggcagcctgcatgaagtctgtaactgagcaaggagctgaattatccaatgaggagaggaatcttctctcagttgcttataaaaatgttgtaggagcccgtaggtcatcttggagggtcgtctcaagtattgaacaaaagacggaaggtgctgagaaaaaacagcagatggctcgagaatacagagagaaaattgagacggagctaagagatatctgcaatgatgtactgtctcttttggaaaagttcttgatccccaatgcttcacaagcagagagcaaagtcttctatttgaaaatgaaaggagattactaccgttacttggctgaggttgccgctggtgatgacaagaaagggattgtcgatcagtcacaacaagcataccaagaagcttttgaaatcagcaaaaaggaaatgcaaccaacacatcctatcagactgggtctggcccttaacttctctgtgttctattatgagattctgaactccccagagaaagcctgctctcttgcaaagacagcttttgatgaagccattgctgaacttgatacattaagtgaagagtcatacaaagacagcacgctaataatgcaattactgagagacaacttgacattgtggacatcggatacccaaggagacgaagctgaagcaggagaaggaggggaaaattaaccggccttccaacttttgtctgcctcattctaaaatttacacagtagaccatttgtcatccatgctgtcccacaaatagttttttgtttacgatttatgacaggtttatgttacttctatttgaatttctatatttcccatgtggtttttatgtttaatattaggggagtagagccagttaacatttagggagttatctgttttcatcttgaggtggccaatatggggatgtggaatttttatacaagttataagtgtttggcatagtacttttggtacattgtggcttcaaaagggccagtgtaaaactgcttccatgtctaagcaaagaaaactgcctacatactggtttgtcctggcggggaataaaagggatcattggttccagtcacaggtgtagtaattgtgggtactttaaggtttggagcacttacaaggctgtggtagaatcataccccatggataccacatattaaaccatgtatatctgtggaatactcaatgtgtacacctttgactacagctgcagaagtgttcctttagacaaagttgtgacccattttactctggataagggcagaaacggttcacattccattatttgtaaagttacctgctgttagctttcattatttttgctacactcattttatttgtatttaaatgttttaggcaacctaagaacaaatgtaaaagtaaagatgcaggaaaaatgaattgcttggtattcattacttcatgtatatcaagcacagcagtaaaacaaaaacccatgtatttaacttttttttaggatttttgcttttgtgattttttttttttttttttgatacttgcctaacatgcatgtgctgtaaaaatagttaacagggaaataacttgagatgatggctagctttgtttaatgtcttatgaaattttcatgaacaatccaagcataattgttaagaacacgtgtattaaattcatgtaagtggaataaaagttttatgaatggacttttcaactactttctctacagcttttcatgtaaattagtcttggttctgaaacttctctaaaggaaattgtacattttttgaaatttattccttattccctcttggcagctaatgggctcttaccaagtttaaacacaaaatttatcataacaaaaatactactaatataactactgtttccatgtcccatgatcccctctcttcctccccaccctgaaaaaaatgagttcctattttttctgggagagggggggattgattagaaaaaaatgtagtgtgttccatttaaaattttggcatatggcattttctaacttaggaagccacaatgttcttggcccatcatgacattgggtagcattaactgtaagttttgtgcttccaaatcactttttggtttttaagaatttcttgatactcttatagcctgccttcaattttgatcctttattctttctatttgtcaggtgcacaagattaccttcctgttttagccttctgtcttgtcaccaaccattcttacttggtggccatgtacttggaaaaaggccgcatgatctttctggctccactcagtgtctaaggcaccctgcttcctttgcttgcatcccacagactatttccctcatcctatttactgcagcaaatctctccttagttgatgagactgtgtttatctccctttaaaaccctacctatcctgaatggtctgtcattgtctgcctttaaaatccttcctctttcttcctcctctattctctaaataatgatggggctaagttatacccaaagctcactttacaaaatatttcctcagtactttgcagaaaacaccaaacaaaaatgccattttaaaaaaggtgtattttttcttttagaatgtaagctcctcaagagcagggacaatgttttctgtatgttctattgtgcctagtacactgtaaatgctcaataaatattgatgatgggaggcagtgagtcttgatgataagggtgagaaactgaaatcccaaacactgttttgttgcttgttttattatgacctcagattaaattgggaaatattggcccttttgaataattgtcccaaatattacattcaaataacagtgcaaggagaaaaaaagacaagaaaacaagaaaacgacacacacacacttgtcgccagcaacagaccacacaaacagctcagagaccaatcggttgggcccgcggcacagaggaatcgtgacactgggcaagaggagacaaagagaccggacagaacacggggagaccacacaaaaaaaccggggggaccagcggtagacaaccccacagggggtcagcaggcaacggagcgccacacgagccagaggctaaatacgcccctgcctgctgagaggaccaagcacaccgacgagaagacaaagcagcacaccgcgcagcagcacacacgacacgagcactgaaccaccgacgagacgaacaaagaaccagcacggacaagcagcaagcgaccacagacgaacaaacgcagaactagaagcacagacgcaccacaga

SEQ ID NO: 20344 - DNA, 1227 bp, Homo sapiens
ccgggcaggtacgcgggaatttgtccttgcttatgcctgcctctttcgcttggcaggatgatgctgtcattagtatttcacaagaagtagcttcagagggtaacttaacagagtatcagatctatcttgtcaatcccaacgttttacataaaataagagatcctttagtgcacccagtgactgacattagcagcatctttaacacagccgtgtgttcaaatgtacagtggtccttttcagagttggacttctagactcacctgttctcactccctgttttaattcaacccagccatgcaatgccaaataatagaattgctccctaccagctgaacagggaggagtctgtgcagtttctgacacttgttgttgaacatggctaaatacaatgggtatcgctgagactaagttgtagaaattaacaaatgtgctgcttggttaaaatggctacactcatctgactcattctttattctattttagttggtttgtatcttgcctaaggtgcgtagtccaactcttggtattaccctcctaatagtcatactagtagtcatactccctggtgtagtgtattctctaaaagctttaaatgtctgcatgcagccagccatcaaatagtgaatggtctctctttggctggaattacaaaactcagagaaatgtgtcatcaggagaacatcataacccatgaaggataaaagccccaaatggtggtaactgataatagcactaatgctttaagatttggtcacactctcacctaggtgagcgcattgagccagtggtgctaaatgctacatactccaactgaaatgttaaggaagaagatagatccaattaaaaaaaattaaaaccaatttaaaaaaaaaaagaacacaggagattccagtctacttgagttagcataatacagaagtcccctctactttaacttttacaaaaaagtaacctgaactaatctgatgttaaccaatgtatttatttctgtggttctgtttccttgttccaatttgacaaaacccactgttcttgtattgtattgcccagggggagctatcactgtactctgttcaaagctggagggtcattccaaccattctgaggacctgttgttccaggaggcagtgcataagctgaagatgatggtggagctcctggtccgccatgctggaaggatgctccagaggaagggggaggagggaaagaagtagcagggctggaggt

SEQ ID NO: 20345 - DNA, 684 bp, Homo sapiens
  misc_feature 683, 684: n = A,T,C or G
tagggcgtggtgcggagggcggtacacaatttttagaatagttgatgtctttaagatggatattttacaatttcagtaaaaaaaatacaacatgaagctgctgctgtcacagatcactgtagtaaaaagatataaatgcaataccatgtcgtagaaacaatatatatatatcctctgatattttacaaactttgtaccggccccgacagctgaaggaatttgaggggaagactttagtgtcagtcaccaaagaaggcctggaacttccagaggatgaagaagagaaaaagaagcaggaagagaaaaaaacaaagtttgagaacctctgcaaaatcatgaaagacatattggagaaaaaagttgaaaaggtggttgtgtcaaaccgattggtgacatctccatgctgtattgtcacaagcacatatggctggacagcaaacatggagagaatcatgaaagctcaagccctaagagacaactcaacaatgggttacatggcagcaaagaaacacctggagataaaccctgaccattccattattgagaccttaaggcaaaaggcagagggatgggctgggagtctggggttaataaatgcagactattcctttggcatggataagcaatgggatcctgctgtatagcacagggaactatatcagctgttgtaactgggggtaccnn

SEQ ID NO: 20346 - DNA, 875 bp, Homo sapiens
  misc_feature 875: n = A,T,C or G
acagacagggtttcttcatgttggtcaggctggactcgaactcctggtctcaactgcctcagcctcccaaagtgctggattataggcatgagataccgtgcctggcctccatcactgattctatgtatgcacatgactccttttttacttttacttaggaggcttaaaacacaattattcattcaatataattataaagcagagtctttgttaatttctgaacttggtaaaaacattttttatattttatctatagctcattaatttaggtatcaaaaatgtgttttagtttaggtagcccaagctgccaattgtttgatatcatcatcctcttcttctgccctctgggaagatgctgctcgggatcgacgtgcagtggacgacatgcctggttttctatttggctgtgctgggagagaagaggaaggcacatttggaaggcggatatttgtcatcttcttatttaattcctcctgttccaattcttcaagttctgccatcaactcatcctcatcaaagtcatcaccaaagccaacccgttgagaaaatgcttctgagatttcttgggcgatatcctgttgctctgtgatctcttgcatcaaatcatctattttgttcagatccatgttttcatgaacagatttcatcgcttttgctgcaaagcccatgttcctcaacacctcagtgttggtgtgtgagttctccagggcttctctctggaactcaatggtagaaagtgtgccatcaatctgagtgagctgtttctcgaacctcttctttctctttagtgcctgtaatgcagctcgcttattctgcgtgccgtgcttcttggccagggcgatttctctctggattcgattttccaggtacctgcn

SEQ ID NO: 20347 - DNA, 1833 bp, Homo sapiens
acgcggggaccctgggaaatgcttctatccctgagaggaggctcagcacagaaggaggaaggacagcagggccaacagtcacagcagccctgaccagagcattcctggagctcaagctcctctacaaagaggtggacagagaagacagcagagaccatgggacccccctcagcccctccctgcagattgcatgtcccctggaaggaggtcctgctcacagcctcacttctaaccttctggaacccacccaccactgccaagctcactattgaatccacgccattcaatgtcgcagaggggaaggaggttcttctactcgcccacaacctgccccagaatcgtattggttacagctggtacaaaggcgaaagagtggatggcaacagtctaattgtaggatatgtaataggaactcaacaagctaccccagggcccgcatacagtggtcgagagacaatataccccaatgcatccctgctgatccagaacgtcacccagaatgacacaggattctataccctacaagtcataaagtcagatcttgtgaatgaagaagcaaccggacagttccatgtatacccggagctgcccaagccctccatctccagcaacaactccaaccccgtggaggacaaggatgctgtggccttcacctgtgaacctgaggttcagaacacaacctacctgtggtgggtaaatggtcagagcctcccggtcagtcccaggctgcagctgtccaatggcaacatgaccctcactctactcagcgtcaaaaggaacgatgcaggatcctatgaatgtgaaatacagaacccagcgagtgccaaccgcagtgacccagtcaccctgaatgtcctctatggcccagatggccccaccatttccccctcaaaggccaattaccgtccaggggaaaatctgaacctctcctgccacgcagcctctaacccacctgcacagtactcttggtttatcaatgggacgttccagcaatccacacaagagctctttatccccaacatcactgtgaataatagcggatcctatatgtgccaagcccataactcagccactggcctcaataggaccacagtcacgatgatcacagtctctggaagtgctcctgtcctctcagctgtggccaccgtcggcatcacgattggagtgctggccagggtggctctgatatagcagccctggtgtattttcgatatttcaggaagactggcagattggaccagaccctgaattcttctagctcctccaatcccattttatcccatggaaccactaaaaacaaggtctgctctgctcctgaagccctatatgctggagatggacaactcaatgaaaatttaaagggaaaaccctcaggcctgaggtgtgtgccactcagagacttcacctaactagagacaggcaaactgcaaaccatggtgagaaattgacgacttcacactatggacagcttttcccaagatgtcaaaacaagactcctcatcatgataaggctcttacccccttttaatttgtccttgcttatgcctgcctctttcgcttggcaggatgatgctgtcattagtatttcacaagaagtagcttcagagggtaacttaacagagtatcagatctatcttgtcaatcccaacgttttacataaaataagagatcctttagtgcacccagtgactgacattagcagcatctttaacacagccgtgtgttcaaatgtacagtggtccttttcagagttggcttctagactcacctgttctcactccctgttttattcaaccagcatgcaatggcaatatagattgtcctacagtgaca

SEQ ID NO: 20348 - DNA, 1435 bp, Homo sapiens
  misc_feature 1, 2, 3: n = A,T,C or G
nnnccttgcggccgcaggaattttttttttttttttttgggaaatagaactctttatttaaatatcagtacagaacaataaattactaaaggaaacaatcattaatataaattttttcttattaaataatttaaaaattctctttcaggacacggaaagaatccccagaggtctgaagtctaacgtgattattttactgacaatatcatttgcaagaaagagatcatcattcaaagaagtacttgattttccaaacaaaaagagaagaaagaaaatgatatatcttgtttagtcagccagaactttaagtgcaggaattccatcaggtagcaccaagagaaaattgcataatatgttaggtataactgctggtaaaattgttggcaaaaggaatcaaggcagtgaatgagctattgggtccatgatgtcatcatgatctgctggaggccactggacatacaccgtaggtcgtgggcagctggccagacagaagggcgagtttgatcaagaccgtgctcacaggagccttttggtatcagctttaacctgtcactctaaaggactctcctcagatgccagggaggatgaagcaggggaggatgatgaggaggcagcaaaggatgagggtggtggctgtggccctgagttgggttgtgcctgaggacatggcgagtggtgctcctgcacttggctccagggtgctgtccatgcccatcaagaagtcctcaagccatcctatacagtctcccattgagaagtaatggaaggacatggccacaaccttgtcattctcccacttttctttcatctttctggctccaggatgaaccgttgtccacattctcttctctgagtcaaagaggaggaagatctgcccatcgaaactgaactgccaagatccactgctgtgtccttcagctttctgctcacaagacatccttgcctgcagggtgaggggttccttgggtgtgtaattctccagctgaatgtcacgcagttgctctgtaagtatgtccaccacctctctcagtactgggttctgtgctttccaggccgttgtgacatttagtttcttccccaggggactgacaggtgtgactgtcttgttgccacagtcatagtgaagaaaagtcttttcatccacctggccttgaaccgcacaccaccgtggtccaggtctgaacttagggatgacggtgatgtcatagcaaagagagtgagggtcggctcgcccagcccgggaccagccggacagcaggagcagaagcgggaggcacagaaggatcttggtagcggcggctgctgccattaaggacccagagcgctagggaggagagacttgatggaaggagagcctgcccgcgtaatcacctcaaggttttaaagcctccctatgtacgggcgcgccccccgtttcccccccgccttaattaat

SEQ ID NO: 20349 - DNA, 1858 bp, Homo sapiens
attaattaaggcgggcctgtctgcaagacttgagttcaggactcccaatccttcgccatccgaacctggagggcatccagtcgacacctacaggggtcggacatgtccaaggctaactgagaggccttccagacgcttcatttttgttgtttgggtttgcggcagggcacaaagaggatggcgggtgaaaaagttgagaagccagatactaaagagaagaaacccgaagccaagaaggttgatgctggtggcaaggtgaaaaagggtaacctcaaagctaaaaagcccaagaaggggaagccccattgcagccgcaaccctgtccttgtcagaggaattggcaggtattcccgatctgccatgtattccagaaaggccatgtacaagaggaagtactcagccgctaaatccaaggttgaaaagaaaaagaaggagaaggttctcgcaactgttacaaaaccagttggtggtgacaagaacggcggtacccgggtggttaaacttcgcaaaatgcctagatattatcctactgaagatgtgcctcgaaagctgttgagccacggcaaaaaacccttcagtcagcacgtgagaaaactgcgagccagcattacccccgggaccattctgatcatcctcactggacgccacaggggcaagagggtggttttcctgaagcagctggctagtggcttattacttgtgactggacctctggtcctcaatcgagttcctctacgaagaacacaccagaaatttgtcattgccacttcaaccaaaatcgatatcagcaatgtaaaaatcccaaaacatcttactgatgcttacttcaagaagcaagcaagcctgccgggaagccccagaccaccagggaggtgagagggaaaaccacccccgggaccatgctgatcttcctcattggacgcgacaggggctagagagtggttttcctgaagcagctggctagtggcttattacttgtgactggacctctggtcctcaatcgagttcctctacgaagaacacaccagaaattggtcatggccacttcaaccaaaatcgatatcagcaaatgtaaaaatcccaaaacatcttactgatgcttacttcaagaagaagaagctgcggaagccccagacacccaaggaaggtgagatcttcgaccacagaaaaacgagacctatgagatacggagcaggcgcaggattggatcagaaaggctgtggacctcacaaattttacccaaaaatcaaagctattcctcagctcccagggctacctgcgatctgtgttgggctctgacggaatggaatttatcctcacaaatggggtgtcctaaatgtcttaagaacctaattaaatagcggactgaaaaaaaaaaagacacaaacccaacacaaacaccttttggggcgcctggggcccgggaaaagttttttaaacaccatatcgtgtgtgggggggcgggcccacagtgttatgggcgaacacagggccacagcgcgtgtcccaagggaaacgcggcgcaggtacagttgtcgggttccccccaccaataaaaaaagcgccggggcgaacacggggttttgggaaagacaaccataggggtttcgcgggctacagggttctccaacacgggagccccggggaactaaataacccgccgcctgcgggaagacagagagagacaagcacacaccacaagacagagcagcgcagcaacgaacacgggtacgacacaacacacaaggagaggtagagagaaacgaatacgcaagcacagagacaagcacaactacgatagacacgagcagacggacagacgaacgcaacacagacgaacaggacgcagaccgagaac

SEQ ID NO: 20350 - DNA, 739 bp, Homo sapiens
  misc_feature 1, 716, 717, 718, 719, 720, 721, 722, 723, 724, 725, 726,727, 728, 729, 730, 731, 732, 733, 734, 735, 736, 737, 738,739: n = A,T,C or G
nagccaggcgtggaagactaaaacaggaaatgtttataaaaactgttcagcggttcgccaacaagaagtggtaaagtagcaaaaatggggatggagatgccaggaggaaagatgccaggggtaaagtgggaaaatgggaacctgaagccaggaggtcaagccaagccaacaggtgtcctgtttttcaatgaggaggtggggcacaggatggatggaaactttccacagtcacagaactaataagtggtgctgaggactcaaacccggggaagcccactctagaacccatgctggtcatccatatccccaaggccctggtcagaacacagctaagcagacgcgtcctggatggcttgggtcatcaggacgtccattacatccaaaggaagacagcctgtgacgtttcaaaagcaaaagtcccctaccagccagtgaagctacctgatttctcagtatcttacgcccagtgacacgatctaccctcaaaacttaaaaaaaaaagggaaacataaacacataacagcagcagcaataattaaagatgagatgagaacaattaagaaaaaaggaaaggtctcctgtgactgttttatttttagggaaacagagaggaagaagaatgatttttcttttgatgactctatatccaactctgaggtttgattaaagaaatgaccttgaaccccagcaaagaaaaataaaagacaatttccagnnnnnnnnnnnnnnnnnnnnnnnn

SEQ ID NO: 20351 - DNA, 496 bp, Homo sapiens
  misc_feature 1, 2, 495, 496: n = A,T,C or G
nnaagggttgaaaaggtaagtcctatattagatacatagtggctggtagtcttatcctctctataaatacacactttttgtcactgccccttccctgccatgcagagtccccatggctgaatctccctatgtctccaagtgtgcgtcacttgctgtcctctgtgctgtgtcccatgtgctgtgcccacagtcttatacagccagtgacttcagagccaggacacagctcagcagtctgtcatgaggctccatgtcttcccattttcctgcggcctgatccaggggaggctttggtgttgattagcatcttgatttagcctgattcaggacagacacctgggcaccttctccatatgccctggttccaccttaggtggcttcagggtggggtcagtcagtcactgggggtgctgggagcagagatgggggcagagtctgagctgctcctccatcacccaaggggcttcctcttctcatttaaggaaaaagtgtgann

SEQ ID NO: 20352 - DNA, 639 bp, Homo sapiens
  misc_feature 1, 2, 3, 4: n = A,T,C or G
nnnnggacattaaatatttattaatgttttgggaatgttgtgtatcagtaattatacctagtaaaaagaaagatccacatccaaattctccagaaacgggtggccaggtaaggaggaagaagagcattttaaaaaccaaaaccaaaacaaggaaaagctaaaaagagtttcttccaaatatcctgaattcatagaggttgaattcacatcttcagcctctatcccccaaagtgaattttaagggacttgagaagcttataccccatctgaaaacatgctgcatgatttcctctttcacgtctccagttccatacgtttctgttatcctttgtcctttttttttcatttcactggtcatagtttgaggataatcaggtggtggtaatagaggtgttcttttacccagtgttctgtctaaatttcttttggctccatcaattactaactgattaattttctgctgctgctccttggatcttctgtatttagcagcttactttgtgttggtgtatcaacgcctatgttttctgggagatggacaatggggggtaacttcaagttcagagcttccttttctgctgcaatggcagctttgtttgcatctgacatcttgatcccctaaagattaaaatactctgt

SEQ ID NO: 20353 - DNA, 2621 bp, Homo sapiens
  misc_feature 1, 2611, 2612, 2613, 2614, 2615, 2616, 2617, 2618, 2619,2620, 2621: n = A,T,C or G
ncagaggaggcggcggaacaccccgggttggtcgggtttccaagggctgacccgagctccggcacggggtgtgtgctcctgagctcttcagaaaccaggctgctttcaggaacattgctgtggattcccagggcctattccactagaagcaagatggctgaactcaatactcatgtgaatgtcaaggaaaagatctatgcagttagatcagttgttcccaacaaaagcaataatgaaatagtcctggtgctccaacagtttgattttaatgtggataaagccgtgcaagcctttgtggatggcagtgcaattcaagttctaaaagaatggaatatgacaggaaaaaagaagaacaataaaagaaaaagaagcaagtccaagcagcatcaaggcaacaaagatgctaaagacaaggtggagaggcctgaggcagggcccctgcagccgcagccaccacagattcaaaacggccccatgaatggctgcgagaaggacagctcgtccacagattctgctaacgaaaaaccagcccttatccctcgtgagaaaaagatctcgatacttgaggaaccttcaaaggcacttcgtggggtcacagaaggcaacagactactgcaacagaaactatccttagatgggaaccccaaacctatacatggaacaacagagaggtcagatggcctacagtggtcagctgagcagccttgtaacccaagcaagcctaaggcaaaaacatctcctgttaagtccaatacccctgcagctcatcttgaaataaagccagatgagttggcaaagaaaagaggcccaaatattgagaaatcagtgaaggatttgcaacgctgcaccgtttctctaactagatatcgcgtcatgattaaggaagaagtggatagttccgtgaagaagatcaaagctgcctttgctgaattacacaactgcatcattgacaaagaagtttcattaatggcagaaatggataaagttaaagaagaagccatggaaatcctgactgctcgtcagaagaaagcagaagaactaaagagactcactgaccttgccagtcagatggcagagatgcagctggccgaactcagggcagaaattaagcactttgtcagcgagcgtaaatatgacgaggagctcgggaaagctgcccggttttcctgtgacatcgaacagctgaaggcccaaatcatgctctgcggagaaattacacatccaaagaacaactattcctcaagaactccctgcagctccctgctgcctctgctgaatgcgcacgcagcaacctctgggaaacagagtaacttttcccgaaaatcatccactcacaataagccctctgaaggcaaagcggcaaaccccaaaatggtgagcagtctccccagcaccgccgacccctctcaccagaccatgccggccaacaagcagaatggatcttctaaccaaagacggagatttaatccacagtatcataacaacaggctaaatgggcctgccaagtcgcagggcagtgggaatgaagccgagccactgggaaagggcaacagccgccacgaacacagaagacagccgcacaacggcttccggcccaaaaacaaaggcggtgccaaaaatcaagaggcttccttggggatgaagacccccgaggccccggcccattctgaaaagccccggcgaaggcagcacgctgcagacacctcggaggccaggcccttccggggtagtgtcggtagggtttcacagtgcaatctctgccccacgagaatagaagtttccacagatgcagcagttctctcagtcccggctgtgacgttggtggcctgagctaggaggaaaaagagcagttttcactcagttttggttccctgcccgaggtgctgacccaattcgctgccaaaagagtgtcaatcagaatatacaaatcccgtatggttgtgtcatcctctcttaatcatttttactaattctaataatcagctctagcttgcttcataattttcatggctttgcttgatctgttgatgctttctctcatcaagactttgcagcattttagccaggcagtatttactcattattaggaaaatcaagatgtggctgaagatcagaggctcagttagcaacctgtgttgtagcagtgatgtcagtccattgattgtctttagagagttaatgttacaaaaaagaattcttaataatcagacaaacatgatctgctgaggacacatgcgcttttgtagaatttaacatctggtgtttttctgaaaaaatatatatacatatattgctttatttgaaacaaattaaaatatgctgcatttgaaacaacacacaccaagaaacagcagacaacaaagcaacgaacaaacagcaagacaacgaaggaccacagaagaaacagcaccgagaagcgagaagaagaagagctcacagccaaagacaaaacaaagaaagaaaggggcggggggcagaataaaactcgccggggggcacgctaagaagccaccgcgtgggtaagaaagggcgcccacagaaaggaattaacacgcaacggggccgtctaaacaacggaggagaacacaccgtggcatagaggaaacccccnnnnnnnnnnn

SEQ ID NO: 20354 - DNA, 285 bp, Homo sapiens
aagtctctactgaggaaagctatgaggatactctgttcgtaagctcccggtgaattttgttccacagactcggaagaaaggttggataagagttcactggagattgacaagtacctgaggagcccctacccagtgcgatcttaacggcattggtggaagctggggtcagaaaagagaaatgaccatttggaggggcggggcctcctagaagaaccttcttagacaatggggggaggatgggactttgttttttccaagaataaacttcaactcctgtcaaaaaaa

SEQ ID NO: 20355 - DNA, 608 bp, Homo sapiens
  misc_feature 1: n = A,T,C or G
ncgactcattgagccagatgctgaggaaaaatgtagaaaagcgagcactgctggagaacatggaggggctgttcttggctgtggatgaaattgtggatggaggggtgatcctagagagtgatccccagcaggtggtacttgtcccatgctaggtaacaggaaaataatagtgattgataagacatagtccctgtcctcaaagagctaacagtctagcaaggcaggaactttgagaaaagaccaatgtgttcaaaggaaaactcataacctgggtctcccttctcagatggcacattcaagaaactgttgcttatgcccctgggagccagagccttacttaagtcttaccaagtcaaatatctatcagcctcagatgatttgagcctggtaaagtcttagcaatagatttgctgcctcatgttcccatgaaaacctaataagagagagccctttcaactcaggcaacgggggtttaaggataacatgtttagtgaccatgtggacattcagcacaggtgagcttctcaagtgagagccatgtgtccccaaaagaaaggagggtttatccataagactttgctctccctttcaacactgtggtgggaagt

SEQ ID NO: 20356 - DNA, 693 bp, Homo sapiens
  misc_feature 1, 2, 692, 693: n = A,T,C or G
nngagctcaccatgtgggggtgaggctgagagaaaacaagtacacagccacagatccatgatgtgcagttctctggagcaggcgctggctgtgctggtcactaccttccacaagtactcctgccaagagggcgacaagttcaagctgagtaagggggaaatgaaggaacttctgcacaaggagctgcccagctttgtgggggagaaagtggatgaggaggggctgaagaagctgatgggcagcctggatgagaacagtgaccagcaggtggacttccaggagtatgctgttttcctggcactcatcactgtcatgtgcaatgacttcttccagggctgcccagaccgaccctgaagcagaactcttgacttcctgccatggatctcttgggcccaggactgttgatgcctttgagttttgtattcaataaactttttttgtctgttgataatattttaattgctcagtgatgttccataacccggctggctcagctggagtgctgggagatgagggcctcctggatcctgctcccttctgggctctgactctcctggaaatctctccaaggccagagctatgctttaggtctcaattttggaatttcaaacaccagcaaaaaattggaaatcgagataggttgctgacttttattttgtcaaataaagatattaaaaaaggcatataccctnn

SEQ ID NO: 20357 - DNA, 2265 bp, Homo sapiens
gttcgccacgcgtccgtttttttttttttttttttttttttttttcgatttatcgttatttattatcaaaatcatgaccagtgtgtagacatacttgtgaaaatatacagcaacttggggcttataacacatgagcaaagatgacattaacacgtgcactgttcacatcttggggtctagaggtcaagaacaaagatcacagacaagacgttactaaacggacccctgcagtaggtcccgaattgcagaatcatccaattccagcatggtcagcacggagatattcacagaaagaaacccagcaaagtcctctctgagccgctagagtcaacaagcttttcatacacactatggagagcccacgccccacataacccttgagaacacagttccatgtcttggctaacacggctctcaccgctggcctcaacacccctgggccatgctccctctgctcttccatccccaccacaacgaagaaaggtatgaccgcacgttatatatagtaaagaagaactttgaggccgcaggacagggccgcagcagcaagctctctgggtagtgccttactgctccacccacctgagccctgttccaagtgcaaggagcttcccaaatcctagagaatgattgtacttagaaagttttgttttgtttaagagaaaatggctttacatgaatttatgttcctcatggcagatatgttacacttccctctaaacagaaagacaagcccaggtggggcccgggcatcctcgaggaatgaagcagccattcccaccacctctcagggactaacaggtgcatgtggacacttgaaccacgactgtgtccacagctcctcctggaccaggcctggtgcctgagtgtgaagactcctggcctgcgtggcaggggcagctatctgggagggctaaacagcctggaggctgagtctgcagaggaagggggacctgaaagagcccaggtacaggtgcccatcgtgttcgtgcacctcgctgatgtaggtggccaccagcccatcgggatcatgcaggcttctccggaaggcaccgctgtcgctgagttctaggacgaggctgtaccgcggcacaaacttcatcaccgtctcttgactaaagagcagatcacaaccagcgcagcttcccttaaaaatcatccttttaatccagggtctctcagataagaaatccagcatggaaaacccagggttagggcggatggtcgacatgcccacccagtaccccccagagctgctgggccggatgttgtctggaaatccaggcatgttctccacaaacagatcagccccgcccttcatcaggccagaaacgtagactcttcgtatcctggccatggttgtttctgccaccaggacaaagtcttctgcaggagacagctggactccattcgggaaccgcagctggtccaataaaacttttacttccctggtcacagtatcatactccagcaggcgcccgtcatctgtgccctccatcaccagaagcaggtagtctcgtctttgccatttgctgctagaatcggtgaaataaatcttcctcccatcctgagtgactgtaagatcattcacaaaggacatgttcttcccctcaatgggtgtctcggaggacagcagcagtttcacttcacgtttccagggatttacttcaaatagtcccttgtatgcatcggccacaaagagagtcccattgggccctgcacggatacccaggggtctcccacacacaggctcatcatctcgggttttgcaagggcccgaaccaaaccgggcaatggtctctatttcaccattttcaagttttacgacccggccatctgctgtcccagtaaacatcacatccccaatatgtgctatggactccggtccaacaagttgattttcaaacagcctttctgcctgtcgcagcttcgtatttggatgcagaacaccaagcaagagcgggggttctttgaagctgagaggctgtggatctataggagattccagcagcatcatggctccaagcaggggaacggtgagagaaacagccagcatcaagaaggtcactcggaaaactctgccgctaaaggagctgccgtccttagcctccggggcctggccatcatcgtctgtgacgacctgcggccgcaggggccggcgctgtcgcagcccgtccgcctcgctcatggtacgggcgccagcctcaccacgcagaaaccacctccctcggccgattatacacccagtctcgtacctagccctaa

SEQ ID NO: 20358 - DNA, 785 bp, Homo sapiens
  misc_feature 1, 2, 757, 758, 759, 760, 761, 762, 763, 764, 765, 766, 767,768, 769, 770, 771, 772, 773, 774, 775, 776, 777, 778, 779,780, 781, 782, 783, 784, 785: n = A,T,C or G
nnctaatttaaggctggacacagagtcagcaacacacaagacatcatcttgaaggaaggatggctttggccagaccaagaccgagacttggagacctgattgagatttctcgctttggctatgcacactgggccgtctacgtgggagatggctatgtggtccatctggctccggcaagtgaaattgctggagctggtgcggccagtgtcctgtctgccctgaccaacaaagccatagtgaagaaggaactgctgtctgtggtggctgggggagacaactacagggtcaataacaagcacgatgacagatacacaccactgccttccaacaaaatcgtcaagcgggcagaggagttggtggggcaggagttgccttattcgctgaccagtgacaactgcgagcacttcgtgaaccatctgcgctatggcgtctcccgcagtgaccaggtcactggtgcagtcacgacagtaggtgtggcagcaggcctgctggctgccgcaagccttgtggggatcctgctggccagaagcaagcgggaaaggcaataaatccaagaaattgtcccaacaaccaccaattcttacggaggaatattatttagccagcaggagtggagtttggtttactgattttactgttttgtgttcatgaatctttattttaatggagttaaaagcacaggaaaatgtatttggaaatgcagcttagtatgaattctattaaagacacaattgggctctgctaagaaaaaaaaaannnnnnnnnnnnnnnnnnnnnnnnnnnnn

SEQ ID NO: 20359 - DNA, 2139 bp, Homo sapiens
  misc_feature 1, 2, 3, 4, 5, 6, 226, 227, 228, 229, 230, 231, 232, 233,234, 235, 236, 237, 238, 239, 240, 241, 242, 243, 244, 245,246, 2134, 2135, 2136, 2137, 2138, 2139: n = A,T,C or G
nnnnnncccccccttttaaaaaccctttttgggtttgggccacccccccttaaaagccggggaaaaaaagggttttttttggaaaattgggagccaaatccttttttggggccccttttaaaggccaaaaaccaggtttcccccccccatgggcttttttttttttttccggttcaaggggaatgtgggggggttttttttttaaaaaatttaaagggcccccccnnnnnnnnnnnnnnnnnnnnntttttttttttttttttttttttttttttttttttttttttttttttccaggctggtctctgtggtttttattagtgtttcctgggacccatcaaacaaataaacatattttgaaaaatataattctttgacaaaacaggaatagcaggaatagtttgaatttaacatagcttaaagggaaagatttctgattttttttaaatagtagcaatagagttgtttccacaaattgtcaacccaggagccagatggaaagaaaaacaagaattatgcagataactacagaaagattaatcccaatttagttaaacttgtgaaggcttgtacgtttcagaggttcataagacacagtctcaacaggagttttttttaataaatgctctatctctagttccagaaactgaattccaagaagctacactgaggataattcagctctgatattgtgattactgtgatgttctttcattcatacagtaagtatctgcccaatacgtaactaccgagatctattgcttcctacataattagacaagctcctcacacatatgggcccatgccgtgcacatagcaggcactcaacaagtgtttgcttaactacagaagaataatataattgccttccttcttaactgttttacctttttctatacttgatatatttgaaaaacaacatgcttgcaaaactaaaatctaacatgcattactaactttatcaaaagatccctcagtatttttcaaaaaggaaaaaaataataaaaaccaatcccccaaatactaaaacttagaactgctttacacttaaatagcaatttacatcatattaacatattcataatcttcattggttaaaacaggtcaaaggtttattactggcttctcataccagataagtctcacagttcccaataaggcaacagaatcctcatccaacatatattgacttgtggaacccaacggcctgttttggtttcatttcagcgcaagtagaaggcaaaataaagagtctcacagtaaaatgttcatagtagataatatgtccttgaaggttgtgccgttgtgctcttattccactgaagaaatgattcacatcccaattatagatatggtctcccaatcagaggagtcttttagaagacattcattcattcattgaacaaatatgtgttgtgtacttgtcccatgctaggtaacaggaaaataatagtgattgataagacatagtccctgtcctcaaagagctaacagtctagcaaggcaggaactttgagaaaagaccaatgtgttcaaaggaaaactcacaacctgggtctcccttctcagatggcacattcaagaaactgttgcttatgcccctgggagccagagccttacttaagtcttaccaagtcaaatatctatcagcctcagatgatttgagcctggtaaagtcttagcaatagatttgctgcctcatgttcccatgaaaacctaataagagagagccctttcaactcaggcatacggggggtttaaggataacatgtttagtgaccatgtggacattcagcacaggtgagcttctcaagtgagagccatgtgtccccaaaagaaaggagggtttatccataagactttgctctccctttcaacactgtggtgggaagtactctgttaccaccccaagttggcatagctcgattactttaagttctccaagtcacgaacagcacatagaaaatgcagcaaactcaagtcaagacaatagagagatatgctgagaacttaatactcaagccttaatcaggcaccagatgccaagaaaccttcactctcaacaaacaacacaatccactaattatctgtagaattgttgtagttggtactcttcacattcacttactcctannnnnn

SEQ ID NO: 20360 - DNA, 1210 bp, Homo sapiens
  misc_feature 1, 2, 3, 4, 5, 6, 7, 8, 9, 10, 11, 12, 13, 14, 15, 16, 17,18, 19, 20, 21, 1209, 1210: n = A,T,C or G
nnnnnnnnnnnnnnnnnnnnnatgtagagggtggtctccctatgttgcccaggctggtctggaagttctgggctcaagggatcctcccactttggcatccaaaagcgctgggattccgggggtgagctaccacatccagcccacagtggctttttttttttagggaataattcattctccattccactgtctgtacatttttttttgaaaggagattcctcctctgtattactttgagcatccattggatgtcagcactgttccttccaaaagtctgctcactacaaactcaatcttaaaaaatttccattgacactatgccaatcgattattacaactgaaaatgacattagccctatgaaaatggaaaatactcagtagagaatataaaacatttgtctaatatgaagtggtatctgagtcaaagtactggaaggaaaaatgtacttcagcacttgtctacagtttaactgaatgattaatgtgaaatttaaaattggatccccagatcttgtttccagcttctttcttttgggacttttagccctggatgccttattttccaggggtaaaggatgttcttgcaaatcgttccttgattgtaatggatgaaaagaaaaaagaaatgggagaggcccactgcatcaccaactgcaacggaaattccctttgatgaatcaggaagacaaattaatgtcatacgctagcgtgcagaaaagtaacctctgataaagttgctattgtataaaccgcagaagcagatggcttccggccgcagagcttaagagacccttcagcttctcggtgtaggtcaccagtcatgtcacgctcacaaccctttcgcctccctctaggtcaggcaccgcatccaagttaagcaaccgacgccggctccttggtgtcccaacaaggtctagtagaaaagcaactttataattcgtttcacagatttgattaagagccaactgagtagtgggccttgtgctagggctccgagggcccaaggaccccatggaaccagatttagtcgctgacctctaggagctcacaggtgagtgactcacacaccggaagacgagatcaataatgtagacatgaacgctggctagccagtcccagaggaggtgtcatctgaccaaaccaaggcaagtctgggcagttacgcagacaccccgagaaaggtacgccaaccccacgcgtccgcggacnn

SEQ ID NO: 20361 - DNA, 3266 bp, Homo sapiens
  misc_feature 1, 2, 3, 3264, 3265, 3266: n = A,T,C or G
nnngtcatcagctcgctctccattggcggggagcggagagcagcgaagaagggggtggggaggggaggggaagggaagggggtggaaactgcctggagccgtttctccgggccgctgttggtgctgccgctgcctcctcctcctccgccgccgccgccgccgccgccgcctcctccggctcttcgctcggcccctctccgcctccatgtgccggatagcgggagcgctgcggaccctgctgccgctgctgctggccctgcttcaggcgtctgtagaggcttctggtgaaatcgcattatgcaagactggatttcctgaagatgtttacagtgcagtcttatcgaaggatgtgcatgaaggacagcctcttctcaatgtgaagtttagcaactgcaatggaaaaagaaaagtacaatatgagagcagtgagcctgcagattttaaggtggatgaagatggcatggtgtatgccgtgagaagctttccactctcttctgagcatgccaagttcctgatatatgcccaagacaaagagacccaggaaaagtggcaagtggcagtaaaattgagcctgaagccaaccttaactgaggagtcagtgaaggagtcagcagaagttgaagaaatagtgttcccaagacaattcagtaagcacagtggccacctacaaaggcagaagagagactgggtcatccctccaatcaacttgccagaaaactccaggggaccttttcctcaagagcttgtcaggatcaggtctgatagagataaaaacctttcactgcggtacagtgtaactgggccaggagctgaccagcctccaactggtatcttcattatcaaccccatctcgggtcagctgtcggtgacaaagcccctggatcgcgagcagatagcccggtttcatttgagggcacatgcagtagatattaatggaaatcaagtggagaaccccattgacattgtcatcaatgttattgacatgaatgacaacagacctgagttcttacaccaggtttggaatgggacagttcctgagggatcaaagcctggaacatatgtgatgaccgtaacagcaattgatgctgacgatcccaatgccctcaatgggatgttgaggtacagaatcgtgtctcaggctccaagcaccccttcacccaacatgtttacaatcaacaatgagactggtgacatcatcacagtggcagctggacttgatcgagaaaaagtgcaacagtatacgttaataattcaagctacagacatggaaggcaatcccacatatggcctttcaaacacagccacggccgtcatcacagtgacagatgtcaatgacaatcctccagagtttactgccatgacgttttatggtgaagttcctgagaacagggtagacatcatagtagctaatctaactgtgaccgataaggatcaaccccatacaccagcctggaacgcagtgtacagaatcagtggcggagatcctactggacggttcgccatccagaccgacccaaacagcaacgacgggttagtcaccgtggtcaaaccaatcgactttgaaacaaataggatgtttgtccttactgttgctgcagaaaatcaagtgccattagccaagggaattcagcacccgcctcagtcaactgcaaccgtgtctgttacagttattgacgtaaatgaaaacccttattttgcccccaatcctaagatcattcgccaagaagaagggcttcatgccggtaccatgttgacaacattcactgctcaggacccagatcgatatatgcagcaaaatattagatacactaaattatctgatcctgccaattggctaaaaatagatcctgtgaatggacaaataactacaattgctgttttggaccgagaatcaccaaatgtgaaaaacaatatatataatgctactttccttgcttctgacaatggaattcctcctatgagtggaacaggaacgctgcagatctatttacttgatattaatgacaatgcccctcaagtgttacctcaagaggcagagacttgcgaaactccagaccccaattcaattaatattacagcacttgattatgacattgatccaaatgctggaccatttgcttttgatcttcctttatctccagtgactattaagagaaattggaccatcactcggcttaatggtgattttgctcagcttaatttaaagataaaatttcttgaagctggtatctatgaagttcccatcataatcacagattcgggtaatcctcccaaatcaaatatttccatcctgcgcgtgaaggtttgccagtgtgactccaacggggactgcacagatgtggacaggattgtgggtgcggggcttggcaccggtgccatcattgccatcctgctctgcatcatcatcctgcttatccttgtgctgatgtttgtggtatggatgaaacgccgggataaagaacgccaggccaaacaacttttaattgatccagaagatgatgtaagagataatattttaaaatatgatgaagaaggtggaggagaagaagaccaggactatgacttgagccagctgcagcagcctgacactgtggagcctgatgccatcaagcctgtgggaatccgacgaatggatgaaagacccatccacgccgagccccagtatccggtccgatctgcagccccacaccctggagacattggggacttcattaatgagggccttaaagcggctgacaatgaccccacagctccaccatatgactccctgttagtgtttgactatgaaggcagtggctccactgctgggtccttgagctcccttaattcctcaagtagtggtggtgagcaggactatgattacctgaacgactgggggccacggttcaagaaacttgctgacatgtatggtggaggtgatgactgaacttcagggtgaacttggtttttggacaagtacaaacaatttcaactgatattcccaaaaagcattagaagctagctttactttggtggtctacctaccagctgctggagcctggttgcgccacccatggcgccaggggatcggtcctcggcggggcaaacccggccctgtcctggtttcgccccacccggtttgtgccctcgtccctcccagggaattcgcaggccgggggtcttccacacacaccacttgtgcgcggcgctgctcactgacgttgtcctttaacccacccggttgtgtgggtgtcgtgctggctttgcgccccgcacggctcatgnnn

SEQ ID NO: 20362 - DNA, 820 bp, Homo sapiens
  misc_feature 1, 2, 3, 4, 5, 6, 7, 820: n = A,T,C or G
nnnnnnnagagccgcttccccctcctccctgtgctgtctgcaccgaggagagcggcctgccggaagtgggccaccatatctggaaactacagtctatgctttgaagcgcaaaagggaataaacatttaaagactcccccggggacctggaggatggacttttccatggtggccggagcagcagcttacaatgaaaaatcagagactggtgctcttggagaaaactatagttggcaaattcccattaaccacaatgacttcaaaattttaaaaaataatgagcgtcagctgtgtgaagtcctccagaataagtttggctgtatctctaccctggtctctccagttcaggaaggcaacagcaaatctctgcaagtgttcagaaaaatgctgactcctaggatagagttatcagtctggaaagatgacctcaccacacatgctgttgatgctgtggtgaatgcagccaatgaagatcttctgcatgggggaggcctggccctggccctggtaaaagctggtggatttgaaatccaagaagagagcaaacagtttgttgccagatatggtaaagtgtcagctggtgagatagctgtcacgggagcagggaggcttccctgcaaacagatcatccatgctgttgggcctcggtggatggaatgggataaacagggatgtacctgggccgcagagggcccattgtaggtatccggaattatgtcatctataaaaatactcacattaagacagtagcaattccagccttgagctctgggatttttcagttccctctgaatttgtgtacaaagactattgtagagacn

SEQ ID NO: 20363 - DNA, 1666 bp, Homo sapiens
  misc_feature 1, 1664, 1665, 1666: n = A,T,C or G
ngaaataagcagcctgttgctcacacaaaacctgttggtggtctcttcacagcaacgcgaatgaaattggtgccatcactcggatcaggggacctcccttgggagatcaatcccctgtcctcctgctcttgctccatgagaaagatccacctacgatctctgctcctcagaccaaccagcccaaggaacatctcaccaattttaaatcggatcttctcagcttagcggctgaagactgatgctgccagatgactttggaagccccctggaccatcacagatgcccagctttggataactcttacagtggaggacaggaatatcaggtctctgagcccaagctaagccatcatatcccctgtgacctgcatgtatgcatccagatggcctgaagtaactgaagaatcacaaaagaagtgaaaatggcgcgtgcctgccttaactgatgacattaccttgtgaaattccttctcctggctcatcctggctcaaaagctcccccactgagcaccttgtgacccccactcctgcctaacagagaacaatcccctttgactgtaatttcccactacctacccaaatcctataaaacggcccacccctatctcccttcgctgactctttttcggactcagcccgcctgcacccaggtgaaataaacagccatgttgctcacacaaagcctgtttggtgtctcttcacacggactcgagtgaactttgatgccgtggctcggatcgggggacctcccttaggagatcaatcccccgtcctcctgctctttgctccatgagaaagatccacctacgaccttaggtcctcagaccaaccagcccaagaaacatctcaccaatttcaaatccagtaagcggcctctttttactctcttctccaacctccctcactatccctcaacctctttctcctttcaatcttggcgccacacttcaatctctcccttctcttaatttcaattcctttcattttctggtagagacaaaggagacacgttttatccgtggacccaaaactccggcgctggtcacggactgggaaggcagccttcccttggtgtttaatcattgcagggacacctctctgattattcacccacgtttcaaagggtgtcagaccacgcagggacgcctgccttggtccttcacccttagcggcaagtcccgcttttctggggaaggggaaagtaccccaagcccttctctctgtgtctctaaccgttactctgcttaactggggaaggggcaagtagcaccaaacacccttcatctctggagatctctagcccattccctgatatatctggggaaggggcaagttacccaagaccaattctctacttgtaattagacacatatctgattatctggagcaggggcagaagaccttaaagacatgacacataaaccatacagggacagtccaagaaacaggcggaagggcaaaacacactaaaccaatataagatgaaccctaaaggaaaggcacgcaaacaaaggagaagaaccccaggcctagtccaaacggacactaatgaaggacagacataatagtcaaaaccaaacaaaatagggcagcaacaaaacagagaaaacaacgcgaaagagaaaaaagacagaacgagcaaaaatagcaacaaatagacacaannn

SEQ ID NO: 20364 - DNA, 504 bp, Homo sapiens
  misc_feature 1, 312, 313, 314, 315, 316, 317, 318, 319, 320, 321, 322,323, 324, 325, 326, 327, 328, 329, 330, 331, 332, 333, 334,335, 336, 337, 338, 339, 340, 341, 342, 343, 344, 345, 346,347, 348, 349, 350, 351: n = A,T,C or G
naaccttttgtcacgaaaaccattgcacccaaaattgcaaaccctttcaaaaagactttcctcaggccctcaaaagtattgagtatctggaggaggatgcccaaaagtccgcccagaagggggtgctgggaccacccactgatgttctgtcatcagactctgagaacatgccgtgtgatgaagaaccatcccaattagaggagctagctgacttcatggagcagcttacaccaattgaaaaatatgctttaaattacctggaattattccaaacttctattgagcaaaaaaaaaaaaaaaaaaagtgcggcnnnnnnnnnnnnnnnnnnnnnnnnnnnnnnnnnnnnnnnnctgagatggggtctcactatgttgtccaggctggtctcaaactcatgggctcaaactatcctcctgcccttgcctcccaaattgctgagatgacagacatgagccaccatgctcacccaagaatctttcggacgcgtgggtcgaagcttgtac

SEQ ID NO: 20365 - DNA, 3358 bp, Homo sapiens
  misc_feature 1, 2, 3, 4, 5, 6, 7, 8: n = A,T,C or G
nnnnnnnngtagaaggaagggctttattcagctgggagcatcagcaggctactgccttaaaatccgagctccccgagtgcacgatttccgtcccttttaagggctcacaacactaaacatttcacatgaaagggtcatgattgatttgagcaagcaggcggtatgtgacaggggctgcatgcaccggtggtcagagagaaacagaacagggcagggagtttcacaatgttcttctatacaatgtctggaatctatgaataacatcagtttctaagttatgagttgatttttaactactgggtttaggccaggcaggcccaggcctggttttgggcctggcgctgggctgcctgtctttggttctacttccttgttgtttttttcttaaaagaggtactgagtataaaacaatataaaacaatatgagagggtctctctcttccctcatttcccctctttgagactctcactttttatcagtgggagttctcactcttatttttgctacttatgtattttcgtgcaatagattgatagtgatttatatagtatgcttgtgctgaagcattttggtgaactaaggttaagcgacgaagttttttatcatttggagaaatacaggtatcagacaagggagcagtaagcaggttcctattactattattactcttattataagagttttaaatccacctattgctgggaaccaatttccaaacatggctcccagattgagtccgtgccacacttgcacaggtgcatgtgccagttttgttatatctttaactatatcctcaactacttgcccctgatcatctatgtgtagacaataattagtaaggtcaaatttttcacaaactcctccttcagctgctagcaagtaatcaagagctagtctattttgatagatagcatttctcatcagagtctcttgccaggcaagaacagtcaaggcttgagtggttttattagtaataatttctaaaactgcttgtaaccatatgattcggttgagcatgtagatgggggttcgatatccccatgagacatcttgtgcccaagtggcaggtccatagtattgtaagattttttcagggggccattcatcgtctttccaatcacctatggctatgcttcatttttcacaggaagcacagactgggaagcccagaagtttacctgtttttatgggcactaagaagaaagatggcttaatggtgccaattacacagctacctggccaattacccagttacctgtcccactgatcaggcagctttagcataagctctggtgcccacatatccagtataacctggtgggggccgtccagtcccggtggaattctgggtgggcccaaacagtctgcaactttggaaatttgctgaatggattcctttctgtgtaattggaactccaccatgtaactgtttttgtggtaccattatacagcttttgcccaagacaactaagccgccctataggatgagtgaatccttttccttctctagctatgcaatactgtctaataattgagacttttagaacctaaaaattgtcagggtggttcttttgggctgggaattcatcaggaactgggtctgtaggaactaattcttgggcttcttatggaagttcttcttatggaaactctttacggttcttccacaaacataacatgagttgacatttagggactggacctacatgcctcggctaacttgcaaaaacgattctggttttcctggagctccggactggcacatttagttcatcatagaaagtctgaaatactggttctggagagcgtctttgaacctctccttttattaggatgcttacactaggatctagtccttttccatcaatgcctaatgttacatattttcctttattacactttggttctgaggggtttgtgattatcaattctaaaaggttgcagctcccactcgtgcaggaggggctgacttttcctttttggagccaaacaggatcttttttatcttctttctaagtagcccaaatgacacaagaccagtattgacacatctcacataaatatgattcttgacagatatacttatttttttctgtgtaacttttttttccaatttagagaaccgcatcctattccatgctgcttactatcaatagtggcacaagcgtcaaattttaaggttacatttttgggacccctttttcttctgttctagctattactttacttgtgtcacctagaaaaggaccagtccttagtcctacttcaaagactgtgatcatgggaggttcaaaggggtcatagcacacatcgggctggtcacttcctggattacatactttatactgagtgttattatacaaacaggttccttttggagttcctaggcattataataactataaaataataggactgtagcaatcttttgtcctacctcagtgacttgatgtatatactggaaacagttctcagtctgaggaaggtcagttgaagtccttactgtacaagtccaaattttaaggaaaatgagtcccgcgatgagtttcctcatgcttcagctgtgcgtggaccagtcagcttccgggtgtgactggagcagggcttgtcgtcttcttcagagtcactttgcaggggttggtgaagctgctcccatccacatacagctcgcagtctactgatgtttaaggttggtctcggaggttgggcctactagggtagactgagtctaacacctctacacagtttatgttcaactgggctctctgataccaggagtaaggtgtgcagggttagggtgtcgcaaacttcagtggttatgcgggaattttcacagagcaagctttggtatctagttagtctagcattcgttagctaaggtatcctttggtatttattaaaatcatcacagcatggggggactttaggttttgcccaagagttagcttatctgcttcttatgctaacagggccattgctgccagggcccttagacatgggggccagcctttggaaaccccatctagttgttttgagagataggccactggccttggccagggccctacagtctgggttaaaactccaactgccattttttttctttttgacacatggagtgtaaagagttttgtcaggtcaggtagccccagggctggggccgacatgagtttttctttttaactcatgaaaagctcgttgctgttggttgtaatagatgtagtgtatctaatttacatttttattgactgtcatctaccaaaatattgacttcagtcctgtaactatttgatttcaagctttaaattgatctggtattccttgcggggctccaattgcatctaaatatacccgcgt

SEQ ID NO: 20366 - DNA, 285 bp, Homo sapiens
aggtacgcgtccgacctagcttgagtcgacccacgcgtccggcatttgaatgcattttgtttggtattgtatttattcaataaagtatttaattagtgctaagtgtgaactggaccctgttgctaagccccagcaagcaatcctaggtagggtttaatccccagtaaaattgccatattgcacatgtcttaatgaagtttgaatgttaaataaaacctgcccgggcggcctcgagcggccacccgggcaggtcggccgccaccgcgtggagctccaattcgccct

SEQ ID NO: 20367 - DNA, 3676 bp, Homo sapiens
  misc_feature 3676: n = A,T,C or G
atgggattcggtgcggggcagcgactgcgccccgtcccggcgccgcgctgtcgacccacgcgtccgggcccgggcagctgcggctcgggatccgtcgaggggaggccgagcttgccaagctggcgcccagcggggtcatggtgcccggcgcccgcggcggcggcgcactggcgcgggctgccgggcggggcctcctggctttgctgctcgcggtctccgccccgctccggctgcaggcggaggagctgggtgatggctgtggacacctagtgacttatcaggatagtggcacaatgacatctaagaattatcccgggacctaccccaatcacactgtttgcgaaaagacaattacagtaccaaaggggaaaagactgattctgaggttgggagatttggatatcgaatcccagacctgtgcttctgactatcttctcttcaccagctcttcagatcaatatggtccatactgtggaagtatgactgttcccaaagaactcttgttgaacacaagtgaagtaaccgtccgctttgagagtggatcccacatttctggccggggttttttgctgacctatgcgagcagcgaccatccagatttaataacatgtttggaacgagctagccattatttgaagacagaatacagcaaattctgcccagctggttgtagagacgtagcaggagacatttctgggaatatggtagatggatatagagatacctctttattgtgcaaagctgccatccatgcaggaataattgctgatgaactaggtggccagatcagtgtgcttcagcgcaaagggatcagtcgatatgaagggattctggccaatggtgttctttcgagggatggttccctgtcagacaagcgatttctgtttacctccaatggttgcagcagatccttgagttttgaacctgacgggcaaatcagagcttcttcctcatggcagtcggtcaatgagagtggagaccaagttcactggtctcctggccaagcccgacttcaggaccaaggcccatcatgggcttcgggcgacagtagcaacaaccacaaaccacgagagtggctggagatcgatttgggggagaaaaagaaaataacaggaattaggaccacaggatctacacagtcgaacttcaacttttatgttaagagttttgtgatgaacttcaaaaacaataattctaagtggaagacctataaaggaattgtgaataatgaagaaaaggtgtttcagggtaactctaactttcgggacccagtgcaaaacaatttcatccctcccatcgtggccagatatgtgcgggttgtcccccagacatggcaccagaggatagccttgaaggtggagctcattggttgccagattacacaaggtaatgattcattggtgtggcgcaagacaagtcaaagcaccagtgtttcaactaagaaagaagatgagacaatcacaaggcccatcccctcggaagaaacatccacaggaataaacattacaacggtggctattccattggtgctccttgttgtcctggtgtttgctggaatggggatctttgcagcctttagaaagaagaagaagaaaggaagtccgtatggatcagcagaggctcagaaaacagactgttggaagcagattaaatatccctttgccagacatcagtcagctgagtttaccatcagctatgataatgagaaggagatgacacaaaagttagatctcatcacaagtgatatggcagattaccagcagcccctcatgattggcaccgggacagtcacgaggaagggctccaccttccggcccatggacacggatgccgaggaggcaggggtgagcaccgatgccggcggccactatgactgcccgcagcgggccggccgccacgagtacgcgctgcccctggcgcccccggagcccgagtacgccacgcccatcgtggagcggcacgtgctgcgcgcccacacgttctctgcgcagagcggctaccgcgtcccagggccccagcccggccacaaacactccctctcctcgggcggcttctcccccgtagcgggtgtgggcgcccaggacggagactatcaaaggccacacagcgcacagcctgcggacaggggctacgaccggcccaaagctgtcagcgccctcgccaccgaaagcgggcaccctgactctcagaagcccccaacgcatcccgggacgagtgacagctattctgcccccagagactgcctcacacccctcaaccagacggccatgactgcccttttgtgaacacaatgtgaaagaagcctgctgtggtactgagcgtcgggctgtcacaaggcactggaagaagggagcctgctggtccagagtgtgcgtgtgtatcggtgtgtgtgtacacttgcatgtgtgtgtgtgatccagtaggatcctagagacaacctgtcatactgtttacaaaattgtgcagctggtttcgtgctgacccttagggtgcgtctgttgggttttgttgggctagaaaaatgaaaatttttagatggcgttttcattcctctgactgatattgagctgctttggtgttaaaggtgtaatgtgtacagagttgtatttaacaataataaaagtaacttaagtttgctctatcagattttagttctgcacagaggttaagtgggaaaatgcagctgttgcaaaatgtatataaatagtatgttcatttttttcagtatattatctgatactgtgttagcagcaggtctgcttaaacctagtcttgttgttattgagtcatttcctctcctttgataactagaactgaaagcatttttaacattcttctcctggaagaaatgaattacttgaagcatgaaaagcacaccagggtggttgtttatttagcaattatgactgtagatttaaaaacaagcaaagaaacaacacctcagcagctgcccgtttccttagtctccacttcagagggggatgcgaagaggtcggcccagctccggtgaccatgaaggtggcacaggaattacagtgtgaatggctgtgtcagatgttttcgtacctcagattaaaaatattgctgaggtcagacgccacaattttcatgactttcttcagaagtagcacattttcgtgacttccgctgtcctctgaaaaacaaagttatttggaacatgttcatgcaaaagtgattctgaccaagtctaaatcgagcttttctactgacatgaaactgttggaaactgatctcattttataagaaatgattttcccctcaaggaggcgtctgtaattccagaacagtccagacatcagctgtacctcatgctcagtagtttttatttgagtttcttttgtgagttaactatgggagatttaacctcttttgccaaagagggaagtgtgtgtgtttttttaatagaaaatatggaccaaaaatttttttccctgaagaatgtattataaccctatttgtgtggttattacatcctgtgaaatgtatatatgttaaaataatgggggtgctggaaggtcatggcagactagctgctggttagtgtggaggggaaatggtttactttgtagagtttacatggttttatgcgcacactaattgtaataaactatgccaaaccaaaaaaaaaaaaaaaaaaaagggcggccgctagacn

SEQ ID NO: 20368 - DNA, 1862 bp, Homo sapiens
  misc_feature 1, 1857, 1858, 1859, 1860, 1861, 1862: n = A,T,C or G
ncgccgccgctaggctgagtgccgcgtctcgcgtagtctcccgcgccgccgtccactgcgcgcttcgctctccgccgcccgaggcccgcgcgctcgccatgtcccggccaccgccaccgcgggtcgcctcggtgctgggcaccatggagatggggcgccgcatggacgcgcccgccagcgccgcggccgtgcgcgcctttctggagcgcggccacaccgaactggacacggccttcatgtacagcgacggccagtccgagaccatcctgggcggcctggggctcgggctgggcggtggcgactgcagagtgaaaattgccaccaaggccaacccttgggatggaaaatcactaaagcctgacagtgtccggtcccagctggagacgtcattgaagaggctgcagtgtccccaagtggacctcttctacctacacgcacctgaccacggcaccccggtggaagagacgctgcatgcctgccagcggctgcaccaggagggcaagttcgtggagcttggcctctccaactatgctagctgggaagtggccgagatctgtaccctctgcaagagcaatggctggatcctgcccactgtgtaccagggcatgtacaacgccaccacccggcaggtggaaacggagctcttcccctgcctcaggcactttggactgaggttctatgcctacaaccctctggctgggggcctgctgactggcaagtacaagtatgaggacaaggacgggaaacagcctgtgggccgcttctttgggaatagctgggctgagacctacaggaatcgcttctggaaggagcaccacttcgaggccattgcgttggtggagaaggccctgcaggccgcatatggcgccagcgcccccagtgtgacctcggctgccctccggtggatgtaccaccactcacagctgcagggtgcccacggggacgcggtcatcctgggcatgtccagcctggagcagctggagcagaacttggcagcaacagaggaagggcccctggagccggctgtcgtggatgcctttaatcaagcctggcatttggttgctcacgaatgtcccaactacttccgctaggcccatcatggctcaggctgcccaaggcttttctgtcacctcttttgttctctcacactgaccagtcttggccttaagctgacttagaagggtttttctgaattgtctagatccatgcattatttttctagcttcctgccttgctccctattcactttacactgtgaaaggtggggggtgagtcccacttgagcgcttcctgttgaataaagcaggcacttgacctggctgtagcctaggtcttgagtgaaccacaaaaaaaaaaaaaaaacaaaaaaaaaaaaaaaaaagaacgctcttctgtggcgcgccagcccccagaaaacacctcaaacacccaatggagtggcacacggcaccaatgagaacgcaccacgggccaacaagggacacaaagaaacccggcacaacaaaggcgggctcccacagaaaaaaaaggccggggaacacagaaggcgtctgaaacaaaccgacaggagagacgaggaacacaagcgggacccacacaggagaccaagagaagtcaaaaaagacccgacggggtggtttgcaccgggagaaaacacagcgacgaagagaaaagaaagcgagggcgacacagagaaaggcggcagagacagaggacgcgccaaaggaagcgacaaacgacgggggaccgaagagcagagcaaaacaacgagggagacaagagcgtacgcgacgacaggcgcgaagaaaacagcgcgagagcccgacgcagaggaacaagaaaggccgaggaggagannnnnn

SEQ ID NO: 20369 - DNA, 370 bp, Homo sapiens
  misc_feature 1, 2: n = A,T,C or G
nncgaattggagctccccgcggtggcggccgcccgggcaggtacaattagttatcaattcatgggctatggccactggtttgctggatggtcagggacttggaaggaacatgactggaaaattggtgacaaaacggtctgtggaagaggtatatacacagatctttctgaatgggtgaaaaatgtgaggatatttgtgtctcatatgaatgccaccaaagaatgacttcagcagaagaggattttaataaccaagtagataggatgacctgttcagcccctttctccaaccatgcaggtaactgcccaatgagctcatgaataaagtggccatggtggcagggttgttcggacgcgtggttcgaagcttg

SEQ ID NO: 20370 - DNA, 273 bp, Homo sapiens
  misc_feature 1, 2, 3, 247, 248, 249, 250, 251, 252, 253, 254, 255, 256,257, 258, 259, 260, 261, 262, 263, 264, 265, 266, 267, 268,269, 270, 271, 272, 273: n = A,T,C or G
nnnggagctcaccgcggtggcggccgaggtcaagcttcgacccacgcgtccggtttgtttttttcttacggcaactcaaagcaaagagctggaggagccagccattataattgcttactctcatcgcttagcgccccaggtgggatgtgtttccaaaacacatttttgtatttataaggaaatgtagttaggattaattttattgtcctaattagaactcacattttggttaaatcctcaatttcannnnnnnnnnnnnnnnnnnnnnnnnnn

SEQ ID NO: 20371 - DNA, 386 bp, Homo sapiens
ggcgaattggagctccccgcggtggcggccgcccgggcaggtaccatttctactgtagaggaaaatatatgacaattatcactgtcactgcctgacatacaaaaatggaacagaacagtggggtaatgaagggaggggagggaaagggaagagcaggagagagaggagttggaggagaggggaaacaaagggaaaagggtctattaaacagaggcctagagaagctaaaatttggaaatggcaaatctgagaagagcctgaataaaaagtggggctgaggccatgcacagtggctcacgcctataatctcagcactttgggaggccgaggcaggtggatcacctgagatcaggagttcgagaccagcctggccaacatggcaaaac

SEQ ID NO: 20372 - DNA, 2923 bp, Homo sapiens
  misc_feature 1, 2, 3, 2900, 2901, 2902, 2920, 2921, 2922, 2923: n = A,T,C or G
nnnaagagtcgaacggaaagagaaggcgggtgcaattcccccggtgctctcttttctttttcaacccccccagtgtttttcctccttgccattgcattgcctccgggaagttccccatcgatccacgaaagttttttattttagggaacttagtaaagtaagtttttctggcttctagcctttacctttgactcagcccctcccaccaccagttcccagacaccgggactggggcatctgtacatgtaacagacactttcactgagtccaaattaggagcaaaaatacaaaggttcacattggtcttaggtagatacaggcgaaaaaggattgagctgtttagctcagaaacaaacaaaacaaagtttctaaagcaccactaaattatataaaaatcagaccatggacggattgaaactggtattctggtgaaatactttactattttgtaaaaagttttacaaaaaattacaaattaaaagtatcaaccctctgagttcaaagcagcattttgaaaatgaactggtagttaatcctgtaaccacccttagagttgtaagtggcccttgggaatagggatggatgggttccacctgtttgaaatcctcgaaaaccctcctaactccctgcctgtccccctccccgtcagcactgtccttgggaataaactgtcctttgtaagagtggtgacggtaaaatgaatttcagatgggttacacacactatcacttgtctacctgatgatccaccactaagaccaatgcccacttctctgatgctacccttcttgtgggattagcctcctgcaaagactctggaattggagtatcctactcttgcatttcctttttaacttaggatcccaaatgatcactttgtgccctgaggcccttcagaagatttttaaatggctgtgggacaagggctttgggagctccttttgggagaaggcagtccctctggtgagggtgagacagcagtgagcttagttcatcagaaccagctctttggtgccctccaagtcgggagtagggggaaggggttgaagctgcatcttttaaaacaaaagcaaaacaacaagttccctgactgagccagctaaatggaatcctgtttccatgcagaaacttgctcctgattctgccatctctagggcttcaggtgtagtttcactggaaaggaggagcccacccaagaggtggggtcgacatgatgaaatccattgtcctggaggggcctgggaggcccaatggactttaacaacatattctttcctttctcttgaaaacacattgaacctacgctcttgccgcagtactaaggcaggctggagggtggtcagttccaacagcttgaactcagaaaaacatgacttcaaactgtagcttatgctgatctttagatctaatccttgtgtgggtagggggagggagccccttccccagtctttctcactcctgtctgccaagaaatgcaaacggttcatgtctagcttgggtactgcctctgggaggagaagtgacacgttaagtaactgataccaggaattctagggtggcgattgtctctgccaggttttaacattaagattttcacaaataattgcctggggtaacatttttgcaaaagatcttactgattactttgtagtattgttcacacacaaaaataaatatttacacgaattcaaatgttgagtagtactgagcaggtggggccagatgtgtggatggctggggtgtgggagaggccttgggcactggaggttgtgctgtgctaagggtgagtctcaggtgtcctggccctgaccagaggcctggggattggtcagatggaaggcagaggtggtgtggctggatggggtattggaggccacttgagagataacgaccacccccaacctctaggggccggaagtaagcacggggtgggcaccctacctttcagagttctggacctgaggcaggatggggcatcctcactggtgcccccccatccctccttggggggagtctgccacagtgccgggaggcagtggccacagctgcaacaggcaattggctgcagaaaagctggtttgggaaggggtgcctgttctgggagcgagtggctctccgtggccatcctaggatccactcggccctggctcccctggggcctctctgctctgagggaggaaaggcaacagagggcttctgccagctctgggcaggggcgggcagcagagagctgctgtcatggctacggagtgttgcacggagaggccctgggggcctgctgaggtctgggcgagtccctggtttagcagcactggtaggtattgcactgagcaagaggaagtgcctatcaatcaatcaatcaatcagggaggaaggaaaccaggccagctttttctttttgccctttttcacactccagggattatgggtttcttccaggaccggcccctccggaagggctggtcttaggagaacccaagtggctcctccacttccactgatccctttactccaaacatggcgcaaggggatgggagctgcagcccgccctggagctcacggctgcctgatagccggggctcaccctgaagaagtggcccctcttggcaggagtgagtctgaggggccaggcctgtgcacagaagttcagacctggctcctgggcagcggggtgtgagggcaaggccctgccaaccggctgccatctcccagcagtccaaggccggtcaagcagctgagggccagagctgggagggcggcaggggctggttagggacaggacgctctctgggttccagctcctggacacccagtctggacttacttacctcccaggcagacacattgtgtgggggagttggggttacagctgttcagaacaggctcagggcacatcctggnnnaagcccacgctggagtgnnnn

SEQ ID NO: 20373 - DNA, 959 bp, Homo sapiens
  misc_feature 959: n = A,T,C or G
actccagcctgggcgacagagcaaggctcagtctcaaaaaaaaaaaaaaaaaaaaagagaggaatagtaaatttatagtggagaaatctgcagtcactaacttaaccaaataaccacatggatgtatcccttattaaaggtaatcgaaagggcacagcgttacttctgtggaattcttgcccaaaatgcataatctcaatcaaatcataagaaaacatcaaaattgagaggcattctacaaaaccaataattaaccaatattcatcaaaagtgtcaaggtcataaaagacaagatgtttatagaaatacattaattttggtttctacttaaattttattttttaaaataattgttttagagatgtggccttgttagttggccaggatgatctcgaactcctgacctcaagtgagcctcctaccccagcctcccaaagtcctggaattacaggcatgaaccactgcatccagccatgttagtttcttagttttgaccaatgcaacagcatggtgatgtaaaatgttaacaacaggggaaactggtaaggcgtttatgaaaactcactttattatgtttgcaactattctctaaacataaatttattccaaaataaaaagtttatttaaaaaagtcacaaaccagaatctaaataaaccacagtagttttttcaaggcttcacaaataagagaagaaaaaactaaaatagaaagtctctctagaggccaggttccgtggctctggctcatgcttgtattctcaacacttttggggtaggcaggcagatgcaggatgggcagtggaggcaatggtgtcctgagatgggaggttcagctgagctagggaaggtcaaggctgcagtgagccaagattgcaccattgcactccagcctgggcaacagagtgagaccttgtcaaaaaaaaagttatctagagaaatactcatatgttgctactggn

SEQ ID NO: 20374 - DNA, 1221 bp, Homo sapiens
aaggctatatatggccaggggtgagagacattactgagcaccttggtgagcaagcctggctttaaagattggagaagagcttctggcaccagaaccctgtcttcctccagttctcaacacggggttgctcttcagtcataccggaatctgaatcaaatgctttttgtgcctgtcaccaggtctcccaggtgcactcatccaggtcagtgctcagatgtgtttaaggggaccctatattcagggaagttgcgtgaacactgcagtggggagaattgagaatagtcaggcctatcagtctcacagaatcacccctctacctttgatattccacttagctgtagagtccatctgtttgtccatctgctgaaatgagaaaagaaaaatttatgcactgatttaaaacaaacccaaaaaaaaagaaaaaaacaaaaaaaaaaatccctcctttctagctgaacaaaaatgtgcagttaatacttggcgcttgaaaatgcagtagtgaatgtggaaccaagcctgtctgtatatctggtagctcttttcttgctttgttttttcttaccagtattctgcccaacgtttgcttctgtgatggttatattgcctagcaagcacacccgtggttgtgaaaatagtatagcaaaaaagaaaaatccccggttattgatgtactagatttgtgtatgtcttttaaacagttctagtttcaccttacacagaataatcaggaaaagtgtaaaaattcaaaagtgaaataaaaattttatccagttaacaaaaaaacaaaaaaaaaacaaaaaaaaaaaaaaaaaaaaaaaaaaaaagaaaaaaaaaaaagaaaaaagaagaaaaagaaaaagaaaaacaaacaaaacagagggggggggagcgaaacagaccaaaagcgagagggcgagagaagcgacagacgaggggcgcaaaaggaggagacaacagacaataagccaagatacaagcaccacaacagagcaggcgcggcatcacacaaagcagagacgagcaacaaaacagaccaaacgcagacacaatatgaaaaacacaaccaccaaacctagaggagagcaaaacaagggaaaagaataccacaagagtataaaccaaccagaggcaaacaaacaacacaaggtgcctgggagacaagcacccagatgccgcggagcaagcatggcagacagatacatagaaaataccacgcgagca

SEQ ID NO: 20375 - DNA, 949 bp, Homo sapiens
tatgacagttccatgtaatatttttccagttaattttgtttaaaagtgagatgataatataaaaggatctcatataatagaataaaaataactggaaaaatattacatggaactgtcatagttaggttttgcagcatcttacatgtcttgtatcaatggcaggagaaaaatatgataaaaacaatcagtgctgtgaaaaacaactttcttctagagtcctcttactttttattcttctttatcatttgtgggtttttcccccttggctctgatcactttaacttcaagcttatgtaacgactgttataaaactgcatatttaaattatttgaattatatgaaataattgttcagccatctgggcagctgttaatgtaaacctgagagtaataacactactcttttatctacctggaatacttttctgcataaaatttatctttgtaagctaactctattaatcaggtttcttctagactctgcaacctacttcagttagaattgtctaatactgctctattaatcaggtttctaccctctacaacctacttcagttaaaattgtctaatactcaatattcttaataaaatttatgtaccatacttgtcattgcgtagacttcttatcaaaatttcacatttatctgtaggaaaatgtaaagttggtaaaaattgtttacacaaatcacacattttccatccttgacaattgcagtgtttttttttaaatattgctgtattagacaattttaactgaagtaggttgtagaggctagaaacctgattaatagagcagtattagacaattctaactgaagtaggttgcagaggctagaagaaacctgattagtaactatctattacttaccttttggaaattagaactagttatctatttctgccagtgtggttgatcagaaaactatggaaaatcttcctcagaaaattaa

SEQ ID NO: 20376 - DNA, 298 bp, Homo sapiens
aagcttcgacccacgcgtgcgagtcagggaaggtttgtttatgttacatttatttcaccagaactattttaatatatcaaaggggtttactatgccaaacaaaattctagggaaaaatactgctaaaaatggatgcctcatcagaacatgctgttgagtccaatgtgccataagacattttagcatgttaaatagcacttttaatagcaaaaaaaggcacatcaactgcgaagttatccttagtttgcaaatgctttttctagattaatgatttttcaatcattagggtacctgcccg

SEQ ID NO: 20377 - DNA, 478 bp, Homo sapiens
  misc_feature 478: n = A,T,C or G
acaagcttcgacccacgcgtccgatgaacaactggctgctctgtcccagggtccaatatccaagcccaagaggaaaagagagaaaaaaaaaaaaaaaaaaaaaaaagtgcggccggccgcccgggcaggtacagataaatataggaaactacttcagattattggacaaataagaatttcagtgtgtcactacctataattaagtagcagcacaccacaaccacagcaagtaaacactaatctcctctactgcctttttggggtcttttccagtcacaggagctaatttacagggataccactgggtttcaaccaatctctgaaagttcctttattatgagttttgaaatttaactagtgcatcacctacaattctgttggctagtttttttcttactcttcactaattagttttaatacaatatgtaatgttttcaaatttttataaacataggtgttgcggacgcgtgggtcgaan

SEQ ID NO: 20378 - DNA, 1440 bp, Homo sapiens
  misc_feature 1, 7, 1439, 1440: n = A,T,C or G
nacaccnatttcataatcctcataatttatcaacaaacacaatgtgcacgtttgtatgtatggaaataaacttataaatggggacgtattggagaaggaaatacatagacctacaactttgagcaaatagcagtgatgttttaggaactgaaatgtcacacttaaagtcttcagcccagctacttccctatttttgtggggagaagagggcctgattagaactgttctggttgtgtttggcgggaggggaataatttttgttcagacccacgcgtccgaaactttaatttttaggaataacatattgacttactgaactgaagcattctgagttgaaaggagccccagaggaaaggagttctgtgttgctcacatgttaaaagcttgctcaccttcagagcagagggaatacctatcttcagatatccgcccattttcatctcttcattatagtcaaacagtgtgacttgagagtgttgctctggtgtctgtattctggcttatgaagattatttgaaaaagaactcttactacattgaaatgcagacttttaaaaatttaaatattggattaggcagtcaaaaaaccaaacaagcataaaaggtcagtaagttgtaatcttaaaagtaaaggtggaaaactcattataaatggaagaaaagttttgatttccttttttgtttgatgggcagtatgccatattatatccaaagttggtttaaaaaatacttccatcaactatttttatttaaaataaacatttgagggaagttaccaaggcagcttttttcctcaaaagtaacctgttcctctttggaatagcacattttaggggcatggttaatacctgagatttttactcagtaaatcctgatggttactgtgtgtaaaatatctttaagtaggattgaaggcctctgtgggggaataaaatattaccaaagtctataaaaataaattttacatgttctcttttatgacagagagcagcactggttctgttatttttaaaatgaataattgatttcttgataggtgtttaatatttcttccctcactgctgattcttagatagaaaccattctttatatttgatagactgctttcagaaaacccttatcaacaagtgtacaatacttatctaaaactatacatttagaatggagcagtttaatactagatctcagaagttttgaaaaatagcaaagaagactggatttggaaagcatggtctacaattggttgttaaattctgaagctatgaagaataaatgtttcaactttggattatgaaaccccatttatgattttttaaatacacttgaaataaaaatgattaaactaaattttggtccagtgacattcctccgggccagttagacatcccaatttgttacagagccaataggcagatcataaaaccggcgcgtaaacttgann

SEQ ID NO: 20379 - DNA, 1640 bp, Homo sapiens
  misc_feature 1, 1640: n = A,T,C or G
ncacgaaggctggcgccgcggcggtaccggtggcggtcgcggctgtggccgggggaagtgaatggttttacccagagggccctgcgccgcctttctccgctggcaacggcgccgctccccgctcctcctccccagccatggcgttcacgttcgcggccttctgctacatgctggcgctgctgctcactgccgcgctcatcttcttcgccatttggcacattatagcatttgatgagctgaagactgattacaagaatcctatagaccagtgtaataccctgaatccccttgtactcccagagtacctcatccacgctttcttctgtgtcatgtttctttgtgcagcagagtggcttacactgggtctcaatatgcccctcttggcatatcatatttggaggtatatgagtagaccagtgatgagtggcccaggactctatgaccctacaaccatcatgaatgcagatattctagcatattgtcagaaggaaggatggtgcaaattagctttttatcttctagcatttttttactacctatatggcatgatctatgtttggtgagctcttagaacaacacacagaagaattggtccagttaagtgcatgcaaaaagccaccaaatgaagggattctatccagcaagatcctgtccaagagtagcctgtggaatctgatcagttactttaaaaaatgactccttatttttaaatgtttccacatttttgcttgtggaaagactgtttccatatgttatactcagataaagattttaaatggtattacgtataaattaatataaaatgattacctctggtgttgacaggtttgaacttgcacttcttaggaacagccataatcctctgaatgatgcattaatacggactgcctagtacattggaagcttggtttataggaacttgtagggctcatttggtttcatgaaacagtatctaatataaatgagctgaagatatcaggtgcttctgatgaagtgaaaatgtatatctgactagtgggaaacttcatgggtttcctcatctgtcatgtcgatgattatatatggatacatttacaaaaataaaaagcgggaattttcccttcgcttgaatattatccctgtatattgcatgaatgagagatttcccatatttccatcagagtaataaatatacttgctttaattcttaagcataagtaaacatgatataaaaatatatgctgaattacttgtgaagaatgcatttaaagctattttaaatgtgtttttatttgtaagacattacttattaagaaattggttattatgcttactgttctaatctggtggtaaaggtattcttaagaatttgcaggtactacagattttcaaaactgaatgagagaaaattgtataaccatcctgctgttcctttagtgcaatacaataaaactctgaaattaagactcactttcagtgcattgtttgagattaaaaatagtatttcttaaacttgcttaatccatgataaagacatgttgctgtcatttttaaaaagtgacgtactacattatgggttttctgaaaaataccatgcctagatctacaaaaggaaaatttttaaatgccgagcacattaacctcttttgtcatttgacaan

SEQ ID NO: 20380 - DNA, 1154 bp, Homo sapiens
  misc_feature 1, 2, 3, 4, 5, 6, 7, 1152, 1153, 1154: n = A,T,C or G
nnnnnnnctctctgggtcgtcgtgccgtccgcttgtgcgtttgtcccttgttgtttttccacgccctgggtgggtctccggtctgcgacccgctcacgcgtgtctgtgtcggaccaggctctgcgcggcgtgatatgcctgggtgggtctacccactgcactggcacggctgtgacgggtcccttgcagttcatgtgtatcaatgtggtatgagtggatgcggggttccaaagagcagaagtttggttcccaggacagtttcctagatgaactacttttcctcccagccctctctctctttaccgagggtgagcaatacaaaaggggtgtgctgcagctccagctttcagagtaccgccacagatccacagcctgtcctgatctgagagctgagccgatgccttttctttctggctgtgtctttttaccttctggacaagtaggatgaggtgaaaggagctgtccttctaagtctttgtatctccatttgtctgcagtttctcctcggtctcgtgtgtctgtgtgtgccagtcccttgtgctgacacaggacgtcccttaaagtccagtcctggcgatttctgaatctcactctttccctctttaaagttccaggatccttcttatctccctttcccccatagtctggcttagtctctttgtttccgggcgtaaaagcactgggattaatatgttttccaggctgagggaaaacacaggaatgtgatgtcgaaaagggacttttttttttctttcactgtgcttctctcctccctttatttctccctacctttttcctcctctttttcttcttctttttcttctttctcttgcctggattcagtcccagaaatgttaggactacctcagttttgctccaaaccaaactcaaacaacagcagccactggaaatcaaggaaacttcactaagaatttaacagatcagcaaaacaccgcctccttcccattttagcacgttcagagtggactcagtgaggagtgagaaggctgttctttggggtggggtaaagtttttaaactccacacatcatcataaatcactttagaagaggatgactggtgccttaaccccttccaaaccaagtcatcggggtaacttctcttccagtatgtttttaccgcgtcgactccnnn

SEQ ID NO: 20381 - DNA, 742 bp, Homo sapiens
  misc_feature 740, 741, 742: n = A,T,C or G
caagcttcgacccacgcgtccgcaaagttcaccaaattcgctacagcctaagactagcctcaccagtcctttttcccattaatcaaaactttgcagaagagacaatgatttttaccattcattcaaccagtttgcacagagagaggctgaagcctgacttgtaagaaactcttgtccttttgccagtgtgccaggtttctgggttccccttctctgagtggctttgatgaccctgcttgctgtgccatagctatggggggggccaagccatgttacccaaaaaaaaaaaaaaaaaaaaagtgcggccggccgcccgggcaggtgtcactttcaacttggttatgcctaaaacaaagtctccctcatctccaaacaatttctcccgactttctttcttttttgagatggagtcttgctctgtcgcccacgctggagtgcagtggcatgatcttggctccctgcaacgtctacctcttgtgttcaattgattctcctgtctcagcctcccaagtagctgggattatggcacatgccaccacgcccagctaatttttatatttttagtagagacggggtttcaccatgttggccaggctggtctcaaactcctcacctcaagtgatctgcccaccttggcctcccaaagtgctgggattacaggcatgagccaccgcgcccagccagtttctgccaactttcttattcttcattaagtataaccggacgcgtgggtcgaagcnnn

SEQ ID NO: 20382 - DNA, 324 bp, Homo sapiens
acagaatggtaaaaattccaatcagtcaaaagaggtcaatgaattaaaaggcttgcaactttttcaaaaaaaaaaaaaaaaaaaagtgcggccggccgcccgggcaggtcgagcggcagcacttttttttttttttttttttttatggtttttatttttcaatttttattttggttttcttacaaaggttgacattttccataacaggtgtaagagtgttgaaaaaaaaattcaaatttttgggggagcgggggaaggagttaatgaaactgtattgcacaatgctctgatcaatccttctttttccggacgcgtgggtcgaag

SEQ ID NO: 20383 - DNA, 375 bp, Homo sapiens
  misc_feature 1, 2, 3, 4, 5, 6, 7, 374, 375: n = A,T,C or G
nnnnnnnaacaggtgaatttgtcacatttaataattgcaatattggaagttattagatcaaaacaggattccattgacctaattatattaaggtaaaaaactaattttttgaattttttaaagcaaaaacagaccaaaagaacagtgcggccggccgcccgggcaggtcttcgacccacgcgtccgatgaggtgaaacttcctcccaaggaattaaaatatctgtagaagccatggcttgcttttataatgtggaaatcatttgatttgctgtaattcacgcagatccctccttttgtcaccgggaaatgatttgcatcatgttcttttttcataatgcttttacttcctgtttggatcagttgtatgtaaatnn

SEQ ID NO: 20384 - DNA, 374 bp, Homo sapiens
  misc_feature 1, 354, 355, 356, 357, 358, 359, 360, 361, 362, 363, 364,365, 366, 367, 368, 369, 370, 371, 372, 373, 374: n = A,T,C or G
ngcccgggcaggtcaagcttcgacccacgcgtccgatttttgtctcctgaggtcaaactgtgcccatctttactgcccctgtgttggtgtcattcctttcagcgcactccatgttctggcaaaacacccacagctcacgttctcgttgtagccacattacgcctttgcattactcttttgccactgacctcactgtcagtcttcttgtcacgctgtttcctccaggtgactctgacatcattagaagcatgccagaacagactggtgaaaagtaaaccttttcacctacaaaatttcacctgcaaaccttaaacctgcaaaattttcctttaataaaatttgcttgttttaaannnnnnnnnnnnnnnnnnnnn

SEQ ID NO: 20385 - DNA, 1211 bp, Homo sapiens
acagagacctccttacttaccccccttctccttcggctggagctcggcgagcgagaggcggcgctggcgttggagagcgacggcggcccccgcgtaagcagtggtaacaacgcagagtaacgcgggaatgaagaatcttaggcgggtgcacccagtttccaccatgattaagggtctttacggaataaaggatgatgtcttccttagtgttccttgcattttgggacagaatggaatctcagaccttgtgaaggtgactctgacttctgaggaagaggcccgtttgaagaagagtgcagatacactttgggggatccaaaaggagctgcaattttaaagtcttctgatgtcatatcatttcactgtctaggctacaacaggattctaggtggaggttgtgcatgttgtcctttttatctgatctgtgattaaagcagtaatattttaagatggactgggaaaaacatcaactcctgaagttagaaataagaatggtttgtaaaatccacagctatatcctgatgctggatggtattaatcttgtgtagtcttcaactggttagtgtgaaatagttctgccacctctgacgcaccactgccaatgctgtacgtactgcatttgccccttgagccaggtggatgtttaccgtgtgttatataacttcctggctccttcactgaacatgcctagtccaacattttttcccagtgagtcacatcctgggatccagtgtataaatccaatatcatgtcttgtgcataattcttccaaaggatcttattttgtgaactatatcagtagtgtacattaccatataatgtaaaaagatctacatacaaacaatgcaaccaactatccaagtgttataccaactaaaacccccaataaaccttgaacagtgacacacaaaacacgaatccgcacacccaaccacaccccagcaccagaaccacccacacacaaccacccaaccagaagacaaaacaaaaaacagcgaagcagcaccaccaccccaacaacagcacaacaactcgtggcggccgaccaacactaaagccgacgggcgacagatcgcacaccacgaggtacaacacgggtggtaaaagacacaaaccggcgaaacggtcgcacatacaaccaggacgaggcaggtaaccaagcacagaggctaagtccacaccacagggaaccataacccaagagggcagaa

SEQ ID NO: 20386 - DNA, 1599 bp, Homo sapiens
tcgacccacgcgtccggaacgtctccggaaagagttttctccatttggtacaatcactagtgcaaaggttatgatggagggtggtcgcagcaaagggtttggttttgtatgtttctcctccccagaagaagccactaaagcagttacagaaatgaacggtagaattgtggccacaaagccattgtatgtagctttagctcagcgcaaagaagagcgccaggctcacctcactaaccagtatcagcacctccttcaggttacttcatggcagctatcccacagactcagaaccgtgctgcatactatcctcctagccaaattgctcaactaagaccaagtcctcgctggactgctcagggtgccagacctcatccattccaaaatatgcccggtgctatccgcccagctgctcctagaccaccatttagtactatgagaccagcttcttcacaggttccacgagtcatgtgcaacacagcgtgttgctaaacacaatcaccacagaccatggggtccacgtccgtgtcagctgtcagccgctgcagctactcctgctgtccgcaccgttccaccgtatgatatgctgcacggagtttgccatcctcagcacatcttatgcaccgcccccagttacaatgcaacagcctgctgttcatgtacaaggtcaggaacctttgactgcttccatgttggcatctgcccctcctcaagagcaaaagtaaatgttgggtgaacggctgtttcctcttattcaagccatgcaccctactcttgctggtaaaatcactggcatgttgttggagattgataattcagaacttcttcatatgctcgagtctccagagtcactccgttctaaggttgatgaagctgtagctgtactacaagcccaccaagctaaagaggctgcccagaaagcagttaacagtgccaccggtgttccaactgtttaaaattgatcagggaccatgaaaagaaacttgtgcttcaccgaagaaaaatatctaaacatcgaaaaacttaaatattatggaaaaaaacattgcaaaatataaaataaataaaaaaaggaaaggaaactttgaaccttatgtaccgagcaaatgccaggtctagcaaacataatgctagtcctagattacttattgatttaaaaacaaaaaaacacaaaaaaatagtaaaatataaaaacaaattaatgttttatagaccctgggaaaaagaattttcagcaaagtacaaaaatttaaagcattcctttctttaattttgtaattctttactgtggaatagctcagaatgtcagttctgttttaagtaacagaattgataactgagcaaggaaacgtaatttggattataaaattcttgctttaataaaaattccttaaacagtaaaaaaaaaaaaaaaaaaaaagtgcggccggccgcccgggcaggtggccgcacttttttttttttttttttttactattcgttaggcttttatttttctctatgttctgcagtaactaaggaaaatcatggtaaatgtcaatcttcacacaacagcagacacaaagggtttcagaaaccggacgcgtgggtcgaagcttgtac

SEQ ID NO: 20387 - DNA, 516 bp, Homo sapiens
  misc_feature 1, 2, 3, 4, 5, 6, 7, 8, 9, 10, 11, 12, 13, 14, 15, 16, 17,18, 19, 20, 21, 22, 23, 24, 25, 26, 27, 28, 29, 30: n = A,T,C or G
nnnnnnnnnnnnnnnnnnnnnnnnnnnnnntttttttagaatttagccacttctcaggccttcttccccataatttggaactttcctttggatttgatcaagttggatagagttgatcaaaccctgatcaagttggatagagttgatcaaacccaatgggaaaaagaccaaaacaacaataaaaaacagacaacaacaacaaaaaacagttaggcaaaacaaacaatggcacaatttatatgataactgagtgctctaatggtaaggagaaattaagaccagttggtcgttaatcttaactttaaccaagacaaaccccaattcagttacttacctagggacgagtctctggctatagactgctctctaccattcaagaagcaggaaaaacaaaacaaaacaaaaaaaaaaacactccttttccctgttggaagtgagccaaactccaacgtcatggaaacaggaaaattgtctttcttgatagaagcaagtaaaactccaaaaaagagaagttgt

SEQ ID NO: 20388 - DNA, 173 bp, Homo sapiens
aggtcttcgacccacgcgtccgctccctttaaaaccctacctatcctgaatggtctgtcattgtctgcctttaaaatccttcctctttcttcctcctctattctctaaataatgatggggctaagttatacccaaagctcactttacaaaatatttcctcagtacctgcccgg

SEQ ID NO: 20389 - DNA, 674 bp, Homo sapiens
gaattggagctccacgcggtggcggccgaggtacccagtaatcacataaattctgcaatcatctgtttatttagcttaactgtttttttatttgttgaagttgttgttgttatttcagtctttttcttattgggttgaccagacttggtaaaatctgtaagaaagttccataattatggggaagatttcctctgaattggctaaattcctgtagctgaaaaaaaaagaaaagaaaaaaacaccagcaaaaaaaaaaaaaaaaagtgcggccggccgcccgggcaggtacagataaatataggaaactacttcagattattggacaaataagaatttcagtgtgtcactacctataattaagtagcagcacaccacaaccacagcaagtaaacactaatctcctctactgcctttttggggtcttttccagtcacaggagctaatttacagggataccactgggtttcaaccaatctctgaaagttcctttattatgagttttgaaatttaactaatgcatcacctacaattctgttggctagtttttttcttactcttcactaattagttttaaatacaatatgtaatgttttcaaatttttataaacataggtgttgcggacgcgtgggtcgaagacctcggccgccaccgcgtggagctccaattcgcccta

SEQ ID NO: 20390 - DNA, 867 bp, Homo sapiens
  misc_feature 860, 861, 862, 863, 864, 865, 866, 867: n = A,T,C or G
caggaggccttattacttttaaattatacaacattttttgcataaatttttttataacattttttctttcacgacttttgccgacaattcttcaatgtgtctcaactttctgacttattacaaacattttttttctttaaacaccagttagtttatttcaggacaagaatttaccatataacactctttttacataaattctgtctccccccactttttttttttgaagataaccattcctttttttttttttaaagcaaactttctttatgcctttggactagactgtctaaggccacaagattagaagttaccataatacatgttacactgttaactttaagcaaacttcacttttgttgaaaaccttgtaagtttgggatttcaattatcctttgctattaagaccttgtttagtctaaattaacttagaattggtatagatggcctttttttctctctactggtctttccttgcctctgccagccgcttatgctgctgttctcttaactacgttggcggggcaagggggtataaaagcagctgtaactttctatgtatggaaactggtctgggtgccttggcttacgggttaccttgtgtcatacctttgaaacaagggacctgtccaggcttccttctgatggccaacccacctctaatgctggccagtctatttcacacaaagttctaagttttcctggtgtcacagtaacactgtaatctcccttaaattctttcttgaatttttttttaacatagttcctagtggggtgggcttatttgtacctgccccggccgccgccgagacaaaacaccacacccgcgccacacacatgccaaaaaaaaccccccaggnnnnnnnn

SEQ ID NO: 20391 - DNA, 401 bp, Homo sapiens
  misc_feature 1, 400, 401: n = A,T,C or G
ntatagggcgaattggagctccccgcggtggcggccgaggtactaaactgcacatatttaaaacatataatttgatacattttgactcacaaaacaatcaccacaatcaagatgatgaatatatagatcactcccaaaagtttccctgtagtcttttgcagtcctttcttcatggccttcttcatccatccaccccatctcggtaaccaatgatctgctttctgtcaccacaaattagtgagcactgtctagaattttatgtaaactgaataataaagattttactctttcgcttcttttggaacgcgcgactacctgatcccaaactgaggctttaccccatccaaaaggggtcagttaattcctatcactacggacgcctgggtcgaagacctgcccnn

SEQ ID NO: 20392 - DNA, 301 bp, Homo sapiens
  misc_feature 1: n = A,T,C or G
naagtgttaggtttattcccttttgtaaagcgataaaagttttcagcctaacccgtattcctagataagcagctggattgcagttttgtcttggaaattctccggaatgcctaaaagttaagtttggcccctaccgggtcttaagttctccccaccattagagtacctgcccgggcggccggccgcccgggcaggtacaacttcattctatagaatattaagtggaagtgggtgaattctactttttatgttggagtggaccaatgtctatcaagagtgccaaataaagttaatgatgatt

SEQ ID NO: 20393 - DNA, 394 bp, Homo sapiens
acccagtaatcacataaattctgcaatcatctgtttatttagcttaactgttttttttatttgttgaagttgttgttgttatttcagtctttttcttattgggttgaccagacttggtaaaatctgtaagaaagttccataattatggggaagatttcctctgaattggctaaattcctgtagctgaaaaaaaaaagaaaagaaaaaaacaccagcaaaagtaaaaaaagaaacattttgattacctgagaggctttatttacatggcaagaccaccttctgctagccaaactaaactaaaggagcaatggtagtcaccctatgcagtagttcagcagcaaagattctgcccttttttttagcatgacagcctgggttggttggttatgaatca

SEQ ID NO: 20394 - DNA, 620 bp, Homo sapiens
  misc_feature 1: n = A,T,C or G
natgtgccccattttcttcattcattcatttgttggtggacatttaggttgattccataatattgctgctgtgaataacactgcaatggccctggccgtacacttggaagagggccaagtgggcaacttgagaggttaaactgcatggtttgagttttgatttgaggttttacgtgttggcatgcattcaggggcttgtgtcccttctcccctgattcttccctccgggtaggagggaagaatccacctgagcagtggcctgccagcacttgagaggctccgcaagcacaagtgtgtttatgggagttgtgcacatgctcagttgaggcattcttcccttaccagtcgagtgtttctagaggaaggtcatagactaatagtctaatagtctatgacctttagtcatactagtgcacatgcctgagcccactcacctgtgaacccccaaaatttgagacaggtctcaattaatttagaaagtttattttgccaaggttgaagacatgcccagtgacatagcctcaagaagtcctgatgacatgtgcccaaggtggtccggccacagcttggttttatacattttagggagacatgagacatcaatcactatgtaagaagta

SEQ ID NO: 20395 - DNA, 351 bp, Homo sapiens
acagaggactcaagaccagatggccaactagaagcagccaggaagaacatctctcatggagagaccaggaatttgggaagactggcacactctgagcagatcttttgaaggaaaacattgagggtggatgaagggaggatgcagagcatgggctgagggggcaggaatctcagaagcctgcacagggcttccaagcactagcattccttactagcccccattaactcctggggaaggggtgagttgaataggtggggagtggcccgctcttaccatgaaactccagaatcctagcagcaagagaccccatgacccctgtggacacgagctgtccggacgcgtgggtcgaag

SEQ ID NO: 20396 - DNA, 895 bp, Homo sapiens
  misc_feature 1, 123: n = A,T,C or G
ncctgtagtgccagttacttgggagactgaggtgggagaattcctttgagccaggaggcggaggtttcagtgagcctagatctacaccattggactctagcctgggtgacagaatgagatccngtaaccaaaaaaaaaaaacaaaactggaaagttcagaaacagaagttcacactaacagagtatggttttaattttcctttgaatgaaaaggatagtagataaaattgtgtattgttaacatgtaaaataaaattggagctaatttgaaactagcttctcaataacttcatctttctagagactcattacctgtgggcttgtcaaacctggactatttggccaaataggttgctatagagattgcaagtgttcctcctctttatttttttcatattttttgagacggagtttcactcttgttgcccaggctggattgcagtgtcacgatctcggctcactgcaacctttgcctcccatattcaggcagttctcctgcctcaacctcccaagtagctgggattataggcgcctgccaccacacctagctaatttttgtgtttttagtagagatggtttcatcatgttggccgggctggtctcgaactcctgacctcgggtgatccacccgccttggctgcccaaagtgctgggattacaggcatgagccactgcacccaactcctctttcgtctttctttaacacacactaggctctttgtgtattatgattcagtgctatttgtaactgtgtcccagtgaccaaattgcactcgactcgatcagctgttcatccatttcgtgttttttcctgtcaaacattaatccagcaaatatatgaggtatttaccaatttattttcttagtattacaaaataattcattagcataaagt

SEQ ID NO: 20397 - DNA, 979 bp, Homo sapiens
tttggagtgagccagaaaaaaaaaataaaactctcattatttgtgtggctaattataattcagcgttatttaagcacataaagaccaaaaaaaaaaaaaaaaagaaatccaaaagatccaaactttttttaaacttaaaaaatctctttgtagtatgtcagttgcactttttttctgtcataatgtaacgtagcttgccccgtcaaaaattcaattaaaattcatggccagcaattctgttccccctcagcatcctgatttaattttcctgttgcttttgcttgtttctccatttaatagttactgaactttatgcatgttgatctatattgattttcactgcagttgaatgaacaaattatttcagtgtgacagccatgactcaagttccaattagtctgaaaagggtacttggaatgtcccatattaatcagagatggcaaaagaaaaagtcctcatattaccaggttgatttgtgtctcatttcaaattttaatttaaaattatggttttcatttttgtttaccttaaagtgatgcttaaaagtggcatgtaattaggacacttaggtttgttgaaagcattttcgacatttgtataaaagaatttgtgataaatatatccaggtgctcaccaaagaaacatgtattaacaacttaaattagatttttctaactgatagttttcactcatttataatcagtaggagagactgtctagatgttggggcagctctatgattaaagtctgtaacatgtataactggattagtaccctagttgttagctaataggatttctaatagaataaatcccctgactcccagcttatgtttctttaatgactctggtcctgagtcctttgaagtctgaaaggttggggcagacggtcgggataagccggtggcataagtggcaaaaaaaaaaaaaaaaagtgggggggcccaaaattaaattggggggcagaaaaaagaagaaaa

SEQ ID NO: 20398 - DNA, 547 bp, Homo sapiens
  misc_feature 547: n = A,T,C or G
caagcttcgacccacgcgtccgagcttgagtcgacccacgcgtccgtgaaaatgttgtctcctttctaaattctctgccgatttgggaaaaagcaaacttgactttaccccgaggaattggtgaaaaattacttttacgccttgcagctgtggaacttggtcttacagcctctgctcttctgcccaaacgggccatgcagtttggatcaagaattgcaaaaatggaaaaaattaatgaaaaggcatctgataaatgtggacggctccaaatcatgtccttagaaaatctttctattgaaaaggagactaaattgtaatgtgattcacaatgtaacaatataaaaataagtttttatataattatataaaagtaagatactctgctgctttactattgtataatatagtagacctgcccgggcggccggccgcactttttttttttttttttttttaaaatggaaacatcaattttattaacaatttacggcaatagacatttacagaacaaaaataagacagttccaagacaaaggagtgtaaaagn

SEQ ID NO: 20399 - DNA, 1086 bp, Homo sapiens
  misc_feature 1085, 1086: n = A,T,C or G
agcaggcgcaggctccgtgaggaggcaagaggaaaggccaagaactgacaaattaataaagggccatctacaagccaggaataaggccatcaccagaagacaaccccgccagtccttgatctgggacttccacatttcaaaactgaaaaaagataaatttctgttgtttcagctactcagtcaatggcattttgttatggcagcctaagctaagacataacctcagcctgctggcctgccttcactgtcctgggggaggcatggagagaccaggtggactggagtagactgttgagagacactggtctggtgaagatgtccaggaaaccacgagcctccagcccattttccaacaaccacccatcaacaccaaagaggttcccaagacaacccggaagggaaaagggacccgtcaaggaagttccaggaacaaaaggctctccctaaaagaccgccgcttcaaaaaaacctgaggaatggagtgggccaacactatccagccactctgaccagccgaacgaggaactcaatcaaaatgagccatagcaggaccacaagggcaaggagaccaccaccttctccagtctctctttgggcagccagtaattcccaggcaaggccagagacttcaagtctatctgaaaagtctccagaggtctaaccccagataaatagccaacagggtgtagagtacattttacaccccaaagagtgtgccccatggtgatgaaaataaagtgaacatgttgcaaaacaaaaaataggagagcacacaaaaaggggggggccataaaaaaaccacgaagaggccaataagcacacaccagtttgtaaaagggcccaaaagacacgatataaagaagaaacgaggagagttataaaggtgagtggaacaattgtatgggcaattttacagaaacaacattgttgagaaatggaagaccacaacgagatacgcgcgataaacatggatatatgtaacaccatatggaagagataaaacaggacagacaagatagagaagataagaagcagataacagatataaacaagttagttaacgagaaaacaagaattcgtagtcnn

SEQ ID NO: 20400 - DNA, 600 bp, Homo sapiens
  misc_feature 1: n = A,T,C or G
nacctgaagcacaagaactgcttgagcccgggagcgtaggttgcagtgagctaagatcacgtcactgcactccagcctgggcaacagagcaagactgtctcaaacaaaacaaaagaacaaaactctctgggcttgatttcttaatctgtaaaacagaaataattcttaacacatttggttactctgaggataaaagtggaggaaaaaacatgcagaggatagtccggaactccccatgtagatcccattattaggtaactgaggtacaagtatcttaggctactggaccgggcaggctttactgaggggctccgtgcagcttgctggtgcagccgagcaagtgggcctgtagccgactcttaatccaggttggtgctattcaaagagatcatctttcacccgagggatttctgggcatctattttgcggatcagaaagtagagaaagaaggtaactttgctgaaagctagtctggggagttagtagctgatacagatcagcatttcctaactatgagatttcataatattctctcttgtctcgattctgagtcactggtgcctgctgtggtggcattgttcatgaacatgtacctgcccg

SEQ ID NO: 20401 - DNA, 1095 bp, Homo sapiens
  misc_feature 1, 2, 3: n = A,T,C or G
nnngaataaacttggatgtaaaaattcaccaggaatccacataaagtactatatttgggctaaaatgaaaaactaaatacaaggtgggagagaggcaagaatttcagttgactaagctcagtgtgagtcaaagtgggatggaaccatgcaaaaacaaaacccacagacatgcaggctacgtgaggagaaaacagtggtgaggatcacatcacattgtgtttgcatttgccggaaccatactttaagaagaaaaccgatcatctataataacatcagtttatcaatgccccgtcctgatgaagtgtgcagactctcagaaacagcaggaaggacttcatgagaaccctcaggctggagaagggactagggcacaaggagagctctcctaggaccaggaccaagaagctacaggcaggcacagtttagctcctgcagagacccagcttttcacaagttggagccttccagagatagagggactgtggtaggtggtgacccacccatcactggaggtggaagcagaggccgtttgccagggatgctggagaggggattcaagcatctggctgggcaacgtgatgctcagggccgtctccactcagggcttaggggagtctgtgagtagaagagctttaggtgatttgtttggtgggggaaggcaagtacacagctatgcactttccgtttctgacttttgccaccctgtcagccatggggagcccactgtgggactgaaaccctgagctgaatgcggcctcatgtctcagagaaacactggcaagttggtcagagccgccgtctgcatcgaggcgtagctgagcggcaggatggggggctgcctgcccagggtctctcaccgtggtgtaagcagagccatggcttgcctaggaccctatagataccatcactctttctcagctcgactggagtttgcacctttgcaggggcaaagtaactccctgcaccctgaaccaccccccattcctgttcatttcagcagataatgatggaggggggggggggtgtccatcgtgctgagggtgtgaccgcaagagggtgaaaacttccagccaactttctcagtcctttctcttg

SEQ ID NO: 20402 - DNA, 1811 bp, Homo sapiens
  misc_feature 952: n = A,T,C or G
cggggaggagtagcttacggctaggtacgaggcctgggtgttacatccgcatcatcgaggagacgctcgcgctacatgttcgatgaacgcggccgccggaaacaaaccggaagcagtagaagtaacatttgcagatttcgatggggtccgctatcatatttcaaatcctaatggagacaaaacaaaagtgatggtcagtatttctttgaaattctacaaggaacttcaggcacatggtgctgatgagttattaaagagggtgtacgggagtttcttggtaaatccagaatcaggatacaatgtctctttgctatatgaccttgaaaatcttccggcatccaaggattccattgtgcatcaagctggcatgttgaagcgaaattgttttgcctctgtctttgaaaaatacttccaattccaagaagagggcaaggaaggagagaacagggcagttatccattatagggatgatgagaccatgtatgttgagtctaaaaaggacagagtcacagtagtcttcagcacagtgtttaaggatgacgacgatgtggtcattggaaaggtgttcatgcaggagttcaaagaaggacgcagagccagccacacagccccacaggtcctctttagccacagggaacctcctctggagctgaaagacacagacgccgctgtggggtgacaaccattgggctacatttacctttgtgctgttccctcgttcacaccaatgccagtgctcgaggacaacaccattcaacctgatcccacacgttccggggattacctggcactaacacattcagggtctagggcatttcaacagttggggaaaggtgatccaaggggaaacggcgccatcggaaaaagtaacggggatacgcatgaagaagggaggggaactgtgttctccgtctcctcgcgcccgtgcaggtgacaaataacatactatccnggagcacaacaaacgaaccaacaacaacaccacaaacaatcaataataccaaaaacaacaaacaaacaaacagaaccaaacagaacacaaaaaagacaaggacacaaacacaaaagaaacacacaacgtaaaaacaatggaaggagaggagacaggaggcgaaaaggaagatagaaggaggcggaacgaggggaggggagcgaagagagaggacacgagaggggaagagaggaagcaagaacaaagaaagagagcaaacgaagacaaggaggaaacaaggtacgagagagaaaagagacagaagagggaagcagagaaaacagagacgaggagaagaaaggaagaaacgagaagagagagaaagagacacgaagcgagaaagaagaagaggaaagggaggggaagggacagagagaggagagaagaaggaggacggaggaaggcgggagagagtcaggagagagggggagcggagagcgagatagcaggaggagcgaggaagcggggagagcaagaggggaggagaagaacgaaggagagacaagagagacaaaagggagggaagaggaaagaagaaagagaagagaagaggaagaggagcagacgggaagagaagaagaggagagagaaagaggggaggagtcgaaagagagcaagacgaggaagggagcggagcggacagagagacgaaagctagagaggaaagagaggaacgagaggaaaggaaaggaagaggaagaagagaagagcaaagacagaaagagaagcaagagagaaggaggacgacgagagagagggagaagcggaagaagagggaaacgaggaggcaaggagaagaccagagaaagagagagaaaag

SEQ ID NO: 20403 - DNA, 1251 bp, Homo sapiens
  misc_feature 1, 2, 3, 4, 5, 6, 1148, 1165, 1167, 1168, 1173, 1246, 1247,1248, 1249, 1250, 1251: n = A,T,C or G
nnnnnnggatattcctactgctgctaaatatgagtatggggttcctctgcagacttcagattcgtttctgagatttccttcgtccctgacatcatctctgtgcactgataataaccctgcaggccaggcgtactggttcacacctgtaatcccagcactctgggaggccgaggcgagaggatcacttgaggtacctgattcaagaaaaaaggtccctatcactgttcagtccatcgtcattcagtctctaaataaaacgctcacccgacgggaggacactgatgtgctgcagccgactctcgttaacgctggacactttagccttggcgtgaatgttgttcttgaggtaaagtacagcctcacatacacagatgcaggtgaagtcaccaaagctgatctctcattcgttctggggacagttagcagcgtagtggtcccactgcagcaaaagtttgaaattcattttcttcaggaaaatacccagccagtccctctcagtggaaaccctggttatgtcgtggggctcccattagctgctggattccagcctcataagggtggagctctcccgtgtcagctcgtagcacagaaggtgaagagcctgctgtgtcagctcgtagcacagaaggtgaagagcctgctgtggggccagggcttcccagattacgtggccccttttggaaattcccaggcccaggacatgctggactgggtgcccatccacttcatcacccagtcattcaacaggaaggattcctgccagctcccaggggctttggttatagaagtgaagtggactaaatacggatccctgctgaatccacaggccaaaatagtcaatgtaactgcaaatctaatttcatcctcctttcctgaggccaactcaggaaatgaaaggacgattcttatttccactgcggttacttttgtggatgtgtctgcacctgcagaggcaggcttcagagctccaccagccatcaatgccaggctgccctttaacttcttcttcccgtttgtttgacaatgctcagatgcatcagttccttaatatacacgtgaaatttgaaaactgtacattcggtgagattaaattttatatacaactagcaaaaaaaaaaaaaaaaaaaaaaaaaaaaaaaaaaaaaaanaaaaaaaaaaaaaaaanannaaaanaaaaaaaaaaaaaaaaaaaaaaaaaaaacctggggggggggcccggcccccaattccccctttggggggtcgnnnnnn

SEQ ID NO: 20404 - DNA, 695 bp, Homo sapiens
acctgccatccagttttggatctttttaaaactaatgagtatgaacttgagatctgtataaataagagcatgatttgaaaaaaggcatggtataattgaaacttttttcattttgaaaagtattggttactggtgatgttgaaatatgcatactaatttttgcttaacattagatgtcatgaggaaactactgaactagcaattggttgtttaacacttctgtaagcgtcagataacaactgtgagtagcctatgaatgaaattcttttataaatattaggcataaattaaaatgtaaaactccattcatagtggattaatgcattttgctgcctttattagggtacctgcccgggcggccggccgcccgggcaggtcttcgacccacgcgtccggggaaaaacaaatcagcttttttcagagagtgaccgaataggaagaagggattcagaaatatgatgtagtagaacatgccctgcaggaagaaaatgttttctctcctgcgtatgttaagaggaaatcagtttaaaatgcctgctaatcaaatgtcgactcagctaaccatatgtccaggttgctgcagagtttctttcaaatctgagtgttgcctgctgaactcggaggggagtttggagaaattttagacagcagctctgtgttctttttttgccgcagccaataagataatagcagaa

SEQ ID NO: 20405 - DNA, 441 bp, Homo sapiens
  misc_feature 1, 415, 416, 417, 418, 419, 420, 421, 422, 423, 424, 425,426, 427, 428, 429, 430, 431, 432, 433, 434, 435, 436, 437,438, 439, 440, 441: n = A,T,C or G
nggttccgccgcttttatagcttctcattctggctcctactgcttccttgaagatacttccctgcttgtagtcccctagccagaagttgatgcactgagaagaaaaggccctctgatcacagatcagagcttgtgaattattattattttttttatctctggtaacaagctgatagggtgagtgagaaggatcaaagagacatactttgatttatcactgagtaataatcctttccccttcgacccacgcgtccgactttttgtcttagacccagttagggtcaccttacagtgcaggtggaaagaaagcaggactgctgagaggagctcaggacccattttccaggactattgccttctcaaaactttggagagcagtgaaaatagattcccaagtgaaagaggtggcagaaannnnnnnnnnnnnnnnnnnnnnnnnnn

SEQ ID NO: 20406 - DNA, 1496 bp, Homo sapiens
acgcgtccgctgaaacaggcatacaggctctagtcaagaatgaattagagtgaaggaaagctgtgtgacacctggcattcctctctgttcatggagcttctttgaggcttgaagtttgattttactatctagacctctctggctaatacctattcttcaaccacctcggttactctgacataggaatttacttcttttccttgagtggaaaacactttagaaaataataacaaacattattataaactaatatatgtgagagtacttagttgaaacaaaaaggaattttagtagacagtattatattatctttgaaaatcaaggagaagtttatgcaactgaaaatgtttacacactgtgctgcaatctactgtttgtgaatgtcaatgtattatcaggaaacatgtctatacgatcgcagagttgtatttcctcacaaacttctttacgaagagtgaaatatgtttttgtacctctcagtttcagtcagggacatattttgtgcaatatttctgtgattgtgcctatgcgtgatgagtgaatgcatttcaatcatacattgcctaaatcataacttgatgatgcttgggaaagaatcaacagttaaaacttcatgaagttctaatgtctgtgttccaaaacacatcacattattaggttgtagggagatatgtatgtgtgctccctggggtggggagttttctagttactagaccatctccatttttagcacttggcagcctcatgatccttttataaataggagattaacaggagagcagcaatacgattttgccaatggaataacagatttgccggcattcactgaaagagggcagatattgggtccttgtgacttcaactgactcttccgaattgtatgaatttatcaatgtattagataaacccagtttcagaataataaagaaaaaatattagaccaaataatgtggctaatagtggtatgatttctagcccgtgggtttaaaactgtatcctaaagagtcattttaaaataatataaatatttaaaagtgtaactgctatctttatgttctgaaataagttaaaacattttaaaatatgaatactgtagtttaaaagaaagaaatggtgggaaggaaaagtagagaaagaaatgccaattccagtccaaagctttgtttgccaagttttcttagaatgaattttaccaatgtatgggttcttgttaacagaatgtgtaacagaaatactgaaagacttttgcctaaagtggcattattgactgctggtgtgatgctactgtaatgcgataaattattaaattgttgcaaagtgctgtttttgccttaaaattttattttgcgcatcttgaaaattatagtattaaaggtattgatactgtgcaaatactgggcatgcttggcatgagataatctgtttcattttcacaaaattgtagtataactatgcaagtgtttattaaaagaacacaaaataaaaaaggtatggga

SEQ ID NO: 20407 - DNA, 472 bp, Homo sapiens
  misc_feature 1, 466, 467, 468, 469, 470, 471, 472: n = A,T,C or G
nctagaggatcccggtcattttctacacgagctcctgtatatttgggacaaaataactcactggaggctttggtttaccactgctggtaccagaactggttgcattttctttgatctgccctttagataaggaactccacagaggttgttccatgtcatttgctttttggaaactgtacatctgcaagctttaaagcagtaggttcagacttcctggaagaactgacacttgaagctgactagggtctacttgagctcatactcactttggctaagccacagtatgagggaagggtgtccaggaataaccgcttccatttttatctcgttcattcctgaaaatccaacaggagattcttttcactccctaaaatcaactgttctgtgtataaagcatatctggatatctgatcttaaatggaaagaggatctgaaaacggccccaacttttctaaaactttaaaannnnnnn

SEQ ID NO: 20408 - DNA, 527 bp, Homo sapiens
  misc_feature 514, 515, 516, 517, 518, 519, 520, 521, 522, 523, 524, 525,526, 527: n = A,T,C or G
cttcgacccacgcgtccgagaatagctactgaagtcctaaagagcaagcctaactcaagccattggcacacaggcattagacagaaagctggaagttgaaatggtggagtccaacttgcctggaccagcttaatggttctgctctggtaacgtttttatccatggatgacttgcttgggtaaggacatgaagacagttcctgtcataccttttaaaggtatggagagtcggcttgactacactgtgtggagcaagttttaaagaagcaaaggactcagaattcatgattgaagaaatgcaggcagacctgttatcctaaactagggtttttacctgcccgggcggccggccgcccgggcaggtacccaacacaaactattcaataaagtaatctgctttaaaaataaaacacactgaaaggccgaggcaggtggatcacctgacatcattagttcaagaccagtgtggccaaactggtgaaaattagtctcgactaaaaatacaaacattagcnnnnnnnnnnnnnn

SEQ ID NO: 20409 - DNA, 1010 bp, Homo sapiens
  misc_feature 1, 2, 3, 4, 5, 6, 7, 8, 9, 10, 11, 12, 13, 14, 1002, 1003,1004, 1005, 1006, 1007, 1008, 1009, 1010: n = A,T,C or G
nnnnnnnnnnnnnnacgggttttcaatgactttccagtttattttctgacaagtgaaaatattttcaagaacatgcacagtgaacacaggaatgctaggaaggcaaacataaaagggcacacacacacacggcaggtgactgaaactttaatgcacctagggattgaccacaacatttacaaatcagtgttactgcattggtttttcaaagattagctacatttataaactttattttaaaagtttcacaaagttaaatttccttaacacttcaacaggaatctaactctttacagtctatcaaaatggtaatattttaccttttttttttttttttttttttttttaaagcactggtgctcttcttaagtgaaatgttaacacagggctcaatacataaaagagaaagtgaagttgttccatttggggggtcccataaggggcctcatgtttccctaggtgttaccccttcagacacagcacagcctacaaagccatggaattaaaatattaacaatgaatgcataaagatttcactgacaaataaaaaccagggagtgcattcagtgaccacaactttctaagcttctgcttttccacatgcttttctttggttttatcactttagaaaactctttgaacattaattgtctgaatggcagctatattagtcagaagctgtaatgctacacctgggaatttatctacatgatagatgctgctgaataaaatccaacaagaacgattttgtttaaaaaaaaactttgttaaggcagtctattgttcatactaacagaaataaaacatttatgaataaagtccaaagccaagataattcttagaaagatgaagcatccctgctgggcacagtggctcacacctgaatcccagcacttcagaaggccgaggctggtagatcatctgaggtcaggagcttgagaccaacctggccaacatagtgaaatcctgtctcccctacaatacaaaaaattagctgggcannnnnnnnn

SEQ ID NO: 20410 - DNA, 1497 bp, Homo sapiens
  misc_feature 1497: n = A,T,C or G
aaactcatgaatgtgcagtttgagccattgctattttgattacatagaattggtatttcttttttagccagcacattaaattttagattttattttttaatctaatttttttctaatcaaaaagaaaattgagcttaaggcaaaaggcctggttttagagatatgtgtaattggaagagggcatttgtttgagtgtgagtttggaggcctttttaacatgcagacatacccatatttaaatgaaatggggagatatttacattccgtactttgtaaacttgagctattggacttcactgatgtatatattaatacctcagattcctctgattttgtaagctgtcttctctgtgaacgtgtttgtgtgtgtagggcattttctgattgcacttccttaagttatgaatgtactagaaagggactcatccagaatactatgcctccctttgttaatgcttaatcatttaaagtaaacacaattgaagcctctctgaagttaaacccaactatgtttattaaaatgtgtgaaactgaaagtgggctaggttctaccaaggctgtggaactctcctacgagttctgctgatcaggaaatttaagaatttatcttaaaaatgcaaggaaaaaagactgccttggcaattgtgaatgctgctttcaatctcctagcaccgagcctggcacttaggcagctttcagtaagtgggtgaatgaatgactgaatgaatgaatgaatggctcagctgaggaatgtaactttggtcaagttattatgatgtgtttgggcttagttttctcattggtaaaatgtgggtgctggattggatcttaaagatcccttccagctctgaaatgctgattgtacagtatattcttcccagattgactcactgtgcaatctttacaatactttttatcttttcacttttgacataggtaatgttgttgagcagttgagcaatgttcagtccagttgtgaagctggagaagagaaatgggttttaaaaattaagtgaggggaggccgggtgcggtggctcacgcatgtaatcccagcactttgggaggccaaggcaggtggatcacgaggtcaggagatccagaccatcctggctaacatggtgaaacctcgtctctactaaaaatacaaaaaattagccagctgtggtggcgggcgcctgtagtcccagctactcaggaggctgaggcaggagaatggcgtgaacctgtgaggcagagcttacagtgagccgagatcgtgccactgcactccagcctgggcgacagagcaagactctgtctcaaaaaaaaaaaaagaaaaaaaattaggtgagctgaactcacctgaagtggtttacttctgtgggttaagaagttctagtcagtgttcatagtcgtttcgttttgataattgttgaaccaattttgtttttaaaacctttagactctgaaagtaatattttgactaagaatgtaaatattttcaaactaaattacn

SEQ ID NO: 20411 - DNA, 657 bp, Homo sapiens
  misc_feature 1, 657: n = A,T,C or G
nttttttttttttttatttttttccagtttttattgagtgaaaatgtcaaaccttgcatcagtcatgcaaaaaaaaaaaaaaaaatcaaataaataaaacacatatattaaatttctaatagcactaaattcaagtggaaaaatattcagttcttaataaccaggtgccgaggagaccagattcaagtaatcagagcacacgctgttcagctcgggtttcacgttctgtattttttttgtctcaaaacctctctatatatctctatatatctatatatgtatatacatatagatatatacacacacatatgtgcatacatattatttgatatttatatatatacacatacatagttataaaacattaaaaagagcattggtggatcaagcattgtttccccacagaaagaaaataaaacaaaaattacacgttaaaattcaaaatgagctagcaatggcttatagtcctagtgtgcaatatgaagtttacaaaaggctagactccgcactgtcggcatcttcttcttttcttctttttttttttttaagtttgattttgctacattgaaaaaatgtttgtgcggacgcgtgggtcgaagcttgtacctgcccggtcggacagacgcccggggcctgggcggcggacgcgtgggtgan

SEQ ID NO: 20412 - DNA, 1313 bp, Homo sapiens
  misc_feature 1309, 1310, 1311, 1312, 1313: n = A,T,C or G
gtacaagcttcgacccacgcgtccggctttggaacgagatgctatactaataagcaagtgtaaaaaaaaaaaaaaaagaggaagaaaatcttaagtgattgatgctgttttcttttaaaaaaaaaaaaaaaaattcattttctttgggttagagctagagagaaggccccaagcttctatggtttcttctaattcttattgcttaaagtatgagtatgtcacttacccgtgcttctgtttactgtgtaattaaaatgggtagtactgtttacctaactacctcatggatgtgttaaggcatattgagttaaatctcatataatgtttctcaatcttgttaaaagctcaaaattttgggcctatttgtaatgccagtgtgacactaagcattttgttcacaccacgctttgataactaaactggaaaacaaaggtgttaagtacctctgttctggatctgggcagtcagcactctttttagatctttgtgtggctcctatttttatagaagtggagggatgcactatttcacaaggtccaagatttgttttcagatatttttgatgactgtattgtaaatactacagggatagcactatagtattgtagtcatgagacttaaagtggaaataagactatttttgacaaaagatgccattaaatttcagactgtagagccacatttacaatacctcaggctaattactgttaattttggggttgaacttttttttgacagtgagggtggattattggattgtcattagaggaaggtctagatttcctgctcttaataaaattacattgaattgatttttagaggtaatgaaaacttcctttctgagaagttagtgttaaggtcttggaatgtgaacacattgtttgtagtgctatccattcctctcctgagattttaacttactactggaaatccttaaccaattataatagctttttttctttattttcaaaatgatttcctttgctttgattagacactatgtgctttttttttttaaccatagttcatcgaaatgcagctttttctgaacttcaaagatagaatcccatttttaatgaactgaagtagcaaaatcatctttttcattctttaggaaatagctattgccaaagtgaaggtgtagataatacctagtcttgttacataaaggggatgtggtttgcagaagacttttctttatcacagagcaagggagcgcgtgatgcgcactcagccacagagataccacctgagtgcggtgcgcgactacaccgcggtatcgtaaggcggcagcgggtacagcagacannnnn

SEQ ID NO: 20413 - DNA, 2003 bp, Homo sapiens
  misc_feature 1, 2, 3, 4, 5, 6, 7, 8, 9, 10, 2002, 2003: n = A,T,C or G
nnnnnnnnnnaagggtttgagtaaatacaaagactgaagaaattatattcacgttttcctaggtgtgtgtgtgcaggccacagcagcatgcccttggtgtagtcagtgccgaaaggggtctgttccttcttgagcctgcctgcagggatggtctccttttaaagcaggttgtgtgcagcattcagtacactgaaggcataaaccttccactcttgaacaaagcagctgctttttaaaagcggtaattgcttctttaccttttatttcttttgtaaatgaagcttttctttaagaatgtgactttaaagtgttgtctattgcataaaacagttgacactcacttattgtaaagtgaagattgttctactgcatgtgaagtggaccatgcagatttctgtatgttctcagtatgcatcactagataataaagtcttttgtgaacaaggcatttgtagccatttttaaaagtttttgtcttcagtgctggtaagtcaggtaaaccataaatagttaaaagcaaccttttgtttttttcctgaaagtttttaattgaaagtattattagttaaagatgtaaacctagccaaaattaccagtttattaataattaggatcctaattatttcaaaaaatcctacaaatattgtcagctttcagtgtagtgagattattcctgtaggttatggggtataattcaggatttaactaatgtttctgctattttctcacttttccttttgatggtgcggaaagagaaaaaggaaaacggggcacaggccattcgacgccttctccaaggggtctgatttgctgagacaccagcttcaccttcttaacaaggttatttctgacagcatgtgtagataaacatttagcaacaatttaagacaaaatcgtttaaatcagcttggttttgcaacacaaaggaatttgtattattaacatggtagaagagaatttttcagaaatatatgtaatctttgctgtttggggggtaaaattaatgcttgtctccctgaggaatatggaaaataatcagattttaggggtttaaataatatttttaaattgtaaatgggatttttttattcacccaggcacctaattacaacaagcatgcacattttggtgcattcaagaatggaaaatcagaatagcagcattgattcttctggtgggttttgctccatttaaagacatgaaatgaactacagccaggaaggtgatagatgatataataagccacctctgaacctacaccccgtctcttcacggtttagacttactaaaataaatacaaggtgattttcatcttcaggtagagtgaagccttttaattaaggcgtcacaggtgcagctattctaccttaatgaaatgggtagtgattttcccaccattatttatttcggtgataatatgctgcatattcaagtctcttgtagttattttcacccaaagtagttgacaatttgatgcttctggtgatgtttatggcttcattttatgtaattttttaagtaagttccactagaaacagttcatcttataccttcaaaactgttacctgttctttaaaaaacaaagttgcttgttacttgttctttgtgttttaggtgcagctcagtggaagatgatgacaaccagaagacatgagctaaggtttctgtcctataaaagatttattaaaaaacaatccttcatttattttttgtctaattttttagttttcagcattatgatttgggttttattggtgtttggtatttagaattagtgctgttgtggagtgcgtctgtaaagtgcttgttttatcatacttcctgcctctcccctcccccagtttctcctcccctaaaataaaaatagtggtcaactttagtaatataaaaggctgctggatgctgagattccacataacacatggttgtcaaaattggatgttaaggattcttagaaaaacagcaaccaccagaatagcatatatctaaaagtagtcttcann

SEQ ID NO: 20414 - DNA, 806 bp, Homo sapiens
  misc_feature 1, 2, 3, 4, 5, 6, 7, 8, 9, 10, 11, 12, 13, 14, 15, 16, 796,797, 798, 799, 800, 801, 802, 803, 804, 805, 806: n = A,T,C or G
nnnnnnnnnnnnnnnncccccccgcgaagttttttttttttacaggcttttaaaataacctttattttttaaaagttagtatgtgcattataggaaattgaaaaacacaagcaaagaacaaagtcattcacaatcacaagcagtttatagtttgacatattcttctagatcctgtgtgtaggcacaacatccaattttatgggactgagactgtacagtatgtatcatgatttttcacacatcatgaatatttaccaattcaaaatcccaaagctatatgagtattctgataaccaagaatacactacaccaactcaaactgctaaaaaaaaaaaaaaagatgtaatcctgcctttcttgggacagaaatttcatataagacaaaaatggcaacacgcctctagataaaagcattggcagagttctgatttaaatgctgcattcccttaatgctcaatttaaaatgaaacacacagcaacagaatacagtatgtttttaagagaattcattagcagatctataccattaaaatattagcaaagtgtatttccattgaattaatgtgttcttatagtacagccaagagatgctataaactgatggtcatcacgcgccccaaaaggaggtatgcgctgttacactctccaaagggggcgtctataatcacaaccagattgtgcgttgaactatttgggggcggccatttttgtttgggggcgcccctttctgtgggggtaataacaatttctctcaaaacgctgggtaataaaaatcccccttttggagggcgccccnnnnnnnnnnn

SEQ ID NO: 20415 - DNA, 846 bp, Homo sapiens
  misc_feature 846: n = A,T,C or G
acaagcttcgacccacgcgtccgatacgactcactatagggatctacctgcttgagtcgacccacgcgtccgaacacatacaaaagaattaaacccacaagctgcctctgacagcagcctgtgagggagtgcagaacacctggccgggtcaccctgtgaccctctcactttggttggaactttagggggtgggagggggcgttggatttaaaagtgccaaaactgacctataaatcaagaagagtttgtattacagattttcactgctgctcctctgtcccctgctttgtcttttttttcatcctgtcttatcttctgtccatgactgcatgacgtttaaggccacgtatagtcctagctgacgccaaatacggcgacgtaaaactagagggggggcgccgcgcgctaattcgtcctatagtgagtcggattacagttcactggccgtggttttacaacgttgtgactggtggtggctgattaggttttaggcctggaccgatcgcgctttccaacagctgcgcatgctgtatggtgacgagctgattgtgagcgtgacaatttagttaaatgtccgttacatatgtcgtaactcaggtcatttttcaccactaggccgtaatcggcgaaatcccttttcgcgctatacgatcgaccagaacatggtgtggggcgtgttcccgtcttgggactagattcgcctcactcgatgaacgtgggcccgcgacgtttgacggccgaataacgcgtctataatggcgagtggccccttccgggtaccattgccctaatgaacgttcttctgtgatggttggtctcgacatgtcctaatttggaccccgtccn

SEQ ID NO: 20416 - DNA, 427 bp, Homo sapiens
  misc_feature 1, 2, 3, 4, 5, 6, 7, 8, 9, 10, 11, 12, 13, 14, 15, 16, 17,18, 19, 20, 21, 22, 23, 24, 25, 26, 27, 28, 29, 30, 348,354, 362, 383, 404, 413, 427: n = A,T,C or G
nnnnnnnnnnnnnnnnnnnnnnnnnnnnnntttgggggggaggaaggcaaggcactgggaaagactcacaacagatatgaccctagtcgtaaagaaatccataattgccagtaacacgacatatttaagaacaggaaaagacagacaagaaaagagggaattttttaaaaaacattactaaagaataggacatagaagagtgaaattgagaaggtaaggaggagggggaaggatgtaaaaactatgacaatacacgagttattcaaagagtagcctttcttctgcatgaggccgccatgcagagtgccacttacatgaggatggctgtgacactgggtactcatgggnaagctntggggaantaagtttgctcccctgggggnaaggaattgggctgccgaagnttctcctgnaaggggggtaaggn

SEQ ID NO: 20417 - DNA, 348 bp, Homo sapiens
  misc_feature 346, 347, 348: n = A,T,C or G
gcgaattggagctccccgcggtggcggccgaggtcttcgacccacgcgtccgattttgtgagaatgattgttctttcacttgggctgtttgagagcataattatggtaatcatgagattaatgtttcatgatttctacctccaaagtgtgaagacaagtaaaacaatgtttctaaattgtcttattttgttggcggagaagattacaatggctattagtgctacatttggtcaaatgtaatcacttaaatagctttttgtcacctttaactaaagcagaataaaaaacctgccccgggcgggcggccgcccgggcaggtaccattccgacgtttgaatggtggagnnn

SEQ ID NO: 20418 - DNA, 510 bp, Homo sapiens
  misc_feature 1, 2, 3, 4, 5, 509, 510: n = A,T,C or G
nnnnnagagctgaatgtcaaggccagccaagaggtggtgatttcggtttattttacatgcagaagtaggcgacccacgcgtccgcttctcttagaattttggggaaattgatagtccagtgactcctacccacttttgggtgaaggacgatttggaatttgaagtgtggggagacaggcctgtgaagtccgaaggactcactgggtctccagatcccccaactctggaatgcagtgaatacccacccccatgtttcagagcatctctcccatgtgttagacgtcgtgcagtcctgcattttggctgagacacctaaccccggtgcactcaggtcagagcgccagggcttcaggcagacagcaatgggtcacacgggtccttatagttccttcctcttcccaggagtgtcattttagattttacaacacgagcgaataaatcatctccaaaccaacaagatgtcaccttcaggctccccactgcaaaaaaaaaaaaaaaaaagtgcgcgnn

SEQ ID NO: 20419 - DNA, 1038 bp, Homo sapiens
gcttcgacccacgcgtccgacttaattgagaaggtggaatcctcctatccctgaactcgggggaatggaatctcgctgatcttccaggactagctccctgatcattccagcccctctgaacaacagggcccctggagatagaagtagtcctatttcaccccaactacaacattaatgggaaaaaagaagcaggaattcctgaattttatgactatgacgttgccctgatcaagctcaagaataagctgaaatatggccagactatcaggcccatttgtctcccctgcaccgagggaacaactcgagctttgaggcttcctccaactaccacttgccagcaacaaagtaagacatacttggcaagaggataaggatgagatcccaagagacaagtggggcatgagagggaggtgcaataggaagagatgatgcctggcccagaacctagctctagaagggcttaggggacatctactgagtgacaaaggcaatggggagatgacagtggtgggagcagctgaagtgacgcagtctattcgtccagaggaagagctgctccctgcacaggatatcaaagctctgtttgtgtctgaggaggagaaaaagctgactcggaaggaggtctacatcaagaatggggataagaaaggcagctgtgagagagatgctcaatatgccccaggctatgacaaagtcaaggacatctcagaggtggtcacccctcggttcctttgtactggaggagtgagtccctatgctgaccccaatacttgcagaggtgattctggcggccccttgatagttcacaagagaagtcgtttcattcaagttggtgtaatcagctggggagtagtggatgtctgcaaaaaccagaagcggcaaaagcaggtacctgctcacgcccgagactttcacatcaacctctttcaagtgctgccctggctgaaggagaaactccaagatgaggatttgggttttctataaggagtttcctgctggaccggggcgtgggattgaattaaaacagctgcgacaaca

SEQ ID NO: 20420 - DNA, 253 bp, Homo sapiens
ccctctgtacatggcttttattatttacataatacaatatagcatcaatgctgaatagcatgattatgtgcaatacataaatatgaactaactgtacccttctgcatggaaaatcataaccaacatggctgcagtagacttcttagtggtatccagcaccacttgcagagggctgctttatcatattgtacttgggtgtaggactctagtgttcttgggtgtattgcatgggctgcattatctacagcattgt

SEQ ID NO: 20421 - DNA, 1305 bp, Homo sapiens
atagggagccgacccacgcgtccgggcctctgcagctgctgtgctctcgcataatcgctaccacgtgccagttgtggttgtgcctgagggctctgcttccgacactcatgaacaggctatcttgcggttgcaagtcaccaatgttctgtctcagcctctgactcaggccactgttaaactagaacatgctaaatctgttgcttccagagccactgtcctccagaagacatccttcacccctgtaggggatgtttttgaactaaatttcatgaacgtcaaattttccagtggttattatgacttccttgtcgaagttgaaggtgacaaccggtatattgcaaataccgtagagctcagagtcaagatctccactgaagttggcatcacaaatgttgatctttccaccgtggataaggatcagagcattgcacccaaaactacccgggtgacatacccagccaaagccaagggcacattcatcgcagacagccaccagaacttcgccttgttcttccagctggtagatgtgaacactgggtgctgaactcactcctcaccagacatttgtccgactccataaccagaagctccctcgactgtcttgtcccagaaccttttcactccaaaacaggaaattcagcacctgttccgcgagcctgagaagaggccccccaccgtggtgtccaatacattcactgccctgatcctctcgccgttgcttctgctcttcgctctgtggatccggattggtgccaatgtctccaacttcacttttgctcctagcacgattatatttcacctgggacatgctgctatgctgggactcatgtatgtctactggactcagctcaacatgttccagaccttgaagtacctggccatcttgggcagtgtgacgtttctggctggcaatcggatgctggcccagcaggcagtcaagagaacagcacattagttccagaagaaagatggaaatcggatgctggcccagcaggcagtcaagagaacagcacattagttccagaagaaagatggaaattctgaaaactgaatgtcaagaaaaggagtcaagaacaattcacagtatgagaagaaaaatggaaaaaaaaactttatttaaaaaagaaaaaagtccagattgtagttatacttttgcttgtttttcagtttccccaacacacagcagatacctggtgagctcagatagtctctttctctgacactgtgtaagaagctgtgaatattcctaacttacccagatgttgcttttgaaaagttgaaatgtgtaattgttttggaataaag

SEQ ID NO: 20422 - DNA, 654 bp, Homo sapiens
  misc_feature 650, 651, 652, 653, 654: n = A,T,C or G
cttgagtcgacccacgcgtccgataaaacaccgccttcagtgtaaaaattttacatggtatctgaacaacatttatccagaggtgtatgtgccagaccttaatcctgttatatctggatacgtgagtattttcctgttccttttttaattaatatactccttgccaccaacctttatgtggttctaagaaaattgctgaaatactttctttattgcttttgagattttacattataatcattaacattactttctaaattattttaaaaatatataaatcacatggattaaaaaacttttcataacttgaaaattttcctttagattaaaagcgttggtcagcctctatgtctggatgttggagaaaacaatcaaggaggcaaaccattaattatgtatacatgtcatggacttgggggaaaccaggtgagcactgcattaaaaatccttcacttgtaaagcatttacaagcacaaatgagatgttgcctatttttcagaagtcccacagcagctttatacttgggtaagctgtgtgtgaaatgttttcagactgaatttggcaattgatattgatgagtattttttttggtttttactctggctctgaaaacaatttgagtagcttaaccattaaaaaaaaaaaaaagnnnnn

SEQ ID NO: 20423 - DNA, 2531 bp, Homo sapiens
agggagtcgacccacgcgtccgggcggagcctgcgcggggccggtaggatcgcgtcgggagccggtaccgaggcccgagccgcgggagtcgagcgaaggcagcgccgaggccgcggtttccccctgggcctccccagcagcagccatgggcatcaaatttttagaagttatcaaaccattctgtgcagttctaccagaaattcagaaaccggaaaggaaaatccagtttagagagaaggttctgtggactgctataacgctcttcattttcttagtgtgttgtcagatcccactgtttggaatcatgtcatcagattctgcagatcctttctactggatgagagttattctggcttccaatagaggaactttaatggaattgggtatctccccaattgtaacatctggtttgattatgcagttgttagctggagccaaaatcattgaagttggagatacaccgaaagatagagctttattcaatggagcccagaaactgtttggtatgatcattaccattgggcaagccattgtgtatgtcatgacggggatgtatggggaccctgcagaaatgggtgccggaatctgtctcctgatcatcattcagttgtttgttgctggtttgattgtgctgctgttagatgagctgctacagaagggttacggcttggggtctgggatttccctctttattgccaccaacatctgtgagaccattgtctggaaggcctttagtcccactaccattaacactggcagaggtactgagtttgagggtgcagtcatagctctgttccatttgttggccaccaggacggacaaagtccgagctttacgggaggctttttatcggcagaacttacccaatctcatgaacctcattgctacagtttttgtgtttgctgttgttatatatttccaaggatttcgcgttgatctgcccattaagtcggcccgttaccgaggacagtacagcagctaccccatcaaactcttctacacctccaacatccccatcatcctccagtcggccctggtgtccaacctgtatgttatttcccagatgctgtctgttcgatttagtggcaactttttagtaaatttactaggacagtgggccgatgtcagtgggggaggacccgcacgttcttacccagttggaggcctttgttactatctttctcctcctgagtccatgggcgccatctttgaggatcctgtccatgtcgttgtttatatcatcttcatgttggggtcatgtgcattcttctctaagacatggattgaagtgtctggttcctcagccaaagatgtagctaaacagctgaaagaacagcagatggtaatgaggggccaccgagatacctctatggttcatgagcttaataggtacatccccaccgcagctgcgtttggcggtttgtgcattggtgccctgtcagtgctggctgacttcctgggggccattggatctggcactggaattctgctagcagtcactattatttaccagtattttgaaatatttgttaaagaacaggccgaagttggtgggatgggtgctttgtttttctaaatgttcaaatatttcattttgtgcgtgtgaaagggaaaacactttgacggatcgtttttgtcagatgacactggtggctccccttttctcccctcacagtttcttgtttcgagtgctgactgacccgtttctgaaatggacaccgagctaagtctgtgtgcagcattagtacccgctgccttaaaactcaagtttacattattcattaaaaaaagtacatctagtgttgcctgtaatgctggaaaccagtgtatctaccttgctgtgttaaatcatgacagtgagacggtgagatggattcgttttgcacacaacattcaaaacacttcatattgcccccacttgttgaaaaataaatgtagttcaaattgccactttccagtatttttgagcttatttaatgagttctggaacatttatatctaatctatattttagataattactttttatacttttttaactcatggtatccccactccccacccccacctcatttttatttgtcccttctcaaagcagccacttagcccacatgggcgaaatcaagtctccagttatttctgccacaactgcttctaaggcctcctccttctcctcctcctcttcctcttcctccttttccttctcctcctcctctcttcccagtgacagcatcatcgtgctgtttgcctgtattggctatgccttctaactccaaccagtcacttgagaatattctttcaagattctgggccccgattcttttctgtttaaatccctaaagcaaagatctaattctcaagcaatgtctgtagttcagtgggggtgaacaatgaatatattcatgctaggaatttgtgtctgttgttgtactcacagcagcaacatgagtgtaaacagtagacaataaacttttatttaagaaaactgattcagttgtgttggaaaaaataaagaaatctgatattaaacg

SEQ ID NO: 20424 - DNA, 345 bp, Homo sapiens
  misc_feature 1, 2, 3: n = A,T,C or G
nnnacttttttttttttttttctttaaacaccagttagtttatttcaggacaagaatttaccatataacactctttttacataaattctgtctccccccactttttttttttgaagataaccattccttttttttttttttaaagcaaactttctttatgcctttggactagactgtctaaggccacaagattagaagttaccataatacatgttacactgttaactttaagcaaacttcacttttgttgaaaaccttgtaagtttgggatttcaattatcctttgctattaagcggacgcgtgggtcgaagcttgtcctcggccgccaccgcggtgagctccaa

SEQ ID NO: 20425 - DNA, 1232 bp, Homo sapiens
  misc_feature 1, 2, 3, 407, 1171, 1208, 1228, 1229, 1230, 1231, 1232: n = A,T,C or G
nnncgtctttctttcttctatctctgtatcttcttcttttactctgtcgctttgcttctttctctcttgttgtcttcgtttcgttctgctttccttcttcgtctttctccctgttgtctcttctgttttagtactgttcgtgttttctgttttgctctcctcatctctcttgctcctctctcttgttctgctggtcttttgttcttgtctttcttcctttcttgttcttgatttgtctatttgttttcgtagtactttctgttctctctgtttatctatctttcgcgttctctgctcttcttcctttgcttcttctcgcttctctttgtctttcgttgttatcatgctctcgtcgttcgcttatgtacgtctactactgttcatgtttcgtcgatacttcctgtgtngctgtcatgctgttttgctcctgcttctgctcattcatcctcacgatggggccttattgtttgtcatgtctgtggtgctccctgggacctcctctggtttgttagtacccccctgttttggtcgtcgcctattcctccacatccgggattggttgtttccacagaacgcccttcgtgttttcgctacccggccgtcttttttatttggttggtgaatccccaccccctttttctcgtgaccccggcgtttccctctggggtaccctcgtttgtggcccatcggttccaccgaactctattggggcccgcgctcccccacacgattgtgtttttgaaatcttctttttgaaatgtttgaagttaactcattttatttctaggatttggatttcaacattttaatttctttggaatataagtcactttttgcaagctaaaaaatagaatcaaactaaggtgatctagtcctctaggcatccaggctgatccttggaatcatgagcagaatgatgacatactacaaggtgctagcaatacggctataaactctaaataataaccactacatgtttcattaggaaacagccaaaagtccggccgttaaaggaataatctgcagaacatcttgatttacaagggacaaaatgatgcaaattatatgctgtcccacctactgggtgaactggatcagaatgggtcccaagggctgtttaaacagagggaagtattttaccatttttggaaaaactttgctctgcaggggnttaaaaaaattcctgggggttgctggtcaggtagggnaaggccaggttaaaaaaaannnnn

SEQ ID NO: 20426 - DNA, 938 bp, Homo sapiens
  misc_feature 1, 2, 3, 937, 938: n = A,T,C or G
nnnaaaggtatattttacttttcttatacatcttgcacatgaactggtttttttttttaaatagtactcaggaggccttattacttttaagttatacaacattttttgcataaaatttttgataacattttttctttcacaactttcacagacaattttttaacatgtcttaactttctgacttattacaaactttttttctttaaacaaccagttaatttatttcaggacaagaatttaccatataacattctttttatataaattctgcctcccccctttttttcccttttttaaagcgaactttctttatgtctttggactagactgtctaaggccacaagattagaagttaccataatacatgttacactgttaacttttagcaaacttcacttttgttgaaaaccttgtaagtttgggatttcaattatcctttgctattaataagaccttgtttagtctaaattaacttagaattggtatagatggtcttttttttctctctgctggtctttccttgcctctgccagctgctcatgctgctgttctcttaactactgtaggggggaagggggtctaaaaccagctgtaactgtctatgtatggaaactggtctgggtgccttggcttacaggttaccttgtgccatacctttgaaacaagggacctgtccaggcttccttcagatggccaacccacctttaatgctggccagtctgtttcacgcaaagttctaagttttcctggtgtcacagtagcactgtaatctcccttaagttctttcttgaaaaaaatttttttttctccaagacagaataccacgctcacaccacacacactcaccacaagacaaagaacgggcaaagagggcaaacacacacttttaccgtttaagccaaaccaaaatcacgaaattcaaaatccgagtacagcnn

SEQ ID NO: 20427 - DNA, 1512 bp, Homo sapiens
acgcgtccgggagaagctgtgctaatagaggggggccagaaatccccactctagaatgctgtagaatgttgggagacacccaggatgtgagccagggactttctggaagtgtttgttctggccccacccgaccccaggcagtccccagctgtctgcacagtcggatggggagggggcttgcacagagttggagccagaggagagagctggctcatcccctacggtaggatggggaaacctcacagaccacattgtcacccggcctcagctctccgccccggcgctcagagggtaactctcacccacctcgtccgcttctctgaaccagagtgacccaggctgcgctccgccccgctctcctaccccgagttggcacggaggcccggcagccatggcggtggaaggaggaatgaaatgtgtgaagttcttgctctacgtcctcctgctggccttttgcgcctgtgcagtgggactgattgccgtgggtgtcggggcacagcttgtcctgagtcagaccataatccagggggctacccctggctctctgttgccagtggtcatcatcgcagtgggtgtcttcctcttcctggtggcttttgtgggctgctgcggggcctgcaaggagaactattgtcttatgatcacgtttgccatctttctgtctcttatcatgttggtggaggtggccgcagccattgctggctatgtgtttagagataaggtgatgtcagagtttaataacaacttccggcagcagatggagaattacccgaaaaacaaccacactgcttcgatcctggacaggatgcaggcagattttaagtgctgtggggctgctaactacacagattgggagaaaatcccttccatgtcgaagaaccgagtccccgactcctgctgcattaatgttactgtgggctgtgggattaatttcaacgagaaggcgatccataaggagggctgtgtggagaagattgggggctggctgaggaaaaatgtgctggtggtagctgcagcagcccttggaattgcttttgtcgaggttttgggaattgtctttgcctgctgcctcgtgaagagtatcagaagtggctacgaggtgatgtaggggtctggtctcctcagcctcctcatctgggggagtggacacagaatcccgcccgggtgtgccaccaaacgcggatatttctccaacaacagcaacaacaacacacaaacagggggggggccacaaaaaaaacccccgggggccccacctgccacgccacccacctttgtggccacacgggggccgccagagagacgagccaactaagagacgcaggacgacagcgcaacaacagcacggacgggacaaagaacaacgcgaagctatgagcgaaccacgcgggtgtaaaggaaaaaacagcaacgaagatgagagaagaaaaatgtgacaacagacagtggagtggtaagagcaagagaacaagcacgagcacgacgagcgaggaaccggatcgcagtaacgac

SEQ ID NO: 20428 - DNA, 3970 bp, Homo sapiens
  misc_feature 1, 2, 3, 3961, 3962, 3963, 3964, 3965, 3966, 3967, 3968,3969, 3970: n = A,T,C or G
nnncacgagcgcgcgtccaccggctccccggctcgcgccgctccatgtagccccggctccccgggcggccgcggaggagggggcgaccacaagatggcggacctctcgctgcttcaggaggacctgcaggaggacgcagacggatccctggactttgtctcacaagatgaaatgttgacgcccctggggagattggacaagtatgctgcaagtgagaacatatttaacagacaaatggtggcccggagtttgctcgataccttgagggaagtctgcgatgatgaaagagattgtattgctgttttggaaagaattagcagattggccgatgattcagaaccaactgtgagagcggagctgatggaacaggtgcctcacatcgcactgttttgtcaagaaaaccggccttcaataccatatgctttttcaaaattcttactacctattgtggttagataccttgcagatcagaataatcaggtgaggaaaacaagtcaggcagctttgctggctctgttggagcaggagctcattgaacgatttgatgtggagaccaaagtgtgccctgtcctcatagagctgacagccccagatagcaatgatgatgtgaaaacagaagctgtggctataatgtgcaaaatggctcccatggttgggaaggatattacagagcgtcttatcctccctaggttttgtgagatgtgctgcgattgcagaatgtttcacgttcgaaaggtctgtgctgccaattttggagatatttgcagtgtagttggccagcaagctactgaagaaatgttgctgcccagatttttccagctttgttctgataatgtatggggagtccgaaaggcttgtgctgaatgcttcatggcggtttcatgtgcaacatgtcaagaaatccgacggaccaaattatcagcactttttattaatttgatcagtgatccttcacgttgggttcgccaagcagcttttcagtctctgggacctttcatatctacttttgctaatccatctagctcaggccagtattttaaagaagaaagcaaaagttcagaagagatgtcagtagaaaacaaaaataggaccagagatcaagaagccccagaggatgtacaagtcaggccagaggatactccttcagatctcagtgttagtaattccagtgtcatactggaaaacacgatggaagaccatgctgctgaggcatccgggaagcctctaggtgaaattagtgttccactggacagctctttactttgtactttgtcctcagaatctcaccaggaagcagctagtaatgagaatgataaaaaacctggtaactacaaatctatgttacgaccagaggttggcaccacttcacaagattcagctctcttagatcaggaattgtataactccttccatttctggaggactcctcttcctgaaatagatctagacatagagcttgaacagaactctgggggaaaacccagcccagagggaccagaggaagaatctgagggccctgtgcccagttctccaaacatcaccatggccaccagaaaggaactggaagaaatgatagaaaatctagagccccacattgatgatccagatgttaaagcacaagtggaagtgctgtccgctgcactacgtgcttccagcctggatgcacatgaagagaccatcagtatagaaaagagaagtgatttgcaagatgaactggatataaatgagctaccaaattgtaaaataaatcaagaagattctgtgcctttaatcagcgatgctgttgagaatatggactccactcttcactatattcacagcgattcagacttgagcaacaatagcagttttagccctgatgaggaaaggagaactaaagtacaagatgttgtacctcaggcgttgttagatcagtatttatctatgactgacccttctcgtgcacagacggttgacactgaaattgctaagcactgtgcatatagcctccctggtgtggccttgacactcggaagacagaattggcactgcctgagagagacgtatgagactctggcctcagacatgcagtggaaagttcgacgaactctagcattctccatccacgagcttgcagttattcttggagatcaattgacagctgcagatctggttccaatttttaatggatttttaaaagacctcgatgaagtcaggataggtgttcttaaacacttgcatgattttctgaagcttcttcatattgacaaaagaagagaatatctttatcaacttcaggagtttttggtgacagataatagtagaaattggcggtttcgagctgaactggctgaacagctgattttacttctagagttatatagtcccagagatgtttatgactatttacgtcccattgctctgaatctgtgtgcagacaaagtttcttctgttcgttggatttcctacaagttggtcagcgagatggtgaagaagctgcacgcggcaacaccaccaacgttcggagtggacctcatcaatgagcttgtggagaactttggcagatgtcccaagtggtctggtcggcaagcctttgtctttgtctgccagactgtcattgaggatgactgccttcccatggaccagtttgctgtgcatctcatgccgcatctgctaaccttagcaaatgacagggttcctaacgtgcgagtgctgcttgcaaagacattaagacaaactctactagaaaaagactatttcttggcctctgccagctgccaccaggaggctgtggagcagaccatcatggctcttcagatggaccgtgacagcgatgtcaagtattttgcaagcatccaccctgccagtaccaaaatctccgaagatgccatgagcacagcgtcctcaacctactagaaggcttgaatctcggtgtctttcctgcttccatgagagccgaggttcagtgggcattcgccacgcatgtgacctgggatagctttcgggggaggagagaccttcctctcctgcggacttcattgcaggtgcaagttgcctacacccaataccagggatttcaagagtcaagagaaagtacagtaaacactattatcttatcttgactttaaggggaaataatttctcagaggattataattgtcaccgaagccttaaatccttctgtcttcctgactgaatgaaacttgaattggcagagcattttccttatggaagggatgagattcccagagacctgcattgctttctcctggttttatttaacaatcgacaaatgaaattcttacagcctgaaggcagacgtgtgcccagatgtgaaagagaccttcagtatcagccctaactcttctctcccaggaaggacttgctgggctctgtggccagctgtccagcccagccctgtgtgtgaatcgtttgtgacgtgtgcaaatgggaaaggaggggtttttacatctcctaaaggacctgatgccaacacaagtaggattgacttaaactcttaagcgcagcatattgctgtacacatttacagaatggttgctgagtgtctgtgtctgattttttcatgctggtcatgacctgaaggaaatttattagacgtataatgtatgtctggtgtttttaacttgatcatgatcagctctgaggtgcaacttcttcacatactgtacatacctgtgaccactcttgggagtgctgcagtctttaatcatgctgtttaaactgttgtggcacaagttctcttgtccaaataaaatttattaataagatctatagagagagatatatacacttttgattgttttctagatgtctaccaataaatgcaatttgtgacctgtattaatgatttaaagtggggaaactagattaaaatatttgtcttttaactaaaaaaaaaaaaaaaaaaaaaaaaaaaaaaaaaaaaaaaaaaaaaaaaaaaaaaaaaaaaaaaaaaaaaaannnnnnnnnn

SEQ ID NO: 20429 - DNA, 370 bp, Homo sapiens
  misc_feature 370: n = A,T,C or G
tatagggcgaattggagcctccaccgcgggggcggccgagggcctgatctaactgctgccaagacatgccaaggtcaccagcttcccgtcctgaccaacagccacctctcagaaggctggcttaactactcagccccagtcttcttagcagatggcaaggagctctggccaagattttagtctaaacagaaccctaggctgctgatgcaacatcaagcacagcataaggtcacccctttccggggggacggctactgaaccctggcattccaattagaaacgtgtttcaaggacacagttactccggcctcagaactctccaatgtgagtaggtaagtacctgcccgggcggccggccgcccgggcaggn

SEQ ID NO: 20430 - DNA, 2056 bp, Homo sapiens
aggagtcaccacgcgtccgctttcggcctgttagccaggagcgaggggcagggctaaggggccggcggccactcggcatctgggttttagtcaggcagtgctccaggcgcctggctgccaggctacgggagaaaagtcctccgctcggccgcacccgttagaggcgctctccactgctgtcctcttcagctcaagatggtggcctgccgggcgattggcatcctcagccgcttttctgccttcaggatcctccgctcccgaggttatatatgccgcaattttacagggtcttctgctttgctgaccagaacccatattaactatggagtcaaaggggatgtggcagttgttcgaattaactctcccaattcaaaggtaaatacactgagtaaagagctacattcagagttctcagaagttatgaatgaaatctgggctagtgatcaaatcagaagtgccgtccttatctcatcaaagccaggctgctttattgcaggtgctgatatcaacatgttagccgcttgcaagacccttcaagaagtaacacagctatcacaagaagcacagagaatagttgagaaacttgaaaagtccacaaagcctattgtggctgccatcaatggatcctgcctgggaggaggacttgaggttgccatttcatgccaatacagaatagcaaaaaagacagaaaaacagtattaggtacccctgaagttttctgggggccttaccaggagcaggaggcacacaaaggtggccaaaatggtggggtgctgctgctttggacatgatgctgactggtagaagcattcgtgcagacagggcaaagaaaatgggactggttgaccaactggtggaacccctgggaccaggactaaaacctccagaggaacggacaatagaatacctagaagaagttgcaattacttttgccaaaggactagctgataagaagatctctccaaagagagacaagggattggtggaaaaattgacagcgtatgccatgactattccatttgtcaggcaacaggtttacaaaaaagtggaagaaaaagtgcgaaagcagactaaaggcctttatcctgcacctctgaaaataattgatgtggtaaagactggaattgagcaagggagtgatgccggttatctctgtgaatctcagaaatttggagagcttgtaatgaccaaagaatcaaaggccttgatgggactctaccatggtcaggtcctgtgcaagaagaataaatttggagctccacagaaggatgttaagcatctggctattcttggtgcagggctgatgggagcaggcatcgcccaagtctccgtggataaggggctaaagactatacttaaagatgccaccctcactgcgctagaccgaggacagcaacaagtgttcaaaggattgaatgacaaagtgaagaagaaagctctaacatcatttgaaagggattccatcttcagcaacttgactgggcagcttgattaccaaggttttgaaaaggccgacatggtgattgaagctgtgtttgaggaccttagtcttaagcacagagtgctaaaggaagtagaagcggtgattccagatcactgtatctttgccagtaacacatctgctctcccaatcagtgaaatcgctgctgtcagcaaaagacctgagaaggtgattggcatgcactacttctctcccgtggacaagatgcagctgctggagattatcacgaccgagaaaacttccaaagacaccagtgcttcagctgtagcagttggtctcaagcaggggaaggtcatcattgtggttaaggatggacctggcttctatactaccaggtgtcttgcgcccatgatgtctgaagtcatccgaatccttcaggaaggagttgacccgaagaagctggattccctgaccacaagctttggcttttctgtgggtgccgccacactggtggataaagttgtgtggattaccgaaacatgtggcggagatttggcaaagtttttgggagcgggtttgagggggaacccaaaaatgtgaaacaaagggtcaagg

SEQ ID NO: 20431 - DNA, 404 bp, Homo sapiens
agggcgaattggagctccacgcggtggcggccgaggtcaagcttcgacccacgcgtccgatcctcttctgctgttctggaaagaaacagaccagtggtatggagtataagaaaactgatgcacctcaaccggatgtgaaggaagaggaagaagagaaggaagaggaaaaggacaagggagatgaggaggaggaaggagaagagaaacttgaagagaatcatgctgttgcatttagaactttctgctttgcacaggaaagagtcacacaattaatcaacatgtatattttctctatacatagagctctatttctctacggttttataaaagccttgggttccaaccaggcagtagatgtgcttctgaaccgcaaggagcaaacactgaaataaaatagtttattt

SEQ ID NO: 20432 - DNA, 454 bp, Homo sapiens
  misc_feature 1, 2: n = A,T,C or G
nnaccaattgattaaaatagctttagggtaagttatcttatttagcattagctccctcacaacttttttcattcatacttctattggccagtctcatacctgaagtattttaaatgagtttacaattatttcacttaccttcagaaaaaaaaaggaacaaaaactcttaatgactggtaacatgcaaatttgatgtagaattattattttttaaaatttatatatttctatttatttttattaatttattatttacacattatttcacttatctttactgtattatattgaatgttgttttattcctgtgtatctaccacttatataataaaattaataatcatttaaacataatttaaatacatatggagacgtattttcaattgggaagtgaatgtaaaagtcagatttactaagatttgaaacctgactcttcccgggcgtgggtcgaagc

SEQ ID NO: 20433 - DNA, 1041 bp, Homo sapiens
aagcgaaggtgcgtcacggcgacggccggcaagcacgcaccgcgcagactcgctgtggtggcgtgacccggaagcgctcgccgaggcccctccttgcccgccgatatctctgccgggtgactagctgcttcctttctctctcgcgcgcggtgtggtggcagcaggtgtggcgcgccggcgcgggcttcgggctcagggctggggctggggcgggagtgggggcttggacgcgggggacggggtgcggggtgctgggtgcggctggggccgtgaccctaggggcaggtttgcgccgggagccggggcacggttccggccgtactcacggcgccgcgcggtgactccccaggcgcagcccagcctcgaaatgcagaacgacgccggcgagttcgtggaccgcccaagtcccctctgctcactgcgccctttctccacagctccgctagcaatcgcatcatcggtgccaaggaccacgcatccatccagatgaacgtggccgagggtgacaaggtcacggacaggtttaatggccagtttaaaacttatgctatctgcggggccattcgtaggatgggtgagtcagatgattccattctccgattggccaaggccgatggcatcgtctcaaagtaaggttgggggctcacatttgggcagagtgagtggactaggactgctccagaggcgtggtcttaacgttgtccttttcccctggttctaggaacttttgactggagagaatcacagatgtggaatatttgtcataaataaataatgaaaacctaaaaaaaaaaaaaaaaaaaaaaaaaaaaaaaacgacgggcgcgctctaatggcgggggcgggagaaaaaacgacgggacacgacgcaggggcacaggggcaaaacgtgggttccacggacccatttttcggggacacagcgggggaaaaccggcagggcccccaaaagagacgacgggaaaaaccgaaacaccccgggatctcgatgatgcccgaaagagaagaacacaccacaccacaagcaccaaccaaacaaca

SEQ ID NO: 20434 - DNA, 897 bp, Homo sapiens
  misc_feature 1, 2, 3, 4: n = A,T,C or G
nnnnaagaatcaggggagaagggacacaagcccttgaatgcatgccaacacgtgaatcctcaaatcaagactcaaaccatgcagtttaacctctcaagttgcccacttggccctcttccaagtgtactttacttcctttcattcctgctctaatactgtttagtacattttcactcctgctctaaaacttgcctcagtctctcactgtgccttatgcccctcagctgaattctttcttctgagcaggcaggaattgaggttgctgcagacgtgtatgcatttgccaccagtaacatactttggtgccacatgactaggatatgttctctagtgctaacatgttcgtttacagttcttaggactccctgatagaaaaaaacacaaaaaaaaacacaaaaaaacccaaccaaccaaacaaacaaacaaaaaaaaacacaggagtttctcccaaaaagaagtctgcagtgtcttttctgttttctctgaaggtatcccagggtgttagatttctgttgtttttcccttatgtggcaccgaagttggcaagaagaaggaagtgctgatataaataaatagggaaatgaacagagagactacatgtggttagcaggagtttaggatgagagaaatttagtggaccgagaaatagtctaaatatcagttttaatttgtgaaagaaaaataaaaacctgggaccccaattcactatgcctaaaggaaaaaaattaagctgaaagctgaatcatgcaagaagctgttttttcctttgttcttaagcagagcgctacagataaaaaggtgaaatatctccccaggtagctactctatgttcacctgaacttatgtaaagttctgatttactgagcacgagaagaacacataattgactattcctgt

SEQ ID NO: 20435 - DNA, 642 bp, Homo sapiens
  misc_feature 1, 2, 3, 4, 5, 6, 542, 548, 555, 560, 562, 563, 564, 565,566, 567, 568, 569, 570, 571, 572: n = A,T,C or G
nnnnnngaaatgcactgacatttttatttcttgcaacccgagttaaattcacgtttcatttcctacagaatgcaaaaaagacatccacaaggcaactccacttctaagttacaaattactagatgttagaaaactttctcgaaggacagtgcactattttttatttttttgagacagagtcttgctctgtcgccttggctcactgcaagctccggcctaggcgacagagcgagactccatctcaaaaaaaaaaaacaaaaaaaattaaaataagaaaaccaaagcacacaatgataaaccacttttctcttcttgctgtaatttttctttgatttgctctctggggatcaagacaaaacaaaatcattagtcttagatacctgaatttgacctcgcctcatagctaatgtgatcaagagtagttttttttttttttaaatacaattaagacaaaaggactttatatcagcaggactttagggctgtggttccactgtttttatagtaaaatacactaatggtggggtaaaggttgaaaaagnaggtgnaaacatncgttncnnnnnnnnnnnccgggcaggtacctgctgtagtcacgagggacgggcggcggcctggtcggcagagagtagcctgcaacat

SEQ ID NO: 20436 - DNA, 3348 bp, Homo sapiens
  misc_feature 1, 2, 3, 4, 5, 6, 7, 8, 9, 10, 11, 12, 3331, 3332, 3333,3334, 3335, 3336, 3337, 3338, 3339, 3340, 3341, 3342, 3343,3344, 3345, 3346, 3347, 3348: n = A,T,C or G
nnnnnnnnnnnngtcgacccacgcgtcacgcgagcggcgagccggagcgcgagcccgctcccgcaccatggaggaggacgacagctacgttcccagtgacctgacagcagaggagcgtcaagaactggagaacatccgacggagaaaacaggagctgctggctgacattcagaggctgaaggatgagatagcagaagtagctaatgaaattgaaaacctgggatccacagaggaaaggaaaaacatgcagaggaacaaacaggtagccatgggcaggaaaaaatttaatatggaccctaaaaaggggatccagttcttaatagagaacgacctcctgaagaacacttgtgaagacattgcccagttcttatataaaggcgaagggctcaacaagacagccatcggcgactacctaggggagagagatgagtttaatatccaggttcttcatgcatttgtggagctgcatgagttcactgatcttaatctcgtccaggcactacggcagttcctgtggagcttccggctacccggagaggcccagaagatcgaccggatgatggaggcgtttgcccagcgatattgtcagtgcaataatggcgtgttccagtccacggatacttgttacgtcctctcctttgccatcatcatgttgaacaccagtctgcacaaccccaatgtcaaagataagcccactgtggagaggttcattgccatgaaccgaggcatcaatgatgggggagacctgccggaggagctcctccggaatctctatgagagcataaaaaatgaaccctttaaaatcccagaagacgacgggaatgacctcactcacactttcttcaatccagaccgagaaggctggctattgaaactcggaggtggcagggtaaagacttggaagagacgctggttcattctgactgacaactgcctttactactttgagtataccacggataaggagccccgtggaatcatccctttagagaatctgagtatccgggaagtggaggactccaaaaaaccaaactgctttgagctttatatccccgacaataaagaccaagttatcaaggcctgcaagaccgaggctgacgggcgggtggtggaggggaaccacactgtttaccggatctcagctccgacgcccgaggagaaggaggagtggattaagtgcattaaagcagccatcagcagggaccctttctacgaaatgctcgcagcacggaaaaagaaggtctcctccacgaagcgacactgagcgtgcagccaagggcgttggtctgcgggggccttggagctcctgctcttctcccgcacctccatggatgcactgctgccgagcagagcgtcctctgccaggccccgccctggattcctagagactagcttcagcttttgctattttttttaagtgggagaagggtgggcagttatcactggggaagagaggaccggccacctgtccagcatgggctccagagccttcctctctcacagggcagagctcttgtcggcagggcagcctcctggccagtttctctgctcagtgttctggtagcagagctcagagccaactgtttacctcttggttgtccccgtgaagaagccttcaaaccctgcaccataaatacatgtgtccatatattattatatgttaagagaaaaaggtggaaaggaagagaagccacatactataaagatctatttttttttttttaagagagaacgtagggctgttcaggtgcattctgccctggctgcgctggggagcttctccctggagaagagcacctggggctgcggccaaggggcatcagcctgggcccgcggcagggcctggcctgcctctcctgtgctgtgggagctcgctgcctggtgcttgtctgggcgagatggacaggtgaggtcgaggacgcagagggcagaggcccagtggagcctcagacggcacagtcagagtcgggggcctgccctggccggggtcgcagtcggcagcagcgtgcagtccggcatctcccgcggatgcttttccatcccaagtgcctgcggagcgccgaggagaggagagagctgactggacgcttacgttattttcctccttcagaatccaagttcttgttgggctttaaagtagaaagtcagcattttccttgagctaaatacctaataaccaaaactgtgaggaaggttatcgggacagaggttccggataacctgtttcattttgggttttcttcctcttccccagactccagtcctcgttctagaggaaggagtaggacttccccgatccccgtagggcttcagctttttctgcctcaaaaccagccctaactggactactctggatgcattttgtggtgggccccctagaggggaagatgggcctttatctgctccgtggggtgcactggagtgaggggggtggccgggctgcctctcgcatctctgtcttcccctgcaggcgctgtgtgagctggccctgcccctcctcattacagtatgaagggagccgtgacacgcagcattttcctgccgttctctcagggactctcagggcagctcctgccactccgccagggccagcatgccagtccaggcagagcaggtggctggctgtctggccgtctcgccccgcccctccacaggaccctggaccagggcggtgcagggcgcagccccgaggaggcaggtggaggagctgcgggttttcacagggccgcgtcgccacggctcctctgatcctttagggttggcgagcatctctggaaatagcttttgcagaggagtggtgggaggaatagagggggacagtctgtcacctccctccccgccactttgtgtagatcctacctggagggaatggctttaggcacttttgtgccagagcttgtgagggtgacagaagagggtccaggctggaaacctgaactttctgggtgggagaaccaggtggtgcctgccgaggtctgggcgtgtttgggccggtgctggagcctgtccagctggcccgggccctggcctggttctcaagtgtttcctagacagagaggcacctgggtcagtattagtctatttatcagaggtgtaaataatctatgtatagtttttctccttttagattattttgtatttgtttaaaagaagttttgtcaaaatacaaaaatataaagaaatgactgaaagttgttgacagggtttttaagaaataattattctaattgtttttgtttgtttgtttttgccttgtaaactagcgccaaggaactgcagcaaataaactccaactctgcccaagccaaaaaaaaaaaaaaaaaaaagggcnnnnnnnnnnnnnnnnnn

SEQ ID NO: 20437 - DNA, 1256 bp, Homo sapiens
ccacgcgtccgaacagctaggactacaggcatgcactaccctagtttcctatttcgttgttgttgttgttgtcattgttattgttttgagcctgggcaacagaacgagactccatctccaaaaaaaaaaaaaaacctctaaatatattgtgttaatttatagaaaaattgtaatttaaattacatattcatagtcttgcctacttgcatgagcatgtttttattgcttctaacctggattgaaatctatgactttttataacagtcattgagtctgtttcaaaggaatcttgtggtaagtatttttgcatgatgtactcaaggtatcaagtttaacaattgactttttttcattggaaagcatatgtgattaactagcatggattgcttcttgacctgcttgttttgtgtttgtctttttcttctaatataataaccagggattaatgaaaatcaagttccatcctcagacaagaggtaaagttcacacattcttcccatgtctgttcagaaaagaaacctattcagatataagttaagctaatttagtaatcctagaattgtcctctgagagatttagatggatgggccacttcacagtagcagccaactcacgggagcacctgggcaacgctagtggacttttttgtagtgagtgtgttgatcatagaaaatgtagatataaggaaataaactttgaggatagagaattaacattattttgagatattatatataggttgtgaagagtggtggttgtcacactttatggtctctggaccccttaatgtctgattcatgtagcagaagccagctagattttcatctgtctctattcattttgttgtgatgtcatggatcatgtggcctctggaaaactctactgtatactcgagaatgagaatataacaggcaaaataacattatcatgaaaatagttttgacctcatgaaccccatgaaaggttccccagaccaaaattttagaatcactggtatagggtaacactttattgtgtaaattcagttctctgtaccccacttaaatatgtattattatctcttgacattattttcccaaaaaatgctgtttgatttcttacttgttctgtactttgtttttcaggtaaagaaggaaaattcagccagttgattttgtttttagcttactgctgcctttgtccgaagaaaccgttcctccattatttgaattactgaagacagcaagatatttgtaaattatcttaaaataaacaac

SEQ ID NO: 20438 - DNA, 577 bp, Homo sapiens
acggttaaattttctacaaactcctccttcagctgctaccaagttgtcaagaactattctattttgatagatagcatttctcatcagagtctcttgctgggcaagaacggtcaaggcttgaccggttttattagtaataatttctaaaacagcttgcaactgtatgattcagttgagcatgtagataggggttcgatatcctcatgagccttcttgtgcctaagtggcgggtctatagtattgtatgattctttcagagggccattcattatttttctaatcacttatggctatgcttcattttttgcaggaagcatagactgggaagcctagaagttcacctgtttttatgggcagtaagaagaaagatggcttaatggtgccaattatacagctacctgtcctgatcaggcagcttagcataagctctgtgtccacatatccagtataacctggtgggggccgtccagtcctggtggaattctgggtgggcccaaacagtctgcaactttggaaatttgctgaatggattcctttctgtgtgattggaactctaccatgtaactgtttttgtggt

SEQ ID NO: 20439 - DNA, 787 bp, Homo sapiens
  misc_feature 787: n = A,T,C or G
accttgggattgcaggtgcccacccttgcgcctggctaatttttgtatttttagtagagacggggttttgtcatgttgtccaggctggtctcgaagtcgagctcaggtgatccgcccatctcagccttccaaaatgctgggattacaggtgtgtgccaccatgcccagccaacacacacatttatttaatgcaagttttacctagcacagagaagcagtgagagtcagttacttatatattgaattggaccaagtaacttgtgaagaagctagtaaatatatggaggctaaaaagctgagtggttctgttctaacaaggtctgcacagtaatctcttggcctcgacttctcatccttaaaaataaggagatcgtcctatgtttccctggggactttcatctcctgcttttaggaaacacaaaagaggtcaaagcatcttattgcgcctgctgtttttcagtagcctttaactgataatagtcaatgggccagggtgggtgggcaggtgcgatggctcacatgtatagtcctgcccaggttgggtgcatcctttgagcccaggagttcaagaccggcctgggaaacatagcaaaatgctgtctcaaaacaaaaaaaaaaaaagatgtgacggtgcctgcctgtagtccttgctactaaggaggctgaagcaggtaggattattgcttgagtccagtaggttgaagttacagagctatgactatggcactgtattccagcctgggcaactgagtaagacattgtaagatccaagataacatacccgcgn

SEQ ID NO: 20440 - DNA, 4343 bp, Homo sapiens
  misc_feature 1, 2, 3, 4339, 4340, 4341, 4342, 4343: n = A,T,C or G
nnnagagccgcctccccctgttgctggcatcccgagcttcctcccttgccagccaggacgctgccgacttgtctttgcccgctgctccgcagacggggctgcaaagctgcaactaatggtgttggcctccctgcccacctgtggaagcaactgcgctgattgatgcgccacagacttttttcccctcgacctcgccggcgtaccctcccacagatccagcatcacccagtgaatgtacattagggtggtttcccccccagcttcgggctttgtttgggtttgattgtgtttggctcttcgctaagctgatttatgcagcagaagccccaccggctggagagaaacaaaagctcttttctttgtcccggagcaggctgcggagcccttgcagagccctctctccagtcgccgccgggcccttggccgtcgaaggaggtgcttctcgcggagaccgcgggacccgccgtgccgagccgggagggccgtaggggccctgagatgccgagcggtgcccgggcccgcttacctgcaccgcttgctccgagccgcggggtccgcctgctaggcctgcggaaaacgtcctagcgacactcgcccgcgggccccgaggtcgcccgggaggccgagcccgcgtccggaaggcagccaggcggcgggcgcggggcgggctgttttgcattatgtgcggctcggccctggctttttttaccgctgcatttgtctgcctgcaaaacgaccggcgaggtcccgcctcgttcctctgggcagcctgggtgttttcacttgttcttggactgggccaaggtgaagacaatagatgtgcatcagttcaaatgcagcatcctgtgccaggtgccttgcgctgggtccagaatgtggatggtgtgttcaagaggatttcatttcaggtggatcaagaagtgaacgttgtgatattgtttccaatttaataagcaaaggctgctcagttgattcaatagaatacccatctgtgcatgttataatacccactgaaaatgaaattaatacccaggtgacaccaggagaagtgtctatccagctgcgtccaggagccgaagctaattttatgctgaaagttcatcctctgaagaaatatcctgtggatctttattatcttgttgatgtctcagcatcaatgcacaataatatagaaaaattaaattccgttggaaacgatttatctagaaaaatggcatttttctcccgtgactttcgtcttggatttggctcatacgttgataaaacagtttcaccatacattagcatccaccccgaaaggattcataatcaatgcagtgactacaatttagactgcatgcctccccatggatacatccatgtgctgtctttgacagagaacatcactgagtttgagaaagcagttcatagacagaagatctctggaaacatagatacaccagaaggaggttttgacgccatgcttcaggcagctgtctgtgaaagtcatatcggatggcgaaaagaggctaaaagattgctgctggtgatgacagatcagacgtctcatctcgctcttgatagcaaattggcaggcatagtggtgcccaatgacggaaactgtcatctgaaaaacaacgtctacgtcaaatcgacaaccatggaacacccctcactaggccaactttcagagaaattaatagacaacaacattaatgtcatctttgcagttcaaggaaaacaatttcattggtataaggatcttctacccctcttgccaggcaccattgctggtgaaatagaatcaaaggctgcaaacctcaataatttggtagtggaagcctatcagaagctcatttcagaagtgaaagttcaggtggaaaaccaggtacaaggcatctattttaacattaccgccatctgtccagatgggtccagaaagccaggcatggaaggatgcagaaacgtgacgagcaatgatgaagttcttttcaatgtaacagttacaatgaaaaaatgtgatgtcacaggaggaaaaaactatgcaataatcaaacctattggttttaatgaaaccgctaaaattcatatacacagaaactgcagctgtcagtgtgaggacaacagaggacctaaaggaaagtgtgtagatgaaacttttctagattccaagtgtttccagtgtgatgagaataaatgtcattttgatgaagatcagttttcttctgagagttgcaagtcacacaaggatcagcctgtttgcagtggtcgaggagtttgtgtttgtgggaaatgttcatgtcacaaaattaagcttggaaaagtgtatggaaaatactgtgaaaaggatgacttttcttgtccatatcaccatggaaatctgtgtgctgggcatggagagtgtgaagcaggcagatgccaatgcttcagtggctgggaaggtgatcgatgccagtgcccttcagcagcagcccagcactgtgtcaattcaaagggccaagtgtgcagtggaagaggcacgtgtgtgtgtggaaggtgtgagtgcaccgatcccaggagcatcggccgcttctgtgaacactgccccacctgttatacagcctgcaaggaaaactggaattgtatgcaatgccttcaccctcacaatttgtctcaggctatacttgatcagtgcaaaacctcatgtgctctcatggaacaacagcattatgtcgaccaaacttcagaatgtttctccagcccaagctacttgagaatatttttcatcattttcatagttacattcttgattgggttgcttaaagtcctgatcattagacaggtgatactacaatggaatagtaataaaattaagtcctcatcagattacagagtgtcagcctcaaaaaaggataagttgattctgcaaagtgtttgcacaagagcagtcacctaccgacgtgagaagcctgaagaaataaaaatggatatcagcaaattaaatgctcatgaaactttcaggtgcaacttctaaaaaaagatttttaaacacttaatgggaaactggaattgttaataattgctcctaaagattataattttaaaagtcacaggaggagacaaattgctcacggtcatgccagttgctggttgtacactcgaacgaagactgacaagtatcctcatcatgatgtgactcacatagctgctgactttttcagagaaaaatgtgtcttactactgtttgagactagtgtcgttgtagcactttactgtaatatataacttatttagatcagcatagaatgtagatcctctgaagagcactgattacactttacaggtacctgttatccctacgcttcccagagagaacaatgctgtgagagagtttagcattgtgtcactacaagggtacagtaatccctgcactggacatgtgaggaaaaaaataatctggcaagtatattctaaggttgccaaacacttcaacagttggtggttgaatagacaagaacagctagatgaataaatgattcgtgtttcactctttcaagaggtgaacagatacaaccttaatcttaaaagattattgctttttaaagtgtgtagttttatgcatgtgtgtttatggtttgcttatttttgcaagatggatactaattccagcattctctcctctttgcctttatgttttgttttcttttttacaggataagtttatgtatgtcacagatgactggattaattaagtgctaagttactactgccataaaaaactaataatacaatgtcactttatcagaatactagttttaaaagctgaatgttaataggggacactgtaaagtatcatcaaaacctgaatagcttcattgtgcacaagtgtggagttttgtatcctcttacctggtaaactgaagggattgtttggccatttcatttatcttatcattaattcacaagatagttagaaattctgcctcaagcaaagtaccacattttgaatgttttcttagattttgattgcaagtagatatcagcattttttaaatgaaaagctatattatcttctcccttcaaggcagcctaaggatgttctttcccagaatcactccaacccttcttgccagaattcataaaagtacaaaattggagaatagatgatatcttagaaataagctttttttttttttttttttttttttgagacggagtttcactcttgtcacccaggctggagtgcaatggcgcaattagggttcactgcaacctctgcctcccgggttcaagcagttctcctgcctcagcctcctgagtagctgggattacaggcatccaccaccgtgcccagctaatttttgtatttttagtagagacnnnnn

SEQ ID NO: 20441 - DNA, 767 bp, Homo sapiens
  misc_feature 1, 2, 3, 764, 765, 766, 767: n = A,T,C or G
nnnacacagaggcatctaagaagacatgatcactaaatgtgatgtgggatcccagatgggatcctggaccaggtaaaaactaaagtaatgtttcaacttcagtaaataataatgtatcaatattggtccattaattgtggcaaatgtgccacactaatgcaaagcgttagtaacagggaaaactgggagcagggtatatgagaactttttgaactgttttcacaattctcctgtaaatctaaaactcttctgaaaatagagtttattctttaaaagtgtctggaggatgtgcacaagggtgtggcagcagaggggctacaggtaaaaaatcatgacatctggaatatttccttcaatttttgctccacacggtgactatcttaccctgctcccattaaactctgaacaatgttatcagcctgaaaaatggattggcaggaatgtgtaatgtcgaagctgggagggactatggcggccatccaggcccctgctttcaattacacttgaggaaaatcaaatccaaagaccggaagcggccaggctcggtggctcactcctgtaatcccagcactttgggaggctgaggcagacggatcacctgaggtcaggagttcgagaccagcctgaccaacacggagaaaccccatcactactaaaaatacaaaattagccggacgtggtggcgcatgcctgtaatctcagctactggggagaatcgcctgaccccgggaggcagagcttgtggtgagctgagatcacgccannnn

SEQ ID NO: 20442 - DNA, 1020 bp, Homo sapiens
  misc_feature 1, 2, 3, 14, 20, 35, 42, 48, 81, 1019, 1020: n = A,T,C or G
nnncaaggtgcacntaatcngaatgccgcggactncagcagnaccggncactggccctcacttcattcccccgggaggaangacccaaagtgaaataaacagcttccaagtgcccaaggaaatgcttgctagacagctgtgattctcaactttaaagaattacttttcaaaaagattctagggttaaattgctatagaactttattatctaacaacattattattattgagaagagcaagataagatatttgccagttctgcttgaatctttgcctggaggaggaaaaatgtttcattgtgcaggaaatgtataaggaagccttacctcccttttctcatctcttgaggacttaaaagtggaaataacaatggttagggaaagatttcagctgtaaagaatggttttctagttttcttgaaatttgtcctgaacattaccttcacagagtaaaactgtgctactgtcaatcttagaccatttgattgttgtcactgaatttgccataatctgtagactaaaactcacataccacccttctcttaccacagaggtatcactattacaaagaatcctttccctactcattcatattcatcaaagaactactttaattttagtagcgttcaaaatctggtttgagtggctctcttactttggttctccttaatgattgcatggtaatcttgttggctactgcatttgttagtacttgttcttagggagccatgtaacttgttttcattattagatcttagtactgttcactacacacttaaaaaatgagtgtcaagtgcctttaggggaagaacactctgcctgcatgaaaatgtcttaaaactgaaggaaaatttcaagaacgctcttgatcagaagtccagactgtaaacataatcgctgggtcatgtcacttggaaccagtactcacatgaggcaccaaataaaggagatgatttaccttggcttccgcctcctcttcagcaaccagggcatccatccccaagcgctgtcttaactccnn

SEQ ID NO: 20443 - DNA, 1243 bp, Homo sapiens
  misc_feature 1, 2: n = A,T,C or G
nnatgcgcttgtcgtgtataattgtgttaagcggtcgttgttcgtgtggaagagatccgtgttcctgttgcagcctgtcttatgatcggctgtttcagttcctccgagtgtgacaaggcgggggctttcaaacccggctttcttcctttgaacgggccccccggtggtccgtatgcagcgaaagtgaaaacctgctgcaagagccgcatgtgaccatgtactgatcagtgaagtctccaccagccaaggagaacgggtccgtgctaagccatcagaaggtcagggaaaatgcgagaccaaaataccacaatgcccagatctcaagtagatgaagagtttttgaagcaaagtttaaaggaaaaacaattgcagaaaacatttagattaaatgaaatagataaagaaagccaaaagccatttgaagttaaaggacccttacctgtccacacaaaatcagggttgtctgcgccaccgaagggcagcccagcgcctgctgtgttggcagaagaggccagagcagaggggcagctgcaagccagtcctcctggggcggcagaggggcatctggaaaaacccgtgccagagccccagcgcaaggcggcccctcccctgcccagaaaggaaacctcagggacgcagggaatagaaggccacctgaagggtggacaggcaatcgtggaagatcagataccaccaagcaatttggagacagttcctgttgagaataaccacggtttccatgaaaagacagcagcgctgaagcttgaggccgagggcgaggccatggaagatgcagccgcgccaggggacgaccgaggcggcacacaggagccagccccagtgcctgctgagccgtttgacaacactacctacaagaacctgcagcatcatgactacagcacgtacaccttcttagacctcaacctcgaactctcaaaattcaggatgcctcagccctcctcaggccgggagtcacctcgacactgagggccctcggtgtgaagatgaaccttccaccgtcttcactgcatcctggagtgcaaaaataaaatccactcaagagtcacaaggcccgctgtgcataatcggtttcacttttaccttttttttttttttgagacagggtctcactctgtcacccaggctggagtgcagtggcacattctcggctcactgcaacttccgcctcctgggttcaggtgattctcccacctcggcctcccgggtaggtgggattacaggt

SEQ ID NO: 20444 - DNA, 1256 bp, Homo sapiens
acatgtaatgctcctgaactgtatgcttcgcacggctgacatgctaagttttgttctgtgtatgttatgactattttttaaaaagtaaacaaaaaagaattagctggaaataccagcacaggcaaacccctggagacagaaagcaggtgagtggttgctggggcttgagcaggaggaagggcgagggactgcagaatggccatgggctttgccttctagcatgatgagaatgttctggaattagacagtggtaacgcttgttcaacactgccagtgtagttaatgtcactgaattatacactttaaatggctaacatgaccaattttatgttatatatattggactaccacaaaaaaactagctggcacctaaaaacattccattgaacaggccccttcagatctgtgtcttttcctgcatgcaaattacaccacagagcagcacctatggcagcgtggatcacaggctctgttttaggatagagaaaggacaacaaggtgtccccccattattccaggaaagacaagcacattacaccctcaaagacaggtccactcacctgcaaacggcttcttctgtgtgagcacgccccagatgacgatcgcaaagctggaagagaaaccaggcacgttagcatctgacagccagagactcaaagccaaatgcactcatgcacagcaacaggcgtgaagacacctgttctgaagccttccaaagacagagccatgacaccgagatatttctcctgtttttaaaaagagaaaattctctatagtgaagcccagcatgttgatagctcagatgtcagacagactcaagtaacttcgccaactgggctacaatcttcaggcagcttgagggacttccaaagagggtgccaccctatgcggggcgtgagctcctggggaacagcgcctgtgtgcctcactgatatcttctcgcaagcaccaggcacagagcacctgcgcaggcatttactgaagaaatggatgaatgaatgatgggcaactcccatgccctcccccaacaatgatttcattctctgaaaacacggattctggttccgatcagcgttcctaacgtaggcttgctgagatttcagcgctcctaacagaggctcactgagagttcatcattagaggggttgttaaagaaagtgcgcagaaaacgtaggagacaacacagctgaacgccccaaagcctttttcgggggctgcttagaaatatatagataatatgagggatacgttcatgt

SEQ ID NO: 20445 - DNA, 1313 bp, Homo sapiens
  misc_feature 1, 2, 1312, 1313: n = A,T,C or G
nngactcggcacgaggctggagataagaagtcagtgggttacttgggagtgatcagcctgactctgaaatgacttttgataccaacataaagcaagagtctgggtcttctacttcttcatacagtggctatgaaggttgtgctgtgttacaggtcagcccagtgactgaaacacgtacttaccatgatgtgaaagagatttgcaaatgcgatgttgatgaatttgttattttagagcttggagattttaatgatatcacagaaacctgtagctgttcctgcagctcctctaagagtgtcacttatgagccagacttcaattctgcagaactattagccaaagagctgtaccgcgtgttccagaagtgctggatactgtcagtagttaattctcagctggcaggttccctgagtgcagctggctcgatagtcgtaaatgaagagtgtgtccgaaaagactttgaatccagtatgaatgtagtacaggaaattaaatttaagtctaggatcagagggactgaagactgggctcctcctagatttcaaatcatatttaatattcatccaccactcaagagggaccttgtggtggcagcccagaattttttctgtgccggctgtggaactccagtagagcctaagtttgtgaagcggctccggtactgcgaatacctagggaagtatttctgtgactgctgccactcatatgcagagtcgtgcatccctgcccgaatcctgatgatgtgggacttcaagaagtactacgtcagcaatttctccaaacagctgctcgacagcatatggcaccagcccattttcaatttgctgagcatcggcaaagcctgtatgcgaaagccaaggagctggacagagtgaaggaaattcaggagcagctcttccatatcaagaagctgttgaagacctgtaggtttgctaacagtgcattaaaggagttcgagcaggtgccgggacacttgactgatgagctccacctgttctcccttgaggacctggtcaggatcaagaaagggctgctggcacccttactcaaggacattctgaaagcttcccttgcacatgtggctggctgtgaggtgagggtgcacccagagcagattcgttcccgatgcaccagggcctgtgctgggtgttccgcacttgacttcatttaactctcacaaaccctgagggaagtgccggtgacctagttagagatgagaaaactgaggtcagagctgtgaagtaacagctgagatacccctgctggtaagtggcaaaaccggaatgcaagcctgaaccaatggacttgatcnn

SEQ ID NO: 20446 - DNA, 466 bp, Homo sapiens
  misc_feature 461, 462, 463, 464, 465, 466: n = A,T,C or G
acaattgttttagaagataatttgtttttctctcttcagtttcgcatattactaaagacaaatcatggtaggattggtttgtttattatacttggcctaactatttgtatacaatgcagcaagaatgattattttttacttaggcttttaagtaggctctgatggaactttgttccatagcaggaatctcagataagactttgtaaaacccgtaaaacccagccgagccatggatttatgccattaaatacccatgagttgggtgaaatttcctctccttttgagggcccaagataaacctggggcgtctgcacttgtcaaaaagtgatattctttacttacacagtcagaaaccctgttcagggactgtgtatacagaatatgaggccagtttttccaagggctttattggctccgtaagtcaagtttgattccttataaggaaagcacatgattccagnnnnnn

SEQ ID NO: 20447 - DNA, 2500 bp, Homo sapiens
  misc_feature 282: n = A,T,C or G
ctatagggctaattggagctccacgcggtggcggccgaggtacacaggtagaatcttacttcaactgtaaatgggcccacagaaccctctaaatccccttgtaaatttaactgctagtccaaagaggaacagctctttgtacactaggaaaaaaccttgtagagagagtaaaaaatttaacacccatagtaagcctaaaagcagccaccaattaagaaagcgttcaggctcaacacccactacctaaaagatcccaaaaaaaataaaataaagtacgccacngagtgtgaaatcttcagagaagaatttctctttagttctttgcaagaaggtagagataaagacactttttcaaaaatggcaatggtatcagaattcctcaagcaggcctggtttattgaaaatgaagagcaggaatatgttcaaactgtgaagtcatccaaaggtggtcccggatcagcggtgagcccctatcctaccttcaatccatcctcggatgtcgctgccttgcataaggccataatggttaaaggtgtggatgaagcaaccatcattgacattctaactaagcgaaacaatgcacagcgtcaacagatcaaagcagcatatctccaggaaacaggaaagcccctggatgaaacactgaagaaagcccttacaggtcaccttgaggaggttgttttagctctgctaggaactgatgaagatactctaattgagattttggcatcaagaactaacaaagaaatcagagacattaacagggtctacagagaggaactgaagagagatctggccaaagacataacctcagacacatctggagattttcggaacgctttgctttctcttgctaagggtgaccgatctgaggactttggtgtgaatgaagacttggctgattcagatgccagggccttgtatgaagcaggagaaaggagaaaggggacagacgtaaacgtgttcaataccatccttaccaccagaagctatccacaacttcgcagagtgtttcagaaatacaccaagtacagtaagcatgacatgaacaaagttctggacctggagttgaaaggtgacattgagaaatgcctcacagctatcgtgaagtgcgccacaagcaaaccagctttctttgcagagaagcttcatcaagccatgaaagtatgtaccattctacttatatgtcctgcttagaggaagaattatttgtagaaagaacagaaaacctcatgttgtttgaaaatctcacatttaatatcttcccattaatgagaatcattgttctatttgatgaaagaggtaatacactaccttctcagaataaacttctgttagattcggtgcttttttttacagatgagattgtaaagtgagcctgtaagtgatttacggctcacttgtgatttgcttaaaacatgtgtcaccacgggaagggtgatgtactttcttttttaacgtgtaattttagtggcctacttcctctaaggttgtgagttttataatctcccactttatgagtctgatttgttgtttttattattctgtcttttatgccacagattaatagttgaaacttttgaaatgtcattctatgattaaggatgtagaatgatgtatttgagatcaactatgtcactttaactttactgtctgacatgcatggtattatacaaggtacctcttctattctgacattttgagcccacaaatgaatagttatgaagttatcttccttttttctttgcagctccaaaataaggaggttttcagagagagagagaaagaaagatctaactatttgaataatatgaaggaatattttgaatatatatgaataatttgaataatatgaaatgatagacatgctaggtactgctctgtagtggttagcatagttgctgccccctttctgccatagtctagtgtgatatttcgttgggtaatgatgaatacctggtgccatggaagagaaaagtgggacatatactccagactttggaaatccaggtagcattgctgtcagctaaattaacacctgaagtttaaatagaaatgagccagatgagggcaagagtggaagagatggggataaagcaagggtggtccaagaggaagaagtaacccacacacaggcttgaaggcaaaaggtaacataaccttctcaagacagtaagtatagagtgatggtgcacactggaagagatggtagaattaggcaggatattgtaagccttgaaaaagaattaggcaggatatcggaagccctgattagattctatcctaagagcaacagaagatcactgacagtgttttaaatagatagactagtttattagatttgcagtttagaagttccctttttttgtaattattggacagtgtagagaccggatggtgagagatgagttaggaagttgtgacagctctctatacctaccgctaatgtagaggattatttattttcatttcattaccattcgtgtaaggtgtgtgtgtg

SEQ ID NO: 20448 - DNA, 318 bp, Homo sapiens
ccgggcaggtacgcggggactgaaaatcggactgttcaactcacctggcagccactcccagagctcctggaactctggcccaaggttctctgactgactccttcttggcttactggctgaagactgacgctgcctgatcgcctcagaagccccgcagaccatcatggacgccgagctttaggtaactcacagtggaggcccgcctgcacccaggtgaaataaacagccttgttgctcacacaaagcctgtttggtggtctcttcacacagacgcgcatgaaagggaagacatacaaaaacaaggcctctgaggtaggt

SEQ ID NO: 20449 - DNA, 712 bp, Homo sapiens
  misc_feature 1, 2, 3, 4, 5, 6, 7, 705, 706, 707, 708, 709, 710, 711, 712: n = A,T,C or G
nnnnnnngaaaacacaatgctcaaatttatacagactggactgggtttccatcagtttggaatttggtctactccgaagttgttctgaggatgcctaaaggatttctccgcatcaagtctgggcatctcttcctcagcccctgcactaagttgttggggaaccaccaagctacagagatgttggcactttatgcaatactaaccagcccttttttccattccaaggtactaccttctctgctacaagtcgagcgaggagccccgcatgagccctgacacctgtgccaccattttggaaaaagctggtctcgataactgggctcttggaaaaacaaaagtgttccttaagtattatcacgtggagcagttaaatctaatgcgaaaggaagctattgacaagcttattttgattcaagcttgtgtcagagcattcttgtgttcaagaagataccaaaaaatacaggagaaaaggaaagaaagcgctataataatacagtcagctgcaagaggacaccttgtcaggaaacaaagaaaagaaattgttgacatgaaaaacacagcagtaacaaccattcaaacttctgatcaggaattcgactacaagaaaaactttgaaaatacaaggtgtctgtaaaggagaggagccaaaaatattgagacccccaagacgaccccggaaacccaaaaaaaaaaaaaaaaaaagtnnnnnnnn

SEQ ID NO: 20450 - DNA, 392 bp, Homo sapiens
acttttttttttttttgggtttgggtttttttagttttcagaaatttgactataatgtgtctttgtgtgaatttgaagggatttctctcatttgggattcacccagcttcttgaatctgtaggcttatgtgttttgccaaatttggggagcttccagccattacttcttcaggtgctttttcagccccatcccctctctctcctttgggactttgacgacatcagtgttagatcttttgttatactcccacaattccctgaggctctgttcatttatctctgttattcaaattgggtcattcctattgttcaattttcaagttcacagattctttttgtctgtcctctctattatggtgttgaacctatcctttgagtttatttccccgcgt

SEQ ID NO: 20451 - DNA, 537 bp, Homo sapiens
  misc_feature 537: n = A,T,C or G
ggcatggtggctcacgcctgtaatccctccactttgggaggccaaggcaggtggatcacctgaggttgggagttcgagaccagcctgaccaacatggagaaaccccgtctctactaaaaatacaaaattagctaggcgtggcggcacatgcccgtaatcccagctactccggaggctgaggcaggagaatcactcgaactcgggaggcagaggttgcggtgagctgagatcacaccattgcactccagcctggccaacaagagtgaaactccatctcaaagaagaaagaacgggaaacatgaagccttcctttaatgatgatagttgctaaagtgaattattcgaatctctttgcatgttttggctctgttaatctaactcttgtctctaaatagatgctgagagtgtaaatctagatgactataacatacacgtcattgcaagtgtattcaaacaatggcttcgagatttgcccaatcctctcatgacctttgaactttatgagggatttcttcgagctatgggccttcaggagan

SEQ ID NO: 20452 - DNA, 1195 bp, Homo sapiens
  misc_feature 1, 1194, 1195: n = A,T,C or G
nataagaagaggagtgacaatcaagccaacagtagatgatgactgaagaataccagttaaataatacattcggatggatttggaagttggaattcctcttaacaaccaaggggtttattttcaaagcaatattggggaattgatttcacagttcgttaccttagtaggtaacggtaaggttattctcttttttttttttttttttttggttatgaaaacttagggactaaaattaatataaaaattggcataatgttggattgaatctacattttggcagaagttaaacattcccacataatgtcaaaattatacatcatgcagttctgtttttttgtttgttttattttgttttgtttttgagtctggctctgtcacccaggctggagtgcagtggcgtgatctgcaacctctgccccccgggttcaagcgattctcctgcctcagcctcccgagtagctgagattacaggtgcgcgccaccacacttggctaatttttgtattattagtagagacggggtttcagcatgttggctaggccggtctctcctgacctcagggtgatcagcccacctcggcctcacaaagtgctgggattacaggcgtgagccaccttgcccagcccacatcatacagtttgaaatgaaactttgccacaaccagcctttgctgtagcacacacatatatcactgaacctgtttgaaataaagttttttttctttttcatgattcgtctttgagtacctccaggctgaaagactgtgtaccagtaaaaacttaaaggcacaaattctccttgaagacttctcccttttatgtgggcccatattttatgttgctttatctttgaaatttgctgaaacaggaaatgaatggattcgaatgaaattgtctttagagcatgattactgttcccatggacaatatttttctcccttgtcttcctggctgaacacggaaccagagtcaaagtatctccctctcctgtgatgcttgagattttctggtgttatgctgaatcagtttctctggaaatcctgttttcaatatttgatggtaccagatctttggctatagtgttacggttacgggggatttcccacttggtgcagtgctaagttagaaaagggtcatcggcgcccttagctaggttaggacggaggtgctgtgcactcttgtggtgtggggttcnn

SEQ ID NO: 20453 - DNA, 1802 bp, Homo sapiens
  misc_feature 1, 1683, 1797, 1798, 1799, 1800, 1801, 1802: n = A,T,C or G
natcgaccacgcgtccgatttgctattgatttgaattaagctagaaattaaggttggataaattcttccccttgaaggatctggaaagacaaggcagtaatgtgtcctcatgggtgcctgttaggaggtgggggtagtttaaatccgtttgtttagatgggaaagggaggaacttaagagggaaatccttttcctcttaaggtttatttccttccaagcagtcatatgtcatctgttacagtttgagaagagattgctgattaccccctgtcttttcctcatctaagtctttaattgcacaaagcacaagtctgaacagcctatgctctggccagagccatttctaagagctttaaactggaagacctatcctgggccaattttcctttttctttatatttttttccgggaaaaaaagtcaactatgcaattgtatacactcccgggtgcatgtgaagaaagggaataagtgtacttatgtgtccagagtattaactggggctgtttttctgtgtttggatttctcttttgaggtatgtactcataacccatcccttggaacgtaatccccacatttgatctaaagcacttgagcgtgcatgcatgtgcgtgcgtgcatatgtgtgtgtgttttcctcctcggtagccagtcaagattgtccttgttggaaatgctcacggtttataaaggttattttctcctcaacaaactcagaagtcacctattttccaaatctgatttaataatttcctatggctattaattcttagggttttctttgaaaatagatttgtgttaaggaagcagtgagattccaaaggaagggatgtgtatatgtctaggcaggtctggaacctggtatgagatgagcactcccctaagttgcaaaatttaagggttactataaaactcattaatcaagatactataaaaaatgcagtatttaaaaaaattaatggcaaaaaatttatgttggataaaatagcgaaatcttacaggatctgacaggactgagattaggaggagggaagtgaggctgaattgaataagtatggggatgaatccttcttatttaaatttttgatacattgtccatcatagactttttacattaattgtgattttttaaaaatgttgcattaaaatagtatttatcttggttactgggttttttggcactccttaaattttgtgcccaaggtgagtgctttgctcacctcaccctagttacgtccctgtttctgtgatttgaacactagcgagaacaccactgtgtgcgcctccacccccatcacacaccaaacaacaggtggctcagacaccctgaatttgcacagctcacctagctttcctaatttaggccttcatatcatagaatggtggcctggaccaataggaatgaaaacagaccaggggttttcccagagaataaagccggaaaagttttgattctccactggactgctgtgtttggatttgatctgttgttagattctagttaacacttttgtttttaaaaactaaggacaaatgaacaaaaaaccttgtatcatgtttgtttttatttataagttagccaatcccaattctgtttgctttattttcaaataaaaaaagatggaaattttgaggggtggtctaggggtgaatatggtaaaatggggctttaggccttatagctntttattaagaaataaattattttttttatttgggagggtaactatttattgaggcattgaggagatagtgaagtttggtttgcttcattctttcggggagggtcttggtgggannnnnn

SEQ ID NO: 20454 - DNA, 898 bp, Homo sapiens
  misc_feature 1, 2, 3, 4, 5, 6, 7, 8: n = A,T,C or G
nnnnnnnnaatttgagacagtctcaaaaaaaaaaaaaaaaaattggtcaatttccagtcttggcacagcagcagctaaccatctcctaccactgaatctcatggcacgcagctgtgcacatgttcctagagtggtttgcacacagcttgtaggagctaggggggcaaaaagtacattgtcctcaaaacgttagatctgtgctctgattcctaactgccactcgtgatcacagaggtgcagagagtcattagccattgttgcacttccattgttgcaagcccctcaccttctggttgaagtgacttccaggagaattaaagagctggtgtttccctccccactcccattcatttttctcattttccccttttgggagccagacataaacacaattgcatatatgagagaaatcagaaagtcatggcacagcctaggggatggtgcaggctcagaaaagacctctgagaagaccttagatttatacttcagactcatcttaggcaaagagggcttacaacaatcaaaaaaacaaaaataataaaaacagtaacaaaaacagcaaaccctggagaagaggaagaatctgatttccagagttaacacattagtaaattctaatgtctggttttcaacaaaaatatcacagaggatacagagaaacaggaaagtgtaacccattcaaatgaaacctaaagagactcaaaaaacaaaaggaatttaaagtcaagaaaattatttatgaacaaaatggaaatatcaaaaacagatagaaaacctaaaagaaaccaaaaagaaattctggagctaaaaagtacaataactgaaattaaaaattcacaagagggattcaaaggcacattgaacagttagaagaaagagtcagaaaacttgcggacgc

SEQ ID NO: 20455 - DNA, 1952 bp, Homo sapiens
  misc_feature 1, 2, 1952: n = A,T,C or G
nncgtctgataaggggaagctgtgacgcagacacgcacagtaatacacagatggaggctcaaaagacacgagtttcgcgtcctgaaattccgcttccagggccaagctttcttttctgatactgtttgtccctcgcgaggcaccgttgggtcgcgcagtaggcgtgactaggggcgggaagtggggcgggagcagggccacgcgtccggcctgggctgcggctgtcatggacgcctgggtccgcttcagtgctcagagccaagcccgggagcggctgtgtagggccgcccagtatgcttgctctcttcttggccatgcgctgcagaggcatggagccagtcctgagttacagaaacagattcgacaactggagagccacctgagccttggaagaaagcttctacgcctgggtaactcagcagatgcccttgagtcagccaaaagagctgttcacctatcagatgttgtcctgagattctgcatcactgttagtcacctcaatcgagccttgtacttcgcctgtgacaatgtcctgtgggctggaaagtctggactggctccccgtgtggatcaggagaagtgggcccagcgttcattcaggtactatttgttttccctcatcatgaatttgagccgtgatgcttatgagattcgcctactgatggagcaagagtcttctgcttgtagccggcgactgaaaggttctggaggaggagtcccaggaggaagtgaaactgggggacttgggggaccagggactccaggaggaggtctgccccaactggctctgaaacttcggctgcaagtcctgctcctggctcgagtccttagaggtcatcccccacttctgctagacgtggtcagaaatgcctgtgatctcttcattcctctggacaaactaggcctctggcgctgtggccctgggattgtggggctttgtggcctcgtgtcctccatcctgtctattctcaccctaatctatccctggctacgactcaagccctgaccttccggtacaggataaggaggggacctgaattggtgagatggaatcttagatcgtcccccatgtgccagcctcattcgaattctactctttggttaaagttagaaattcagagatttaggggtggaggaagagctttggggaagatgaggtaaggaaagatgactcgtgaagttaataggatgtctctaatttctagatgtgcctgagcttctgttcttttcctctttctttgtgtctctcttgaatatatttactttgtgtctcttaactctgtttaaggttctgtgtctatgcatctctctctttcttttttcaaccttctcattctcctatccagggatttaatcagcagaattactttttgataggggaggtataaggtttggcctgtaaggttctaactgccttcttttttctcacagaggtggcttatggcagatttttcctccttcaaactccaaacataatttttaagactatgtgccagtggactcttcccttatatctctgcaccacaagttgttggatgtttcctcttcctcccttatgtctacctcaccaacctcgctcatcatttggcccttatccttccttgtacacctaccttcagatttctgcttacactttgatttcagagctttattccccagtctgttcttactcctttgtcgcttatccagaatgatgctatgtgtagcatcttgctgtaaatcctgtacaatgattctgtgtaaatagctgtggcctatgccaataatgaagagcaagcctttcaggtaagcaaattaaagttcagtttgctcatcgaaaaaaaaggggggtcaaagtcccgggccatacgcgtcccgttgtaaggccaagaggttaaaagggggaacggagagcgtcttagacttgtggggaccgaacggaattgggtgcgggaggagacagagacgtgcan

SEQ ID NO: 20456 - DNA, 918 bp, Homo sapiens
  misc_feature 1, 2: n = A,T,C or G
nnacgcctaccttttccaccaatcctcccctattttttttccaaactctttccctatttcccccccctattccaggtgttcccatatccctccggccataaaaacctccaattaaaacagggcaccaaaccgcccatccaaattgccaggaaaaattttcaacagataatctcataaacacctagtcaaccatcctccagaatcctaatattgatgccccatttcaccagaagagttgcacaagccccctgcctcagttgtacagcctttcagtattggaccgagaacatgcaaatactgaaatcaaataacactccgtagatttcctactagttatatggtggtattccaatgagataaattcattttatcctatgtacttcaaccaatccatctcatgctcaaagagtcagctactatataccttgatcagaggtgtcctgtcttcacggtcgcagaggttaagctcacatcttctggacaccaggagatgtaccatttccggttggccagtggcacaggccaaatgtagggcggtcctttccttcctgtctctcttattgatgtcataacgcgtgagcagaacgaacttcagttcctccagatcacgatagaagacagctctgtggatccccttcagatgatacggtttaatggggtattggggaaataagaagccatccgagcacaagcggtccctgagggtgggccacctcttcggctccttgtcatccataatggtcggctgcaaattgtagcctgcagccgtatttcagctcgccttcggggatcgccgcctccgaagagcaacaacaggcaaagcagtctgtccacggaccttcgcacagactctcggcgcctcccgcctctcagcagaaacgcccaacagaagccccgcgcacctgcccgggcggccgc

SEQ ID NO: 20457 - DNA, 685 bp, Homo sapiens
  misc_feature 1, 2: n = A,T,C or G
nnccttggaaacattgccttcatctcagccccattcagtctttacttgttcacatcatactcttctttcaaaacccagtggaaaagctcaatttctcatgtagccttacctaactccatgcctccagaaagtcatgcaaactcatgccacaacacagccaacagcaacataccatcggcatggcactgagagcaagcaaaaaggacacggggtgacttcactgtctccacttgaagaacttaaggtctgtctgggtgaggggtgtacagtcttaaatattacagcaatcatttattagaaatattcatctgcttctaagttatataaacacttttaatgcaaacattcaatagggcatatttcccactgctctcaagatttcatctctttctgctgccgtaggcataaatggcttcactccgttctttcttctctgcatcacgatagaattccagaatctccggcagtttttgtacctcaagaagtaagtggaacacctttccctgtcatagttattttcatccagacatctggtggaagcatcagattccgacaaacaaggatttatgtcaggatctctcagcctctgtgttaccgagggcattctaacagtcttcttactccggcctccgcttcgccagcacccaggccgtctccagctccaaacacccccgccgcgtgggtc

SEQ ID NO: 20458 - DNA, 2289 bp, Homo sapiens
  misc_feature 2273, 2274, 2275, 2276, 2277, 2278, 2279, 2280, 2281, 2282,2283, 2284, 2285, 2286, 2287, 2288, 2289: n = A,T,C or G
ccacgcgtccgaaactttttccccggcgtggtctcactcgcgatttaaggcataggtgtcgccgagccgggaggctgggagtcgccaggcgtgcgggggagaggcctgggccgcgccgcggcggggggtggaggaagagggcaggcgaggcgggaaggtgggctctggccgccgggagccggggacggagccgccgccgttgcccctagcggggagcagccgggaggagggggccgcagtcgggagaggggaccccaccatgcccaaagtcttcctggtgaagaggaggagcctgggggtctcggtccgcagctgggatgagctcccggatgagaaaagggcagacacctacatcccagtgggcctaggccgcctgctccacgacccccccgaggactgccgcagcgacggcggcagcagcagcggcagcggcagcagcagcgcgggggagcctggaggagcagagagcagctcgtccccgcacgcccccgagagcgaaacccccgagcccggcgacgccgagggccccgatggacacctggcgaccaagcagcgcccggtcgccagatcgaaaatcaagttcaccacaggcacgtgcagcgactcggtggttcacagctgtgacctgtgtggcaagggcttccgtctgcagcgcatgctgaaccgtcacctcaagtgccacaaccaggtgaaaagacacctgtgcaccttctgcggcaagggcttcaacgacaccttcgacctgaagaggcacgtccgcacacacacaggcattcgtccctacaaatgcaacgtctgcaataaagccttcacccagcgctgctctctggagtcccacctgaagaaaatccatggggtgcagcagcagtatgcctataagcagcggcgggacaagctctacgtctgcgaggattgcggctacacgggccccacccaggaggacctgtacctgcacgtgaacagtgcccatccgggcagctcgtttctcaaaaagacatctaaaaaactggcagcccttctgcagggcaagctgacatccgcacaccaggagaataccagcctgagtgaggaggaggagaggaagtgaggagaaggaaggggaggacagacgttcacactgccacgtatgtctacgtggatttttggttttcagcttcccccaccccactggctcttcttaattagaagtgaccagttcacctctgtgtccttttgaaacatcagcagtagggtccattccaagattgtcagttaccgttagtgacgtcaggccctgtaacctgtgtcctgtctggcgcagttgctcacattcaccaaagtttgttttcatgatcctgatggccaagaacaccgtgtgggatttttttttcccccaaggattttcacacacggaaggagaggtatttcttagagagatcatcattttatggtgccttgaaataaaaatacttctacttgaaatgctgtttaagcaaggcaagtgaattttgttattctgaaagagtttacagaaactattttaataaatgaaatgttcttgtgaagcttttaaaagcaaaatggaacattgacctacagctctctgttcagggcttattgtgtgatgtttaacttcaggttattgaggtggggaggttgattactttatattagttgtgtgggtttgaagaagcagatcttcctctctttttttgtttttgagacaagttctcactctgtcacccaggctggagtacagtggcatgatcatggctcactgcaaccttgacctcccaggctcaggtaatcttcccacttcagcctcccgagtagctgggactataggtgtgtgccactatgcccagctaatttttgtattttttgtagagatggggttttgctagaatgtgtgtattcttgctgtccactgtttcttcttcttttagcattttaattagcagatagcatattatacatactgtttggaactttgcatttttcttttttttaattttaaattttaagtgttgtgggtacatagtaggtgtatatgcatttttcttttaatagtacatctagtggttctttccaaaatagtacaaaaaagtgttctcatacaaaaaaattagccgggcatggtggtgtgtacctgtagtcccagctacttgggaggctgaggcaagagaatcgcttgaaactgggaggcaggggttggagtgagccaggactgtgacactgcactccagcctgggcaacagagtggactccatcgcaaaaaaaaaaaaaaaaagtgnnnnnnnnnnnnnnnnn

SEQ ID NO: 20459 - DNA, 3213 bp, Homo sapiens
  misc_feature 1, 2, 3, 4, 5, 6, 3210, 3211, 3212, 3213: n = A,T,C or G
nnnnnnagagccgcatctattggcagctttgttattgatcagaaactgctcgccgccgacttggcttccagtctggctgcgggcaacccttgagttttcgcctctgtcctgtcccccgaactgacaggtgctcccagcaacttgctggggacttctcgccgctcccccgcgtccccaccccctcattcctccctcgccttcacccccacccccaccgcctggccacagctcaggatttgtttaaaccttgggaaactggttcaggtccaggttttgctttgatccttttcaaaaactggagacacagaagagggctctaggaaaaagttttggatgggattatgtggaaactaccctgcgattctctgctgccagagcaggctcggcgcttccaccccagtgcagccttcccctggcggtggtgaaagagactcgggagtcgctgcttccaaagtgcccgccgtgagtgagctctcaccccagtcagccaaatgagcctcttcgggcttctcctgctgacatctgccctggccggccagagacaggggactcaggcggaatccaacctgagtagtaaattccagttttccagcaacaaggaacagaacggagtacaagatcctcagcatgagagaattattactgtgtctactaatggaagtattcacagcccaaggtttcctcatacttatccaagaaatacggtcttggtatggagattagtagcagtagaggaaaatgtatggatacaacttacgtttgatgaaagatttgggcttgaagacccagaagatgacatatgcaagtatgattttgtagaagttgaggaacccagtgatggaactatattagggcgctggtgtggttctggtactgtaccaggaaaacagatttctaaaggaaatcaaattaggataagatttgtatctgatgaatattttccttctgaaccagggttctgcatccactacaacattgtcatgccacaattcacagaagctgtgagtccttcagtgctacccccttcagctttgccactggacctgcttaataatgctataactgcctttagtaccttggaagaccttattcgatatcttgaaccagagagatggcagttggacttagaagatctatataggccaacttggcaacttcttggcaaggcttttgtttttggaagaaaatccagagtggtggatctgaaccttctaacagaggaggtaagattatacagctgcacacctcgtaacttctcagtgtccataagggaagaactaaagagaaccgataccattttctggccaggttgtctcctggttaaacgctgtggtgggaactgtgcctgttgtctccacaattgcaatgaatgtcaatgtgtcccaagcaaagttactaaaaaataccacgaggtccttcagttgagaccaaagaccggtgtcaggggattgcacaaatcactcaccgacgtggccctggagcaccatgaggagtgtgactgtgtgtgcagagggagcacaggaggatagccgcatcaccaccagcagctcttgcccagagctgtgcagtgcagtggctgattctattagagaacgtatgcgttatctccatccttaatctcagttgtttgcttcaaggacctttcatcttcaggatttacagtgcattctgaaagaggagacatcaaacagaattaggagttgtgcaacagctcttttgagaggaggcctaaaggacaggagaaaaggtcttcaatcgtggaaagaaaattaaatgttgtattaaatagatcaccagctagtttcagagttaccatgtacgtattccactagctgggttctgtatttcagttctttcgatacggcttagggtaatgtcagtacaggaaaaaaactgtgcaagtgagcacctgattccgttgccttgcttaactctaaagctccatgtcctgggcctaaaatcgtataaaatctggatttttttttttttttttgctcatattcacatatgtaaaccagaacattctatgtactacaaacctggtttttaaaaaggaactatgttgctatgaattaaacttgtgtcgtgctgataggacagactggatttttcatatttcttattaaaatttctgccatttagaagaagagaactacattcatggtttggaagagataaacctgaaaagaagagtggccttatcttcactttatcgataagtcagtttatttgtttcattgtgtacatttttatattctccttttgacattataactgttggcttttctaatcttgttaaatatatctatttttaccaaaggtatttaatattcttttttatgacaacttagatcaactatttttagcttggtaaatttttctaaacacaattgttatagccagaggaacaaagatgatataaaatattgttgctctgacaaaaatacatgtatttcattctcgtatggtgctagagttagattaatctgcattttaaaaaactgaattggaatagaattggtaagttgcaaagactttttgaaaataattaaattatcatatcttccattcctgttattggagatgaaaataaaaagcaacttatgaaagtagacattcagatccagccattactaacctattccttttttggggaaatctgagcctagctcagaaaaacataaagcaccttgaaaaagacttggcagcttcctgataaagcgtgctgtgctgtgcagtaggaacacatcctatttattgtgatgttgtggttttattatcttaaactctgttccatacacttgtataaatacatggatatttttatgtacagaagtatgtctcttaaccagttcacttattgtactctggcaatttaaaagaaaatcagtaaaatattttgcttgtaaaatgcttaatatcgtgcctaggttatgtggtgactatttgaatcaaaaatgtattgaatcatcaaataaaagaatgtggctattttggggagaaaaaaaaaaaaaaaaaaaaaaggaggagggctaaagtacccggagggcagttaacgttcccagttctggacatgggccaaaggggggttaaagaaggccgggggtttaaagtcggggggaacgcgtggttcgggaagccttcctggggccattggcaccagaataagtcacggataatacttttggacccttttgtgatgtcttaaannnn

SEQ ID NO: 20460 - DNA, 966 bp, Homo sapiens
  misc_feature 1, 960, 961, 962, 963, 964, 965, 966: n = A,T,C or G
ntgggtcccgggcccgaccgggcaggtacccgggggagcccttaaagcagttgttgttggttgggggccttttggccggtgacggagactgcccaggtgtggtcaccatgttcctctccgcggtcttctttgccaagagcaagtcaaatgaaacaaagagtcctcttcgtggaaaagaaaaaaatacgctccctttaaacggtggattgaaaatgactttgatttataaagagaagactgagggcggggatactgattcagaaatcctgtagcgtgtaataaaagaagaggaaatggcatggaatcactgcctcctgtgatttgaaggccattgtgaaggaaaacaatgcagtgaaagaaagttcttcatattaggacagatatcattgcatcacatttatttatctttctgggtatttttatagcccttaataaaaaatattaaaataaaaacaaaaaaaaaaagaaaacattggtggaccaagcattgaacgccacccaagaaaagctttccttaaaaacacccaactcatatagagagagcgggaacccaaaaatggaactattaaaccatagcgaaaacatgaccaatagacaaactacccaggccaccacaaaagaagatagggttcaacaccaaataaaaaaaacgcccagggggacacaagactatcagaaaaaccacaagagggaccgagagcacaaacaggacctatcaaaaggggacaaagagggccaaataaatacccagcaggagggtcggatacatagaaaagcgagagagaaaaagatgaaaaaaaagagacaacaggcgaagacaacacgacaaaagtgaacgaccgagccagcaaaagcagtgaagccaataaaagtcacaagagagacaaaccacaatacaaacgaagaacagtaaagacagagagaatgaatcaacaaagaatcacaacaacaaacgaggannnnnnn

SEQ ID NO: 20461 - DNA, 1068 bp, Homo sapiens
  misc_feature 1, 58, 61, 66, 1068: n = A,T,C or G
nccagtgaggcctgggcaatccggctcccgcaattttgctccgggtcaagcgatttcngcntaacntctgagaactggaccccggcactgccaccacaccagtcactttgcatccggttgggtcttctgagtttaccctatttagggttctttgagcctcttgaatatctagattcatgtatttcatcaaagctgggacattttctaccattatttcttcaaatattatgtccctttctctctttcttctccttctgggactcccctcatgcatatactggtatgcttgatagagtcccagaggtcttttatgctctgttcatttttcttcattctttttcctttctgctcctcagactgtataatcttaattgacctatcttgaagcctgttgattctttcttctgacttctccagtctgctgctgaatacctctagtgaattttcagttttagttataatacttttcaactccagaatttctatttggttcttttctacaatttcaatctctttattgatattctgtattggatgagacattgctttcctaatttttttgttctctgtccatggtttcctttagctcttctagcatatctaaaagagttgatgaaaagtctttgttttgtacatccgaagtctgtgcttcttcaggggtagtttctattaatttctttttttacctgtgtatgggccatacttttctggtttttccttgtcatgtaatctttgctaaaaatgtgacattttgaatagtattataatgtggtaactctggaaatcagattctcctccctccccatagttcattgttggtacttgttatggttaccactgtttggtaacttttctgaactttataaagtctgtattcgttgctgtgtgtgaccagctgagctcctgttctgttagcttaatttgcagctagtgatccaaaagagaaacagatttccttaaatgcctccaaaggactgattcttgaagaacttcaacatttggtagtggagtagacaaggacgactctgagaactttcacatgaattttctttcaccaacggacttcan

SEQ ID NO: 20462 - DNA, 1281 bp, Homo sapiens
  misc_feature 1, 2, 1271, 1272, 1273, 1274, 1275, 1276, 1277, 1278, 1279,1280, 1281: n = A,T,C or G
nncctcagcctcccgagtacctggtttacaggcgcccggtaccacgtccggctaatttttcgtatttttagtagagacaggattcaccatgttggtcagcctgatcttgaactcctgacctcaagcgccaccatgcctggctgaatcagtaattttagtagagatcgggtttcaccatgttggccaggctggtcttgaactcctgacctcaagtggtctgcctacctcggcctcccaaagtgctggaattacaggcgtgagcatcacgtctggcctaatttttttaatcgaatttatttttgtaatgatagatgcttgtcttattcctagggaaatatttgaagtaattgagatgctgtcacctaaaataatcaaaaggctcctgattcagttaaaagaattcatttaagtacagagtgtaagcgagctacaccaaagaatggtgattagcgctcccagggtggggaaaaatgaggattgtttatataggcaaaatggaggtgccaaacagaattataacattttcggaactaaggctcatttaaagatacaaatttgattggctactattgattacacttgaagggatttgtttaacttccttttgtaaagaagtaacagtcataaggatctctcatctcccagtcatttagtctagttttgaataaagaatagggggtctggttaatatatacatctaaacacaaaagtcagaaagaataaaagtagtgatgttacacgagccagctgtcagtgcctaacttttccctttggcctaatgcatttggaaggtcctgaaattgtattttctttttacattgcctatgtatgtgtaagtcttcttcaggtcagttcacgctgttaaatatacgtgcgtatacatacatactatgtatgtgcgtttatgtgtgtctgtgtgttttttttttaacagacgaagcttcacaaaagatgtctaaggtaagatcatacttcatgtatctacagcataaggagaaattgctttatgttttcagactgttgacagtcgggacttatatgattcattatttttaatacaactgatacatttgattcattaacacaaagagttctaatttagttgtctttttttttttttttgagacgggagtcttgttctgtcaccaggctggagtgcagtggcatgatctcagctcactgcaacttctgcctcccacgttcaagcgattcccctggctcagcctccggagtagctgggactgcagacacgtgccaccacgctggctaannnnnnnnnnn

SEQ ID NO: 20463 - DNA, 759 bp, Homo sapiens
  misc_feature 748, 749, 750, 751, 752, 753, 754, 755, 756, 757, 758, 759: n = A,T,C or G
gagtcgacccacgcgtccgcggggccctggagaggatagcttctatccataggcaggttgttctgccgtctctacaggtctctgaagctcttagcagagagggtagctcctccctgttgctggtcgtcccaccctctgctcagttctggctgagcctggggcattttacgggcctcgggggaggaagtgcatacttactggcctggaaaaggcaccagttcccactcctacaggtgggactggcagcctggccctcagccttcaggccctccctgttcatggcttccaggcttacccccctgctttgatctgagagctggtgccaatagcagggagaagccaagctgcagaggcaagcacttccgagcctgcaaaagcaggcccccaaaagtgcagggatgcctgagtctgcacccgcacccaggagggtggagatcttgcctgctccaaggctgcagccggaatgatagcaggctgactggagcacctgccaccatcattagttcaagagtttatgcagatttaagttgtatacggtatatgaatgtgtgacagttttccttatggttgtgtggccttctgtaagagcctacgcctgtttgttacaccggtagagtgctgtggaatgtaaactttccctatgtcacttatctcctttatctctccatacagaggagggcaagaaaccttgttacttgaactttagtaatgttaagtgatcaataaatctataaataaatgatagcannnnnnnnnnnn

SEQ ID NO: 20464 - DNA, 1825 bp, Homo sapiens
  misc_feature 1, 2, 3, 4, 5, 6, 7, 8, 9, 10, 11, 12, 13, 14, 15, 16, 17,18, 19, 20, 1823, 1824, 1825: n = A,T,C or G
nnnnnnnnnnnnnnnnnnnnggaggacttttgtacacatattttgtagtgtcacatatatgttttaattttgaattatacataagggaaggtgggggaagggcatcatcttctcagagctactttcctctgaacctggaaatgactggaactaatattactttgtgaagtgtccatttaccagaattgttctctgtagagagcaacttttgactgtggtaatgtaattcttgcactaagaactatgtgtactagtctcaaaagctggggactctgagccttacctagagtctcagcaggtggaccattaagattaacatttctagtaggtgagttcaatcacaaaaatatttcttgttccatagattttattgtggccatgtcagtgaacacccacaagttttgctcagaatattttaggtgtaagctaaatccctaaattgttcagagttcccacagccctgtagcagcagagcgagaactttaaccagactttttcaatcccaaagctaatctggaggccaacagtgttcaaaaccttggtgactgaggaaccatttagagttttttcaggctcaggaatcacatggtcgttgttgggcttggggtaagtttcacaggcgatgaagctgacgttgagtcacttgacttctggagccataatttattttctcccagcaacctcctactggggattctcatgtttatggatacagtttggcaatcactacattgaatgtagtcttttaaaaaaattaacttatgctattagttgacccatcattgctaattttggcccacacagtgtttgcattacaaaaacctgttctttacttcctagtcttgtttcagtcttaatatcagaagttcttgagttcaatttttgcacaacatgtcatccagggatggctagcttgtttgggattcatctaaactgctggcaatatctagacaaaaacattccacagtccagctaatatggttgtcacaactcttgaaaagggcccaacatctggatggcaagtgaaaatgtgatcagggtttaagaactacccgctaataaataaacatggagctatttccatgtcttgggtgttgtgtttctaagaagagacagcctttccatcagaaaatttctggaagggaagaaaaagaacagttttgatgaattcgctttgcaaatcatcatccaatgttctttgtaaccagaaaggttttcttctgctttcttgcagctgttatactttctgctgagtgccctgggcctgacggtctgtgtgctggccgtggcctttgccgcccaccactattcgcagctcacacagtttacctgtgagaccacactcgactcttgccagtgcaaactgccctcctcggagccgctcagcaggacctttgtttaccgggatgtgacggactgtaccagcgtcactggcactttcaaactgttcttactcatccagatgattcttaatttggtctgcggccttgtgtgcttgttggcctgctttgtgatgtggaaacataggtaccaggtcttctatgtgggtgtcaggatatgctccctcacggcttccgaaggcccccagcaaaagatctaacattcttgctcaaagttgcgagagaaagtagcacatggagtaggctgcactgtcggtgttaagagaaattactctcacaagagcagaggcctgaagattctttcttctgtggagcaaatgaatacagtgactcgtctgtgagctgaggcttgagcaattccagcccaggaggctctccggcctgggaacagagtgggattttttgtctgaggaggctgagtcnnn

SEQ ID NO: 20465 - DNA, 849 bp, Homo sapiens
  misc_feature 1, 22, 79, 84, 90, 841, 842, 843, 844, 845, 846, 847, 848,849: n = A,T,C or G
nagaggaacacaggcgctgagnatggagcagctttggagacccacccgacctgcagccctgacatgagcgcctggatanctggngctgangccaagactagacaccccaagtagacggctcacagcaaccttttacctcttgtttacgccccgtgccctcgctctgtccactgatatgggtttataattttctgaaagttacccactgaagcccatttctccgttgagtcatcttgtaatttccagctttctccccgctaaggaagatatctagtgttggggatcctggcccctcaacctcctgtggaacccagcagttctgttatatcccctgctaccctagatgaattaagacggttaaatactgtgtggaacttttattagataacacactttttattagataacgcttaaaggaagtcagtacataaaactgcccggtgctgtgtcccgtctagttgtttccatgttggcttgagaacagaaatctttgtgggagttagccgggaaagggctccagttcatggcgatttagggtagtaatacattttggtgttacccagatgctttctagaacgggttctttctcatccctgccaagactcttcccggggcccccattcgaaagccccgtccccactcccaccgcggggccagccgctgcgtgtgggcaaggccttaaggaaccggacgtatgggtccgggattttttgtctgaccttcaacctaatccgtgggggtttggggcctgcgcggggcacgcgcatgcgatgaccgttggatgggtcggcgtcactgcgctgcgggtgaggacaaggacgtggctgccgactcgcccaannnnnnnnn

SEQ ID NO: 20466 - DNA, 448 bp, Homo sapiens
  misc_feature 1, 2, 3, 95, 96, 97, 98, 99, 100, 101, 102, 103, 104, 105,106, 107, 108, 109, 110, 111, 112, 113, 114, 115, 116, 117,118, 119, 120, 121, 122, 123, 124, 125, 126, 127, 128, 129,130, 131, 132, 133, 134, 135, 136, 137, 138, 139, 140: n = A,T,C or G
  misc_feature 141, 142, 391, 395, 447, 448: n = A,T,C or G
nnnacttgtcttagcttgtttttcattttctatctgaaactcttgacaatattttcattttctatcttgtttctatcttccaattttcttctaannnnnnnnnnnnnnnnnnnnnnnnnnnnnnnnnnnnnnnnnnnnnnnncatgaagccttggagaaatttctttatgacactggcctgaagggcaatcacacactcaccaaaatccttcaatttctctaatgaaatgaaaaaggcttcaaattctgatgtttcttccacatatccaagtcctcctttttgtaaccttgttgcaacttcaatgagatcactacgaaggaagtttaaaagctcctggttgccatcacaagattttagacccaaatttggcttcggtgctagatgaatagngagnataatgtcctggtacctcggccgccaccgcggtgtgctccaataaaacctann

SEQ ID NO: 20467 - DNA, 1235 bp, Homo sapiens
  misc_feature 1, 2, 3, 1235: n = A,T,C or G
nnnctattcaacaaacaatgttgctcccagtccacatttccttcccctattctcagcctacaagtgcatttccctggatttacccccttttttgagaaatcggtatttctaaactaaaattcttagcacctgatattagtgccatttatttaattaaaaaaaaaaggaaggggaaagagatcatggccaaaaaaatagtagttaaccccacccacccccaaagctctagccagtcatgtgagcatcacccacatcccactcagtgcctgatattcggatggtggcatactctgccccaggagactgcctgaaggcacggggcaatgggtgccaattttagctctcagcaggttagtcaaccagacaaactggtgggctaaagtccagaaattctttccaggttttctgctcattggctgagcacatacaaactgtcataagcctgtaaaatttaaggggagttggggtggggcgtaagagcaaaaggacagcaggagaagagaaattacgggtcacccaagtttttcctgggctagtggctctggatatagatttaaagagaggtcagagtaaatggactccaggtttcttatcaaagaaaactatccctcaatgaggagctgagatgtgccatgcaagagagttcttcctgcagaggcacaggagaaagggcagctgactctctcatgtggagagagtggcgaggaaggtcttctagtaccatgaagtaagacaggcagagggagaatcctgaggtttgggccaaatgtgagactggtacacacacagttaaagactaaaaagccatcaggaaccctcaaagccaaattctatctgcacactggctctacaaagttcgcagcaagaatctcttgcaccaagtcaagttagtggcctggctatgatggatggtggggagggcaatacatttttattttcagagggatgaggtgggaagaacagccatgatctagtaaaaagagacctgcaagaagcagaaaatatttagagaacattttaatatatattttcatatatatatttaaagttaagaaaaataaaactaattcaagccatgccctgtgcaaaaaaaaaaaaaaaaaaagaaaaaagaaaaaaaaaggaaaagaaaacaaaaatttaaagtgagacgtttgctgctctggtctcaatttaagaatcacacccacccggccgcggacgcgtgggtcgacgcgggaatccgggaccggtan

SEQ ID NO: 20468 - DNA, 5720 bp, Homo sapiens
  misc_feature 1, 17, 5708, 5709, 5710, 5711, 5712, 5713, 5714, 5715, 5716,5717, 5718, 5719, 5720: n = A,T,C or G
ncgtccgctcccctggnacacacggagggctcgcccgcgcggaggaggatgcggcagatggcgcctgttgtgacaggtcattgaaattatgagactatcattcaaatggaagcattatagttcttcggaaccattatgatctcaaaacgaaaggagaatgatacagatacactggctgaggtgttttgaggtgcatcgaagtgttccaagctgtgacttaccttaacatgttcttgaagtaccatggcgtggattaaaaggaaatttggtgagcggcctccacctaaacgacttactagggaagctatgcgaaattatttaaaagagcgaggggatcaaacagtacttattcttcatgcaaaagttgcacagaagtcatatggaaatgaaaaaaggtttttttgcccacctccttgtgtatatcttatgggcagtggatggaagaaaaaaaaagaacaaatggaacgcgatggttgttctgaacaagagtctcaaccgtgtgcatttattgggataggaaatagtgaccaagaaatgcagcagctaaacttggaaggaaagaactattgcacagccaaaacattgtatatatctgactcagacaagcgaaagcacttcatgttgtctgtaaagatgttctatggcaacagtgatgacattggtgtgttcctcagcaagcggataaaagtcatctccaaaccttccaaaaagaagcagtcattgaaaaatgctgacttatgcattgcctcaggaacaaaggtggctctgtttaatcgactacgatcccagacagttagtaccagatacttgcatgtagaaggaggtaattttcatgccagttcacagcagtggggagccttttttattcatctcttggatgatgatgaatcagaaggagaagaattcacagtccgagatggctacatccattatggacaaacagtcaaacttgtgtgctcagttactggcatggcactcccaagattgataattaggaaagttgataagcagaccgcattattggatgcagatgatcctgtgtcacaactccataaatgtgcattttaccttaaggatacagaaagaatgtatttgtgcctttctcaagaaagaataattcaatttcaggccactccatgtccaaaagaaccaaataaagagatgataaatgatggcgcttcctggacaatcattagcacagataaggcagagtatacattttatgagggaatgggccctgtccttgccccagtcactgccctgctgcctgtggtagagagccttcagttgaatggcggtggggacgtagcaatgcttgaacttacaggacagaatttcactccaaatttacgagtgtggtttggggatgtagaagctgaagctatgtacaggtgtggagagagtatgctccgtgttgtcccagacgtttctgcattctgagaaggttggagataggtcccagcaaccagtccaggtttcagtaactttggtccgaaatgatggaatcatatattccaccagccttacctttacctacacaccagaagcagggccgcggccacattgtcagtgtagcaggcgccatccttcaggccagttcaagccacgtgccccctttgggcttttgctctaacagccatgcaggttccacgcctgcccgcgcaaattcaaccagtgtcacatcatctacaccaacagtggtatcctgaactaccgtctttttgctaagactcaaacggcttgagtgcagcaaaaagttgacaaaaaaggaaaaaaaaatgaacagtcttttgtggtttattgggaaacttttcataccaggtgatactattctaaaaccccgttgtctccctgcaagtgctgatttgaaatgcagaagccacagtaaaaaaaaaaaaaaaaaaaaaaaaaaaagaaaaaaaaatcaaaatgtataaatattggaaatcaagtttttcagctgttttgttggttggttggttggtttttgtttggttttgtttaaatgggcaagaagtaaataatgtggctggaatacaagttgaacaaactagaagacacaaatctaacatagtttttatggaccaaggaacttgtatattgtataagctttagtaaaaggtacattttcaccatacctttttttatatcacggtattatagtacaccttgttaccaaataggttgttctcttccccacccacctttgagcttttgctctaaaatacattcaggttccaagcctgaccatccttgtttaatctatcatactcttccaggttttttttttttggtctaaggctggaacttttttcttttttttcagctgaagtcttatgacttttcatgagtcaaaattgtttggatttcagcaagtcaaatcttgcaaaggcctgcatattttttttaagattatatgaagtctgtgcaaaagctttaaaaaaatgcctctgccttgcctgcaatacatgcaatgtatgttaacttagtctctcttctcagacactgttggtagttatttctgtgttttcctttttttaaaaaaaaatatggacttattgtggttatctgagaggttctaacattcacatgcaatttggtgtggccatttagctattaatgagttaatggcgcagaacttgttgatatttgaagtgttctctccccttttcccatgacgtaaatacataggtgtgttccaggatttgttcaggtttttcccccctcctaatcttgtacataacttgtattatgtgtaagttaaacattttattttgaacttggaatgttcccagtgatttcattcagcagggtattttctgccttgttggcaagtgacaaaaaatatgggaagtatttgctaccagttggtagatggtgcccttaatggtagaatgaggaaaatgtccgcaaaagcatgttttattatctttacttttttggggggttggagggggtagcctagccagaacatcattgtaatcttaaaacataagatgcttttattagatgatcaactaaaatagctggaagacagtactttagaaacagatagttgtaagattataaaatgcaaatgtaacttatgttttcatttttttctctgccttttttgtttgtttgttttctcttttccagtactgagcatctccacaaatgtctcctaactcagaaaatgtttcttttcttttcagttgagatttggttgcattcagggttgtaggttggccttgcttgctaaccccgccggttttaccgtgctttcattcctgaactttgtttatgcctttgtttggtttcttcgaaattgcagcagactcattgggctacatttagtacaggaaccacgtgtgtaatgttatacaacacagtctagtaatacaatcatccctcttagagtaaaaactacctctagattgtggtaagcttttactgtcccataaaacaggagccacagtaccttatgaatgcaaaactgtaacttcctacagtgtttccctacagaacattgtctttctggtgtcctgggctgttttgaaaaagtttccattaatagactttttagaaattattattagtagcattttttttccagctttgctgtcttcatcactcactctatgctcagactatgccactgtaaatattcttcctaacatctttaaatcgccttttcctcagttttcaaggggaaggtcatttgtaaagcacgttaggtggttaaatcagttattgcggttttctcttactgcaagcctttttaatcacccccaggctgcattttattctatatcgccttttttcttcaaatctgctccaatcactcacttctctcttataagctaatcctgcctcacaccttaaatctgtttcagtgatcaagggcagaactcattgtggccttatctttctttgttgtaattgttcactgtctctttcttacagaccacttatttctgagtagtagttattcctctctatggagtcatggcaggaatcattacacagtgcttttgttcagagcatggacatgttcctagtgctgctttgctttaacggccacaagtttcctccacttcctaggtttggtatttagttaaggaatcatattaaattaaccaataacaaaagagatacttttgaagaacaaactattccttacccatttttgtagctcaaaaataatttttcaagttcatgaccttattaaaatgaacttgtgtttttttaacaaacgtgtatgttttattttgatagtttctttccgtaagataattgaaatattatactgtaaacccttttcttttctttttttgaaaagtccaagaatgtacttatacaggcatttttccccacctatttttggccattctcataccacagactaaagagtgaaatgatttgtccattgtagcttattgtttatcagtagttcttttgtcagctgcttacattttttctttcatggttttgtgaatcattttcagtatgtaatttataggaaccttgtcctctggttatagtagactgtgtgccctcctccagtgatggcattattagacatgctggtcatttaccctcagaaagactctcttattagaatggtgagtgcttcagttatagtatgtttgaatttttaaaaaattctgttttagaaatgtatcttatgctctcatgactatgcagtttctaaacatacacatagaagctgagtctctgatccaatatgtttttatttgttccatttaatttatcacatagattgggaaggcaagctaaaagccttaaaaatgccctttatattttgagtgatttcagcgttgaacactagtatactatctaaatttgctgctcactttctttaaactgtggcaattaaaggcatgtttatacatgacttaatcgtgaaatgtttgtcactcttactgcacagacttatctgcaatcataactggttagtttttttgttttgttttgttttattgtttttaatgaaactggtaccatctgtgctttcacaaaaaacttccaatgccatttttgagaactaacctaactagtcatgctaaccagaaaatccactggggaggaggttccttttgaaacaaaatgctgttcagttagtaaccaagttactttgattgcaaaagcagctgtgtttctgataagtactgaacaaatgtgtgtaattttctgtgccagacttatgactttgttttcaagcactgtaatgtgggatggatggttagaaacaataatatattagggtttctgtttaaccctttcaggactgaactgtatctccttttgttaattttcccctgtgttgtgataaatgtttgccagcattcagtactgtgttggtccagatgtaggtttatatgctcatttttagcttatttcttgtaccttgcagcatgctctacgcattcagtccttaaggggtttattttacaaactgtgcgcctgtaaggtttattagcaataagatagaaaattgagcaagtttataccataattttgtagaaaaaaagaatctgctcagttccatatttcatccgtgaaaaacttgcaatacgagcagtttcaaggaataaataaaaaggaaatgtaaaccattgtaaaagtcttctgtcgaatgtgcctgatgcatgtattatcgtcttttatttcagaatacttcataaagataaaattaaattctatannnnnnnnnnnnn

SEQ ID NO: 20469 - DNA, 2187 bp, Homo sapiens
cccgaaaaaccgacccaaaaggtttaaggaggccttcccgctttgttaaccaaacaaggttaagggaaaaatcctggcaacccagtgtgggaaattataagggcccctgggcaaaaaccctaccaacgccgagggggttaaggtcctggggaaccccaaaaaatatataaaataaatggaaagggggtggattttgagccttttctgcccatgctgcaaacagtggccaagaacaaggcccagggccacctatgagaattaaggcgaaggacttcgggtgtttgacaaagaaggaaaaggccccgtcatgggtgctgaaatccggcatgttcttgtcacactgggtgaaaagatgccagaggaaaaagtaaagatgctggtgggcagcggcatgaggacagcaactggttgtatcgaactagtgaagagctgagtccgcatggtgctgaagtggctgaggatcttcccaggtctccccagagtccgtgcctttccctggtgtgaacttttgtatctagcctaaagtttccctaggctttcttgtctcagcaactttcccatctccatctcgtctccatctcgtctcttctcttgtacatctcgtctcttctctagtatacaagagaagagacaagatgggaaagttgctgagacaagaaagcctagggaaactttaggctagatacaaaattcacacagggaaaggcacggactctggggagactgggaaggtcctcagccattcagcaccatgcggacgagctccgccccatgggcccgtcaccccgacaggatatgcctcacaaacgcttcatagttgatacaaccattgctgtcctcatgccctgccaccagcatctctacttcttcctctgtcatcttctcacccagtgtgacaagaacatgccggatttcagcacccatgacggtgccatttccttccttgtcaaacacccgaagtccttcgacataatcctcataggtgccctggtccttgttcttggccactgtctgcagcatgggcagaaagtgctcaaggtccagcaccttcacattcatctctgttcggtcaaacagctggaaggcctccttgaactctgagcagtcagatgaatgtcaacacaggatttgagggttaatccaaaccctacctcagagctctgctgcccattcaactttgatcatgctgaggaaacgagatatctgcaccaaactgtacaccaaagtctacttaagagggctctatttctcttcctcccaactcaagtgttctatatagaggcttcctccccttctggcagcctggtaacatccatttacacaacccctctgcctgcggcaggcctgccaatctccactgctgctactacacttctcagggcaggaattcgccaccgcccagtctcagtcctgtccttataaggaagtgggagcagcagcctgggactagggtcatcccaacctgccacttcgcacccctccagtataaagagaacttccagagggtatagctacagtcatatccttagcaaactcccctgtcttgtccccatctgcacagaatatcaggtcactgctctacaatcttcacaactgcaagctgggagggcggggacagttatcacaagaggagaaaagaggcagaagtagctgattaaaggacaaaggaaagcaggcagctttatacaccctcccgagaccccacacacagcaggcattaagtgaccaagttttttcacatacccacaccacctaaaactcacccagtgcttgggatcagatctagagtggaaggggagggaggaagaaagtgagaaaagaaaatggaggatccagaagaagagaaaataatccagggggtaatctcatgggggtgctaaagagatgacagattaagattagaggataggtgctggggggagggtgtccctctccctaagggtgacctcggtagggatcagagataacctacctgcggtctggtcttcggtgaagtcacactgctcagagaagagggaagtggtcagcatctgaacgccaatcccccgagtttctatcccagccccacaaactctgacccacaaactctgacccacaaactcctgtttcaggctgcagactcgcttccccgcagggccccagtctttccaaccccacctccaacctttcgggtcctcacggacgcgt

SEQ ID NO: 20470 - DNA, 9778 bp, Homo sapiens
gccttgtgccttctggaggatttctctctagctcgactcactctggactgactcgctccctggctttctcagttcgttttgggagataacttgttttgctccaagccgcatccgttgaccccttacagtcggatggtctagatgactgaatggagttttgagttggacttttgtgtccctgacggagttgggcctgatcccagagcactgggggtggggaggaggtgttactgtaaaatgcaagttggataaaaggaggacctctcgccaagggccccaatgagtggcacacagtctactatcaccgacaggtttcccctcaaaaaacctataaggcatggaagtattttgaaccgagagtcaccaacagataagaagcagaaagttgagcgcattgcatcacatgattttgaccccacagatagctcctccaagaagacaaagtctagttcagaggagagtagatccgagatatatggtcttgttcagcgttgcgtaatcatccagaaagatgacaatggatttgggctgacggtcagtggagacaatccagtcttcgtacagtctgtcaaagaagatggagcagccatgcgggctggagtacagacaggtgatcgaatcatcaaggtgaatggaactctggtgactcattcaaatcatctggaggtggtgaagctaatcaaatctggttcctatgtagctctcactgttcagggacgcccacctgggtcgccccagattccacttgccgactctgaagtagagccgtcagtcattggacatatgtctcccatcatgacatctcctcattcacctggagcatctgggaatatggagagaatcactagtcctgtgctcatgggggaggaaaacaatgtggttcataaccagaaagtagaaattctgagaaaaatgttacagaaagaacaggaacggctacagttattgcaggaagattacaaccgaacacctgcccaaagattgctaaaagagatccaagaggccaagaaacacattcctcagctgtcaagagcagttatccaatagccacaggctctgctcaggatggagctgtagttacaccctccagacctttaggggacaccctaacagtcagtgaggcagaaacagatcctggagatgtactgggcaggactgactgtagcagtggagatgcttctcggcccagtagtgacaatgcagatagtcccaagagtggcccaaaagagagaatttatctagaggaaaacccagagaaaagtgaaacaattcaggacactgacactcaatcacttgtcggaagtccctcaacccgtatagcacctcatattattggagcagaagatgatgattttggtactgaacatgaacagatcaatggacagtgcagctgtttccagagcattgaattactaaaatctcgcccggctcatttggctgttttcttacaccatgtagtttcacaatttgaccctgcgactttgctctgttatctctattcagacctgtataaacataccaattccaaagaaactcgtcgcatcttccttgagtttcatcagttctttctagatcgatcagcacacctgaaagtttctgttcctgatgaaatgtctgcagatctagaaaagagaagacctgagctcattcctgaggatctgcatcgccactatatccaaactatgcaagaaagagtccatccagaagttcaaaggcacttagaagattttcggcagaaacgtagtatgggactgaccttggctgaaagcgagctgactaaacttgatgcagagcgagacaaggaccgattgactttggagaaggagcggacatgtgcagaacagattgttgccaaaattgaagaagtattgatgactgctcaggctgtagaggaagataagagctccaccatgcagtatgttattctcatgtatatgaagcatttgggagtaaaagtgaaagagcctcgaaatttggagcacaaacggggtcggattggatttcttcccaaaatcaagcaaagtatgaagaaagataaagaaggggaagaaaaagggaagcgaagaggattccccagcatcctgggacccccacggagaccaagccgtcatgacaacagtgcaattggcaagagccatggaactacagaaggcgcgccaccctaagcacttatccacaccctcatctgtgagtcctgaacctcaggactctgccaagttgcgccagagtgggttagcaaatgaaggaacagacgctggatacctgcctgccaattccatgtcttctgtagcttcaggggcctctttttcccaggaaggagggaaagagaatgatacaggatcaaagcaagttggagaaacatcagcacctggagacaccttagatggcacacctcgtactctcaatactgtctttgatttcccaccacctccattagaccaagtgcaggaggaggaatgtgaagtagaaagggtgactgaacatgggacaccaaagccctttcgaaagtttgacagtgtagcttttggagaaagtcaaagtgaggatgaacaatttgaaaatgacttagagacagacccacccaactggcagcagcttgttagtcgagaagtgttactgggactaaaaccttgtgaaatcaaaagacaggaagtgattaatgaattgttctacactgaaagagctcatgttcgaacactgaaggttcttgatcaagtgttctatcagcgagtatccagagaaggaattctgtcaccctcagagctacggaaaattttttcaaacttggaagatattcttcaacttcatattggattgaatgaacaaatgaaggctgttcgaaagagaaatgagacctctgttatcgatcagattggggaagatttgctgacatggttcagcggaccaggagaggagaaattgaaacatgctgctgctaccttttgcagtaaccaacctttcgccctggaaatgatcaaatctcgtcagaaaaaggattctcgatttcagacttttgtgcaagatgctgaaagtaatccactgtgtcgtcgtcttcaactgaaggatattattcccactcaaatgcaaaggcttactaagtacccacttctgttggataatattgccaaatacacagaatggccaacagaaagggagaaggtgaagaaagctgcagatcactgtcgtcagatcttaaattatgtaaatcaggctgtcaaggaggcagaaaacaagcagcgcctagaagattatcagcgtcgccttgatacctccagcctgaagttgtcagagtacccaaatgttgaagagctcaggaatttggatttaacaaaaaggaagatgattcatgaagggccattggtttggaaggtgaatagagataaaactattgatttatacacgttgctgctggaagacattcttgtattgttacaaaagcaggatgatagactggttttaaggtgtcatagtaagattctggcatctacagctgatagcaaacacacgtttagccctgtcattaagttgagtacagtgttggttcgacaagtggcaacagataacaaagctttattcgtcatttccatgtcagacaatggcgctcagatttatgaactggtggcacagacagtttctgaaaagactgtctggcaggacctaatctgtcggatggctgcatcagtgaaggagcaatccacaaagccaattccattaccacagtcaacacctggcgaaggagataatgatgaagaagatccttcaaaattaaaagaggagcagcatggcatttcagtcactggtttgcagagtccagacagagatttgggattagaatctaccttaatatcgtcaaaacctcagtctcattcactgagtacctctgggaaatcagaggtacgtgatctgtttgtggctgagagacagtttgcaaaggaacaacatacagatgggacactaaaggaagttggagaagattatcaaatcgcaatcccagattcacacctgcctgtctcagaagaacggtgggcattggatgcactaagaaatttgggtttgttgaagcagttgctggtgcaacagctaggtttgactgagaagagcgttcaggaagactggcaacatttcccaagatacagaacagcctctcaggggccgcagacagacagtgtcatccagaactctgaaaatattaaggcctatcattctggtgaaggacatatgccctttagaactggaactggtgacattgcaacttgttacagtccacggacttcaactgaatcttttgctccacgggattcagtgggactggcaccccaggatagccaggcaagtaacattttagtaatggaccacatgattatgaccccagagatgcctaccatggagccagaagggggtcttgatgacagtggagagcacttttttgatgcccgtgaagcacatagtgatgagaatccatcagaaggtgatggagcagttaacaaggaagagaaggatgttaatttacgcatctcaggaaactatttgatccttgatggctatgacccagtgcaggagagttccacagatgaggaggttgcttcctcacttaccctgcagcccatgacaggcatccctgctgtggaatccacccaccagcagcaacattctcctcagaatactcactccgatggggcaatttcaccattcacccccgaatttctggtgcccagcagcgctggggagctatggagtattcctgttttgagatccagagtccctcctcttgtgcagatttcacagagccagatcatggagtacattcataagatagaggctgaccttgaacacttaaagaaggtggaggaaagttacaccattctttgccaaaggctggctggatcagccctcacagacaagcactcagataaaagttagagccgcatgtcctggaggtgactgcaggttgttggatttggagtatcggccgtgtctcaccacatcctggctccagtgtggatgcagagagagtgtgacagaggatctgcctgtgaaccacctgggattagtcaagtcccaaggtgcccagagtgggactagttcttcacagtgtggcagctgcactaatctgtttgtgagggaatatccattccctcactctactctcctcactatcggaaattcattttgattcagaataaaaaccaaatgtatagagctttgggtgtaggatatgaaattgtacttagatttaagaaaaagagaaaatcagatgtatttatttgacttcattccgtatttgaaagcacattttaatttttatttgccttgttttgttttaattgagtagtgagagttttagacctttgtctttagtacacccaaggatcaactgctcctgaagcaaagaggtcaggatggagtatgcagaagttgggtagagaggttaagaagaggaggaagtgagacggggaagggaggagcaccttgcttcactatacagtattccaagctctctgctgtccagtaggctgcttctctgagggtcacctcaaaggtatgctatgccgtgtggctcttatgtgcccaggtggtgtggtcagagagtggatgggcttcctcccgccctgaggcaagcacctcttctctgtagctgggatcaaccacaattaataggaatcctcaacatactaaatagcaggcacttgaaaatgggtgtgttttcttccattgtcgtcttttctattgagggttgggattttgggtgggagaggaaagcaaattttattttcttgactataaatttgttattcttggtatcatttcatttttataattatacattagacattggcacttgtgtaaaactgtccctgcagattgagcaggaagtaaaaacaaatggaaatgcttcggatagtggcaggggtgggggttgctaaggaaagggtgggatgggagtgggtaaagagtttgggaaggttatctaactgaatcactactgagttgaatcatggctatcattagccacaggtactgctgattataaggccagtaaaattttagtacctggaggtttgactctaatttttgcactgatggtgccaaagggccctgagtcaaaaggatagccaagggtggagtggaaaaagatatggtgaaggcagaactgctcacaccagctccagaagcacgtcctctgacttcactgccgcagctctttccacacggggccgtgattgaccctaaaaattgcagaccagcacatacactggacactgcaggcaaggtgttggtaactgcctgctctaggatgaatagtagcgttagcagcaccctacagagggtaagtttcagaattgtaatttgagaactccttcaattatattgactttctttggttttccttgtgcattaggtatatattttttgaagtatttttgccaactaaaatgaagtctgtaaattctgttaataaacaaggagttcatccgttgctcacatctttcattggtgccctctgaactctgtgggttgctaggatgtaattttaatgcttccctgcagtccaaagatgattttttcaccacaaatggtaagggatgcccacctacttttataaacaccactgcaacttaacaagtttatttatctatgtccagatttctgtttctgtcctaaattgatctgtgtttttaggtggatcaacttggatctttagacctcatctataaattgaaattatatttttagtcataagccaagtacaatctaactcagaatgggattaaaaattttagaagcagaagctaatatataaatgaagtttgggatttggaactttctgtatctcttaggaggaacaagtaaaaaccaaatggttacattgtgctgctagaaataatgtcattctcaattaaaagggttacacctgtagccacttgacactaacaccatcgagggcaattaatcaggagaaaagtaaatataaaaactttgctcttaacgtcacacactacagggtaattatgtaattctctagcactcaattaagaagcttgtaggttagcaaaatttcagtttctctagttcagccagtgtcttgtccttagtaattatttgctttccctgcagttcaatttctccttggaactctaacaggactaactggaaaaatactttgaccatagctctagtacttccaaataaattcatatctagattttcaaacaaagccccaagatgaagtctaattctgaaaatatctcacaatttttgaatgttctttttatcttaccgacctaacttctcttttccctcccaacttggcctcccacacgttccatttcattttggccattatagtcacatccgtttgactttggttgtgacatcttcctttcaggatgatggaattagatgcagtctgtctttgagtgagactggtcaccatcagaggagttttttctaagtgacgtgactagaagttgaaatctacttccctgctaaagggcacaggggtggtgtacaaagaaagctaccttcccagagcaagcaggctgcattttagctatggaagtgacctgctgtgacactgtgctctcttctgtgggcttaatggttcctttgctatgaagtggcaaattacatgtagagtgtctccttccttttcagagaacagttaatcaaggcaaatcagcaagcccccaaagtgctgtaatttaacatcatgattaccaccttcgaagctatatattttgcatactttaaaatcacctaacttggactgcttgaattacattggcttttagaaccgaaattgtaactatgtattgtatttcatgggaggtatattttatgagctttttggctttcttttttcccacagcaactgccaatgaaggatgaatcccctttttaaaaagttgttgttgttgttgtttatttgattttgagttaggagggataatagagaagtccatttaaaaattatttttagaagctaaagaaagtaattatgcttcctgtgaattgtcttttactggcatctttgttttcctctttgatgttagtaaatttggtgtaatacgtggggcttccatatttcaaagtggaagctttcttctctgaagtcgatatatggttttgaattactagagctttggtcagtatttccttccctatatgtcacagagggcaccactgagaactgcgtgcataggacctcaaaatacaaaattagcagggcctcacagtcagcttcctcatggctagtttttcccccttatattacaatttttgttttataagtcatttttttcctgatatttccaccacttttcagagtcatctacaaaatttttctttcctcaagaaaagagttccttttgccttattccttatgccttccccactggtattgagggttttgataataaattggtaggaaaaaaaagtacctcctagaaggaagccttccccaccatttccaggtgccaactgctaagcagatatattccaaaaatggtaactgtcatgtgcacactgttggttatttttaataagcctcttcctactagaacattttattttccttgttcaccatacaatcatgtactctttaacagaaattgcttttaaaaaatatctggaactatctttaaaaaaactttattaataatcatgtatttttactgatcacattttgaaatgcctaaaagactttattgttctaattatccagatgtacctttgtaaaatagctcttttatgaattagctgataaggctgtatgtttctggaacaaaatattggtcatctaaaaactttctgttttctggggtctgggaaaatagaaaataagatttcaaatattaaataagcttaaaggaaccaagcatgtgacttttactttgtattctggttgatttgtcttgtccaagttatattagaaaagttgaggagtcgaggagcctgtaattaattttcctgtcagtgactgtcagacatcttcctgcttattagagcatccctagcaacaaggctaaaccttcatgacagtgctggcaggtgggcttgccctagcatgtggggcaggtttgttgtttttttaatagctttattgagatattcacatatcatataattcatccatttaaagtgtataatcagatgggttttggtatattattgatttttaattgtggtgaaatatatatataacaaaatttgctattgtaactatttttaagtataaagttcagtgaggtaggccagcttttatgacgcacctgaagataactttggttttaatcctaccctaaatgaagcatatgcctctatttttcctgtccccagtgctgggcttcttcacataccaacatttctgtgcttttaccaacagcattttagctcagaaggctcgcttactttgggcatttgctgtattttggttttgaaatacttgtaatttgacttattcttgggataatattttagttttcagtcattcaagggcacatttggctgacggagctaataagcgtaataaaatgcttagtagtttataccatcttttagttaaacattttaaagattaagactattcaaatgtactttgcggaaattaacctgtttgtatgcctggctttgtttacaaacatatatctatatctatatatatagatacagatacagatacatatctggtggaacaaagaaatacctgtaccattcccacttgctctttgatagccacctcctaggaatggagacaataaaactctgtatttgcatg

SEQ ID NO: 20471 - DNA, 2451 bp, Homo sapiens
  misc_feature 1, 2450, 2451: n = A,T,C or G
naggggtcaggtacgaggcgcgtcccacgcgtccgggtttccagaagcgctgccgccaccgcatcgcgcagctctttgccgtcggagcgcttgtttgctgcctcgtactcctccatttatccgccatgataagtgccagccgagctgcagcagcccgtctcgtgggcgccgcagcctcccggggccctacggccgcccgccaccaggatagctggaatggccttagtcatgaggcttttagacttgtttcaaggcgggattatgcatcagaagcaatcaagggagcagttgttggtattgatttgggtactaccaactcctgcgtggcagttatggaaggtaaacaagcaaaggtgctggagaatgccgaaggtgccagaaccaccccttcagttgtggcctttacagcagatggtgagcgacttgttggaatgccggccaagcgacaggctgtcaccaacccaaacaatacattttatgctaccaagcgtctcattggccggcgatatgatgatcctgaagtacagaaagacattaaaaatgttccctttaaaattgtccgtgcctccaatggtgatgcctgggttgaggctcatgggaaattgtattctccgagtcagattggagcatttgtgttgatgaagatgaaagagactgcagaaaattacttggggcacacagcaaaaaatgctgtgatcacagtcccagcttatttcaatgactcgcagagacaggccactaaagatgctggccagatatctggactgaatgtgcttcgggtgattaatgagcccacagctgctgctcttgcctatggtctagacaaatcagaagacaaagtcattgctgtatatgatttaggtggtggaacttttgatatttctatcctggaaattcagaaaggagtatttgaggtgaaatccacaaatggggataccttcttaggtggggaagactttgaccaggccttgctacggcacattgtgaaggagttcaagagagagacaggggttgatttgactaaagacaacatggcacttcagagggtacgggaagctgctgaaaaggctaaatgtgaactctcctcatctgtgcagactgacatcaatttgccctatcttacaatggattcttctggacccaagcatttgaatatgaagttgacccgtgctcaatttgaagggattgtcactgatctaatcagaaggactatcgctccatgccaaaaagctatgcaagatgcagaagtcagcaagagtgacataggagaagtgattcttgtgggtggcatgactaggatgcccaaggttcagcagactgtacaggatctttttggcagagccccaagtaaagctgtcaatcctgatgaggctgtggccattggagctgccattcagggaggtgtgttggccggcgatgtcacggatgtgctgctccttgatgtcactcccctgtctctgggtattgaaactctaggaggtgtctttaccaaacttattaataggaataccactattccaaccaagaagagccaggtattctctactgccgctgatggtcaaacgcaagtggaaattaaagtgtgtcagggtgaaagagagatggctggagacaacaaactccttggacagtttactttgattggaattccaccagcccctcgtggagttcctcagattgaagttacatttgacattgatgccaatgggatagtacatgtttctgctaaagataaaggcacaggacgtgagcagcagattgtaatccagtcttctggtggattaagcaaagatgatattgaaaatatggttaaaaatgcagagaaatatgctgaagaagaccggcgaaagaaggaacgagttgaagcagttaatatggctgaaggaatcattcacgacacagaaaccaagatggaagaattcaaggaccaattacctgctgatgagtgcaacaagctgaaagaagagatttccaaaatgagggagctcctggctagaaaagacagcgaaacaggagaaaatattagacaggcagcatcctctcttcagcaggcatcactgaagctgttcgaaatggcatacaaaaagatggcatctgagcgagaaggctctggaagttctggcactggggaacaaaaggaagatcaaaaggaggaaaaacagtaataatagcagaaattttgaagccagaaggacaacatatgaagcttaggagtgaagagacttcctgagcagaaatgggcgaacttcagtctttttactgtgtttttgcagtattctatatataatttccttaatttgtaaatttagtgaccattagctagtgatcatttaatggacagtgattctaacagtataaagttcacaatattctatatccgaacctgtaattttcaggtgcatgtaaaggaggtcggatgattgacatttaagattacaattttggcgagnn

SEQ ID NO: 20472 - DNA, 1190 bp, Homo sapiens
  misc_feature 1, 2, 1188, 1189, 1190: n = A,T,C or G
nnccttaattaaattaagctcccccccccggggagcagggcggggcctgagcactaggcggcggcggctggcgtggggctgcttagatgcgccacggtttcggtagcgacggtagctctagccgggcctgagctgtgctagcacctcccccaggagaccgttgcagtcggccagcccccttctccacggtaaccatgtgcgaccgaaaggccgtgatcaaaaatgcggacatgtcggaagagatgcaacaggactcggtggagtgcgctactcaggcgctggagaaatacaacatagagaaggacattgcggctcatatcaagaaggaatttgacaagaagtacaatcccacctggcattgcatcgtggggaggaacttcggtagttatgtgacacatgaaaccaaacacttcatctacttctacctgggccaagtggccattcttctgttcaaatctggttaaaagcatggactgtgccacacacccagtgatccatccaaaaacaaggactgcagcctaaattccaaataccagagactgaaattttcagccttgctaagggaacatctcgatgtttgaacctttgttgtgttttgtacagggcattctctgtactagtttgtcgtggttataaaacaattagcagaatagcctacatttgtatttattttctattccatacttctgcccacgttgttttctctcaaaatccattcctttaaaaaataaatctgatgcagatgtgaaaaaaaaaaaaaaaaacaaacacacaacttctctcacgtacgcgccatcagacagatctctaggaacaccatgcgtagggagccagcgggcccaaacaggacagagacgcaaatggtgcagcgagctgcctccaagaagaagaccaggtgcacaagaccagaggggcttagaagtcacacctagaaagaacagcacgcagggggacccagagcgtcagtcacaaccggaaggggagctgaaggcagtcgctggcactgaaagacaggcacaagcgatacaaaaaccacacgacctagacgagtacaactgacccgcagtcgtacatagccgagtagagcaaaacaacaacgaagcgagcagcagtcacaagcatgcgacgcacagagctaggcgagcgagcagaacttaggccacgcgacttccagtcgtccccgtcgcnnn

SEQ ID NO: 20473 - DNA, 434 bp, Homo sapiens
  misc_feature 1: n = A,T,C or G
nagacgtgtccactcctggactgagagagaccagcattttttaaaatgccagcttttccactgacacaaggggggttttttcagatggcccccctggcactactgctgaggtctccaggacagaagtcacctcctctggtagaacatccatccctggcccttctcagtccacagttttgccagaaatatccacaagaacaatgacaaggctctttgcctcgcccaccatgacagaatcagcagaaatgaccatccccactcaaacaggtccttctgggtctacctcacaggatacccttaccttggacacacccaccacaaagtcccaggcaaagactcattcaactttggctcagagatttccacactcagagatgaccactctcatgagcagaggtcctggagatatgtcatggcaaagctctccctctctg

SEQ ID NO: 20474 - DNA, 1149 bp, Homo sapiens
  misc_feature 1, 2, 3, 4, 5, 6, 7, 8, 9, 10, 11, 12, 13, 14, 15, 16, 17,18, 19, 20, 21, 22, 23, 24, 25, 26, 27, 28, 1148, 1149: n = A,T,C or G
nnnnnnnnnnnnnnnnnnnnnnnnnnnnaggggacacggtctatccgcaagctgtggattctgccattctcatcatagttttgaagccggggttctgaaatctcatgacagatctccagcttgaactcacggaatggtttttctaggccctgctcataatacagctgcaggtaaccagtgtctgtcagtttgacgaagatcggtccccagtgcctggaggacatgatgtttttcttctcagggatcctcaacatcattggccacccgtcacgaggctgggaccgtgctgatccaggcgggtgagcatctagttcaatccaggctactgggtcatcatcaggtagagttgcactgccaaagtgatcagggtcatcaatttggagttgtttgagtttttcaacagcatcagagtgtgactgggttttgcttgaatcatcaaaactgatggcatcctggtagatgacaatgagggaatctctttggctttcgcccgtggtactggaaatggaactgttttgggagcgcctctcctgctcctcaaagaaagcactgaaagggttgataggggagggctgtacatcctgcagagtctcattcaggaaagggttggttgccctccaaggtggagcctcagttacagaaggcgtgcggtttaaagaggaaatatccagcttctgaactttggagaagttcatcaaagtgctcttgggacggtccctcttcttaaatgatcccattgaattataaggtacatctgggatcacagatgcacttggtggtgtatttggcttcagaggagaggtgactggtggtaaagggcagctgacttcattgtcatcaaaggtgacccagctgggaaaacgagcagaggtcactggaggggcagggtgcccattcatggctggactgctggcctgccagctgatggcctccatctctacttcttcatcttcttgaagcgaggaggaattgtcttggggcgctgtggccccctccggaccctcgccggggttctggctcctcttgggctggggtgagggtggcgaggggtccaggcggtgggtgcgggtggaggtatgctccgagcatgcttgaacaggactcactgccgtctgcctgcctgtctgccactccggacgcgtgggtcnn

SEQ ID NO: 20475 - DNA, 540 bp, Homo sapiens
  misc_feature 539, 540: n = A,T,C or G
acgcgggggaagaagaggaagaagaagaagcagaaggaatggaaagcctggagaaagaggatgaaatgacggatgaagcagttggagactctgctgagaagcctccttctacttttgcctcacctgagactgctccagaagtggagaccagcagaactccaccagcctgtgaaaccacgaacccttcaatcaagaaaagacctttgatcaggagaagacttctcgtctcatttctggggacacattcaggatttctccaaagcaggtgaaggtacgctcgagcgtggtcattgaggacaagtcgacgagagatcccgagtacatctacagtcagccttacgtctgcaggtgtacccaacagctccgaagagacagcgaccatcgagaacgggccatgatgacgatggcggttttgtcgaaaagaaaagggggaaatgtggggaaaagcaagagagatcagattgttactgtgtctgtgtagaaagaagtagacatgggagactccattttgttatgtgttaagaaaaattcttctgccnn

SEQ ID NO: 20476 - DNA, 801 bp, Homo sapiens
  misc_feature 801: n = A,T,C or G
acttcttttttttttttgtggaggacttgtgcttctctgcccatatttcagtgttgatgttcccagagttctatccttactctaaatgatctccatttttgagcttatccacacagtggactgtggtttcctggtctttgtccttctgcctaggacgttctttcctaggtatccacatgcctgctctcattattttcatgtcttaactcaaaggtcaactttgagttaaggctttctatcactacatttaaaattgtgtgacctttcctgtctacccagcttgcctgatattttcttctccattgcacttttcttctgacttcttagatgaggacaggacttaaaaaaattgtatttttattttctgctgtttccccaaaatatttttcttgttttgtttcttaaagaccatgtcctgttctgtcacccaggctggagttcagttgctcagtcatagctcactgtggcctcaaactcctgggctcaaaccatcctcctgcttcagcttcctgagtagctgggactgtgagcacatgccaccatgtttggttatttatttatttatttatttgttttttgggtagagacagggtcttgctttattacccaggctggtcttgaactctcaccttgacttcccaaactgttgggattgcaggcatgaacgccgcacctggcctgttgatttggggtggagcgttctgaaattgaggcagtaattaatagcctaccaaccaaaaaaagcccaggaccagacagattcacaactgcattccaccaaagttacaaagaggagctggn

SEQ ID NO: 20477 - DNA, 1457 bp, Homo sapiens
  misc_feature 1, 2, 3, 4, 1457: n = A,T,C or G
nnnnaggtgacactatagaagagctatgacgtcgcatgcacgcgtacgtaagcttggtcgattggcggccgtccgggcaggtaagcggggggatttccgctgagtgacccttacaagtccttcttgatcctgaactgggttaggtgccgctgttgctgctcgtgttgaatctagaaccgtagccagacatgggactggaggacgagcaaaagatgcttaccgaatccggagatcctgaggaggaggaagaggaagaggaggaattagtggatcccctaacaacagtgagagagcaatgcgagcagttggagaaatgtgtaaaggcccgggagcggctagagctctgtgatgagcgtgtatcctctcgatcacatacagaagaggattgcacggaggagctctttgacttcttgcatgcgagggaccattgcgtggcccacaaactctttaacaacttgaaataaatgtgtggacttaattcaccccagtcttcatcatctgggcatcagaatatttccttatggttttggatgtaccatttgtttcttatttgtgtaactgtaagttcacatgaacctcatgggtttggcttaggctggtagcttctatgtaattcgcaatgattccatctaaataaaagttctatgatctgcaaaaaaaaaaaaaacaaacagaaaaactttgggcgcggctgggcctcagaaagcttttaaccattgttggggcggggccatttttgcattggcatcgggcccaggaacaccggcagcttgttggttccccaaaaaacccgggccgggttgaaaaccagagtggtcgggcacgtctaacagcgccggctacaccccctggcggggaaaaaacaccactcacaaacaccgtaaatgagcataaactgaacaaaaaaaagcaaaagagaaacaaacacacaaacagcaagagacacaacgacacgaaacgaaagaaacaacagcaaaagagaaagaaaaaacaagaaaaagagagaagatagagaggaagagagagaagacgagggagacgcggacagagagggaggggaggggaggcgtgaaagaaggggaacagggagacaggagaagaaggggcagggaagggaaggaagaaaggaagaggggagagagggaggacagagcgcggacgagacagaagggtaagaagaggggagaagcggaggagagggaggaacagaaaggggcaaagaggcacggagggcgagaaaggagaagagaaggcaggacaaggagcgcggccacggggcgacaagagcaggagccgaagaggcggagaacgagacgaagagaaggaggaggaagagagcgagggaggcgacaaaggagagggcgaggacgacgagaggaaggaagaagagagcagaaagaacaaaccaagaggaaggagtggagagacagacagaaggaagagagagccaagagacn

SEQ ID NO: 20478 - DNA, 772 bp, Homo sapiens
  misc_feature 727, 737, 752, 767, 768, 769, 770, 771, 772: n = A,T,C or G
catgtcatttgttattttctttaatttgtgaatatgtgtggggttgggagactgggtgctagacatgagctgaggtccaggctaggcacagggagctgacagctgcaggacatgctaattggtctgggaaggcctttggaatctagggaattggctttctgagctgaggcggggtccaggcaaggagaagctcccgcggtactacaagaacatcggtctgggcttcaagacacccaaggaggtgcggggaacctcagaagaaagaaggggaacctggcgttcctgcacgtgtgcccacgacgagttgccctgcctgcatctaagtggcttctggggctgctgggaattgtagttgcttccctgaggccacgcccctggctcttttaaggaaccgcccgcccaaggctcactcctttatctttcctatcctttcaggctattgagggcacctacattgacaagaaatgccccttcactggtaatgtgtccattcgagggcggatcctctctggtaagtgcgggagttactggtgtctggggcctgaaatactgaaagaagggtcttggggcccagactcctgggtcctgggtgagaggggtggttaggaatgcaaacttgtaggtccaggtacattggcagatgatgtttgttttcacgatggtcttcagatgcccacgtgggcactgctgagaaagccactttggtaaaaactgatggccggaaatnggggtttttngggatcccttgcttnagctggtttttgagnnnnnn

SEQ ID NO: 20479 - DNA, 3011 bp, Homo sapiens
acacgagccccgcgcccaccaccccagctggcgacgtggctccgcggccccggcttcccccggcagctcagcgaccaatgggcgcgcaagcggggccgcccgcagcttcccagcccgaggccccggcgcgcccctctgctccggctcggggcgggcactggcggagggactggccagtcccctcctccgcgccggcccaaccctgtcgctgccgccgcgctccgagtccccgattcccgagctgccgctgttgtcgctcgctcagcgtctccctctcggccgccctctcctcgggacgatggcgcgcggtggccgcggccgccgcctggggttagccctggggctgctgctggcgctggtgctggcgccgcgggttctgcgggccaagcccacggtgcgcaaagagcgcgtggtgcggcccgactcggagctgggcgagcggccccctgaggacaaccagagcttccagtacgaccacgaggccttcctgggcaaggaggactccaagaccttcgaccagctcaccccggacgagagcaaggagaggctagggaagattgttgatcgaatcgacaatgatggggatggctttgtcactactgaggagctgaaaacctggatcaaacgggtgcagaaaagatacatctttgataatgtcgccaaagtctggaaggattatgatagggacaaggatgataaaatttcctgggaagaatacaaacaagccacctatggttactacctaggaaaccccgcagagtttcatgattcttcagatcatcacacctttaaaaagatgctgccacgtgatgagagaagattcaaagctgcagacctcaatggtgacctgacagctactcgggaggagttcactgcctttctgcatcctgaagagtttgaacatatgaaggaaattgtggttttggaaaccctggaggacatcgacaagaacggggatgggtttgtggatcaggatgagtatattgcggatatgttttcccatgaggagaatggccctgagccagactgggttttatcagaacgggagcagtttaacgaattccgggatctgaacaaggacgggaagttagacaaagatgagattcgccactggatcctccctcaagattatgatcatgcacaggctgaggccaggcatctggtatatgaatcagacaaaaacaaggatgagaagctaactaaagaggaaatattggagaactggaacatgtttgttggaagccaagctaccaattacggggaagatctcacaaaaaatcatgatgagctttgatagacactcaccagaatatggcagactgtcataggcattctgttattgtcttggattgttgctacaattgtctaatttacagcagttgtgatcccacaaaaagcaagtttatacctcagattggggtataaaaattgtttttcgctcagtatttactggaaaatggacatcactagtctttcagtaagatttctctcaaaacacgtgaaaaccttggtaaattgcaattctttctggggatatattggtacaacatgacttaaaactttttttttttctattaaaacttaaaggggaacaaaacttgaaaaagccctgttcttcagaaggtgagtgggttgagggaggcagtaatatgaagtgactgctgtgtattttaactaccagattttttatatttgccactgttaaatagttggaaaggggaaattctgattaagcgaaagtggtatcatcctaggtaagcttatttcagaacaagtctaatatttcagattctttcttttcgactttatactctgagttattacttactgtaagtggtgtatatgaaacctccatgcattttccagtatggatctgctaatatgcacagtaaatccatgtctttgtttgtttttctattaaaaagcaatcaagaaagataatgtgaaaaagaaaggaatttagaggtagggaaaagatgaatgtcagacatttgaagaactatagtaaaatgataaacactaaatatacttgagaaaactttcttaatatgccaatgaggtaggcctgatctttgaaatagtgaataggaatacaatgcatttcctcagtgatcactgattagaatgagttggtgggatccttgggaagccaaacggagcggagttctggatcatgtcccatccagtccagtgaatccacgacccgcagacctgcccccccgcaacagcttataccatggaatgaggacaaggtgatactctgagctgtggactgaactggcagacacaacaacctgtacagattgaaatttcaccttgtaaggaggaagtgaatgaataagcgtacagttcagtgacattaagcacattcacattgctgtgtaaccatcgccaccatccatctccagaacttgaaataaatggttttgagtagattttggtttttaattgatttagcattgtatgtccttgtagccctggtacaggcccaagctggaaaataagagccccaacttccatctgaatacttggatttttcatgcttgtgagaggctcccatagttccctgaattcatctagaaatagcaactatcgtgtcaagcaaatatttttcattcaaccagcctactccctgggcttcaaatcctttcatatgaggaacaaagccaaacaccagccagttggtgattgctgtttaggtcactcttcagtgctgttcctcagcattcctgtatctatacgcgggcatggcctcaccgaacacaatacagagtggtccagtgcacagttgcttttgagttctgtaataactggtggtgcctgtaaaagtcccagtgctttgggaggccaaggcaggaggattgcttgagcccaggagctcaattttttttttgaagcaaggtctctcacctagattggagtgcagtggtgtgatctcagctcactgcaacctccgactcccaagtaaaagcgattctccagccttggcctcctgaatagctgggagtaca

SEQ ID NO: 20480 - DNA, 1086 bp, Homo sapiens
  misc_feature 1, 2, 3, 4, 5, 6, 7, 8, 9, 10, 11, 12, 13, 14, 15, 16, 17,1083, 1084, 1085, 1086: n = A,T,C or G
nnnnnnnnnnnnnnnnnccgtacttcattgagaacagatttatttttagtgcatttttatagcaccttgcctactacaaatttctggaatgtactcaatataaagagtgaaaaagaaaatataagcgattcaaatatatactttgacataaatgtaggacagttctatgtcccattcaacgtcatgaaaggtatagtagttggtgggtaaatagaaaccctgttgtactctgttgctgactaattgtggttaccttacttatcaataatattagaagtattatgctcacatttttcacctgtgggtacaaggaagcctggttgaagtcttttccttgagaggcctggatttgttcacatattcagatttcaactggctttataacaggtttccttatgtgcctcatattggctccaggttcactgggtttaaaaggagccaaagcaccataaggttttggcaaaggaagagtggcatctgcttctgggatgtaggcattcggacgctgctctgcagttgtgtaaacaccattgggcagctggcgattatctgcttccaagaactcctgagacttttcagcgatggccaaggcgtgcatttcttcatctcgaaggactttcaaccattctttctcaatttccttattgagtggcagacctttttctatcctggaattgcaagtgaagatgaagtcttctttctccctgacttccttttggagttcaatggttagggcttgtttcatggacagctcagcaacaagagccatcattttctcagttgcatttttgatccttctttgatagccattcatcttcttggctaagagcagtgtgtcctgcttgcagccctgagttttgctgcagagcctgtctgtgagcctggagacctgctcatagatgaaatccttctccagcagcttctcctccttcttggccagttgtagttccagcttgtctaatttttggatcatttctttttcggtcagatctttccctggaaggaagcgagctctattctcaccatcaggctttacgaactgtttctccaggtctttaattctgtctgtacactgtgaaaacnnnn

SEQ ID NO: 20481 - DNA, 2843 bp, Homo sapiens
  misc_feature 2842, 2843: n = A,T,C or G
cacgcgtccgccgcgcccaacgccccgcgcccagcgatccaagcggcccctctagccccggcggctcctttgtgccggccccgaacccgccctctcgggccgagtccctgcccctggcgccggcgattggccaccgggccgctagagggcggggcgcacggccgccggggcgcggtatatagtaaaggtagggcgggcgcagccaattcctcgcctccgggcgggagtgccggtggcgccccgcagtccgcttgtccgtccttccctctctgactctcctaccccgggcctgtctctgcagaggtcaggggaggcgggggcccagcacacgtccccagtggcagcgggagcggcagctacgggttcgcggagcccccgaccccccaagggctagaggagcgctcggcggaccaaagaaagcccgcgagcggctgcgcgcccaccaataggtgcggggctcggagccgcgcagcctgcgccgtccctccctccgcccccgccccgccgccgccgccgccgccgccgcctccccctcctcctgctcctgccttggctcctccgccgcgcgtctcgcactccgagagccgcagcggcagcggcgcgtcctgcctgcagagagccaggccggagaagccgagcggcgcagaggacgccagggcgcgcgccgcagccacccaccctccggaccgcggcagctgctgacccgccatcgccatggcccgcgggaaagccaaggaggagggcagctggaagaaattcatctggaactcagagaagaaggagtttctgggcaggaccggtggcagttggtttaagatccttctattctacgtaatattttatggctgcctggctggcatcttcatcggaaccatccaagtgatgctgctcaccatcagtgaatttaagcccacatatcaggaccgagtggccccgccaggattaacacagattcctcagatccagaagactgaaatttcctttcgtcctaatgatcccaagagctatgaggcatatgtactgaacatagttaggttcctggaaaagtacaaagattcagcccagagggatgacatgatttttgaagattgtggcgatgtgcccagtgaaccgaaagaacgaggagactttaatcatgaacgaggagagcgaaaggtctgcagattcaagcttgaatggctgggaaattgctctggattaaatgatgaaacttatggctacaaagagggcaaaccgtgcattattataaagctcaaccgagttctaggcttcaaacctaagcctcccaagaatgagtccttggagacttacccagtgatgaagtataacccaaatgtccttcccgttcagtgcactggcaagcgagatgaagataaggataaagttggaaatgtggagtattttggactgggcaactcccctggttttcctctgcagtattatccgtactatggcaaactcctgcagcccaaatacctgcagcccctgctggccgtacagttcaccaatcttaccatggacactgaaattcgcatagagtgtaaggcgtacggtgagaacattgggtacagtgagaaagaccgttttcagggacgttttgatgtaaaaattgaagttaagagctgatcacaagcacaaatctttcccactagccatttaataagttaaaaaaagatacaaaaacaaaaacctactagtcttgaacaaactgtcatacgtatgggacctacacttaatctatatgctttacactagctttctgcatttaataggttagaatgtaaattaaagtgtagcaatagcaacaaaatatttattctactgtaaatgacaaaagaaaaagaaaaattgagccttgggacgtgcccatttttactgtaaattatgattccgtaactgacttgtagtaagcagtgtttctggcccctaagtattgctgccttgtgtattttatttagtgtacagtactacaggtgcatactctggtcatttttcaagccatgttttattgtatctgttttctactttatgtgagcaaggtttgctgtccaaggtgtaaatattcaacgggaataaaactggcatggtaattttttttttttttttgttttttgttttttggctctttcaaaggtaatggcccatcgatgagcatttttaacatactccatagtcttttcctgtggtgttaggtctttatttttatttttttcctgggggctggggtgggggtttgtcatgggggaactgccctttaaattttaagtgacactacagaaaaacacaaaaaggtgatgggttgtgttatgcttgtattgaatgctgtcttgacatctcttgccttgtcctccggtatgttctaaagctgtgtctgagatctggatctgcccatcactttggctagtgacagggctaattaatttgctttatacattttcttttactttccttttttcctttctggaggcatcacatgctggtgctgtgtctttatgaatgttttaaccattttcatggtggaagaattttatatttatgcagttgtacaattttatttttttctgcaagaaaaagtgtaatgtatgaaataaaccaaagtcacttgtttgaaaataaatctttattttgaactttataaaaagcaatgcagtaccccatagactggtgttaaatgttgtctacagtgcaaaatccatgttctaacatatgtaataattgccaggagtacagtgctcttgttgatcttgtattcagtcaggttaaaacaacggacaataaaagaatgaacacaaaaaaaaaaaaaaaaacacacctcgatctgtcgccggacgcgtggtcgacnn

SEQ ID NO: 20482 - DNA, 4243 bp, Homo sapiens
  misc_feature 4237, 4238, 4239, 4240, 4241, 4242, 4243: n = A,T,C or G
cctatagggagtcgacccacgcgtccgggcgccccggctccgcccagcgcgcatgctcgcgcgcgggggctgaaattcaaatttgaacggctgcagaggccgagtccgtcactggaagccgagaggagaggacagctggttgtgggagagttcccccgcctcagactcctggttttttccaggagacacactgagctgagactcacttttctcttcctgaatttgaaccaccgtttccatcgtctcgtagtccgacgcctggggcgatggatccgtttacggagaaactgctggagcgaacccgtgccaggcgagagaatcttcagagaaaaatggctgagaggcccacagcagctccaaggtctatgactcatgctaagcgagctagacagccactttcagaagcaagtaaccagcagcccctctctggtggtgaagagaaatcttgttcaaaaccatcgccatcaaaaaaacgctgttctgacaacactgaagtagaagtttctaacttggaaaataaacaaccagttgagtcgacatctgcaaaatcttgttctccaagtcctgtgtctcctcaggtgcagccacaagcagcagataccatcagtgattctgttgctgtcccggcatcactgctgggcatgaggagagggctgaactcaagattggaagcaactgcagcctcctcagttaaaacacgtatgcaaaaacttgcagagcaacggcgccgttgggataatgatgatatgacagatgacattcctgaaagctcactcttctcaccaatgccatcagaggaaaaggctgcttcccctcccaaacctctgctttcaaatgcctcggcaactccagttggcagaaggggccgtctggccaatcttgctgcaactatttgctcctgggaagatgatgtaaatcactcatttgcaaaacaaaacagtgtacaagaacagcctggtaccgcttgtttatccaaattttcctctgcaagtggagcatctgctaggatcaatagcagcagtgttaagcaggaagctacattctgttcccaaagggatggcgatgcctctttgaataaagccctatcctcaagtgctgatgatgcgtctttggttaatgcctcaatttccagctctgtgaaagctacttctccagtgaaatctactacatctatcactgatgctaaaagttgtgagggacaaaatcctgagctacttccaaaaactcctattagtcctctgaaaacgggggtatcgaaaccaattgtgaagtcaactttatcccagacagttccatccaagggagaattaagtagagaaatttgtctgcaatctcaatctaaagacaaatctacgacaccaggaggaacaggaattaagcctttcctggaacgctttggagagcgttgtcaagaacatagcaaagaaagtccagctcgtagcacaccccacagaacccccattattactccaaatacaaaggccatccaagaaagattattcaagcaagacacatcttcatctactacccatttagcacaacagctcaagcaggaacgtcaaaaagaactagcatgtcttcgtggccgatttgacaagggcaatatatggagtgcagaaaaaggcggaaactcaaaaagcaaacaactagaaaccaaacaggaaactcactgtcagagcactcccctcaaaaaacaccaaggtgtttcaaaaactcagtcacttccagtaacagaaaaggtgaccgaaaaccagataccagccaaaaattctagtacagaacctaaaggtttcactgaatgcgaaatgacgaaatctagccctttgaaaataacattgtttttagaagaggacaaatccttaaaagtaacatcagacccaaaggttgagcagaaaattgaagtgatacgtgaaattgagatgagtgtggatgatgatgatatcaatagttcgaaagtaattaatgacctcttcagtgatgtcctagaggaaggtgaactagatatggagaagagccaagaggagatggatcaagcattagcagaaagcagcgaagaacaggaagatgcactgaatatctcctcaatgtctttacttgcaccattggcacaaacagttggtgtggtaagtccagagagtttagtgtccacacctagactggaattgaaagacaccagcagaagtgatgaaagtccaaaaccaggaaaattccaaagaactcgtgtccctcgagctgaatctggtgatagccttggttctgaagatcgtgatcttctttacagcattgatgcatatagatctcaaagattcaaagaaacagaacgtccatcaataaagcaggtgattgttcggaaggaagatgttacttcaaaactggatgaaaaaaataatgcctttccttgtcaagttaatatcaaacagaaaatgcaggaactcaataacgaaataaatatgcaacagacagtgatctatcaagctagccaggctcttaactgctgtgttgatgaagaacatggaaaagggtccctagaagaagctgaagcagaaagacttcttctaattgcaactgggaagagaacacttttgattgatgaattgaataaattgaagaacgaaggacctcagaggaagaataaggctagtccccaaagtgaatttatgccatccaaaggatcagttactttgtcagaaatccgcttgcctctaaaagcagattttgtctgcagtacggttcagaaaccagatgcagcaaattactattacttaattatactaaaagcaggagctgaaaatatggtagccacaccattagcaagtacttcaaactctcttaacggtgatgctctgacattcactactacatttactctgcaagatgtatccaatgactttgaaataaatattgaagtttacagcttggtgcaaaagaaagatccctcaggccttgataagaagaaaaaaacatccaagtccaaggctattactccaaagcgactcctcacatctataaccacaaaaagcaacattcattcttcagtcatggccagtccaggaggtcttagtgctgtgcgaaccagcaacttcgcccttgttggatcttacacattatcattgtcttcagtaggaaatactaagtttgttctggacaaggtcccctttttatcttctttggaaggtcatatttatttaaaaataaaatgtcaagtgaattccagtgttgaagaaagaggttttctaaccatatttgaagatgttagtggttttggtgcctggcatcgaagatggtgtgttctttctggaaactgtatatcttattggacttatccagatgatgagaaacgcaagaatcccataggaaggataaatctggctaattgtaccagtcgtcagatagaaccagccaacagagaattttgtgcaagacgcaacacttttgaattaattactgtccgaccacaaagagaagatgaccgagagactcttgtcagccaatgcagggacacactctgtgttaccaagaactggctgtctgcagatactaaagaagagcgggatctctggatgcaaaaactcaatcaagttcttgttgatattcgcctctggcaacctgatgcttgctacaaacctattggaaagccttaaaccgggaaatttccatgctatctagaggtttttgatgtcatcttaagaaacacacttaagagcatcagatttactgattgcattttatgctttaagtacgaaagggtttgtgccaatattcactacgtattatgcagtatttatatcttttgtatgtaaaactttaactgatttctgtcattcatcaatgagtagaagtaaatacattatagttgattttgctaaatcttaatttaaaagcctcattttcctagaaatctaattattcagttattcatgacaatatttttttaaaagtaagaaattctgagttgtcttcttggagctgtaggtcttgaagcagcaacgtctttcaggggttggagacagaaacccattctccaatctcagtagttttttcgaaaggctgtgatcatttattgatcgtgatatgacttgttactagggtactgaaaaaaatgtctaaggcctttacagaaacatttttagtaatgaggatgagaacttcttcacatagccacatttttgcttacccgtaggcggtccccacaggtggctacggaccgggacacggggccctttgaagaacccgcgcnnnnnnn

SEQ ID NO: 20483 - DNA, 1084 bp, Homo sapiens
  misc_feature 1, 2, 3, 1081, 1082, 1083, 1084: n = A,T,C or G
nnncgtgcttacgcatgtagatcgcttggggtggtcgagtttgcggtgtgtggatgggtgttgtgtctgcagcgctgctgctgtgtgcgtgtttctgttgtgatgctgctgacgccccgtgttacttatgcggaggtttgtgtgctctgcggtggtgtggccagtgatttggttggcgtcgcgtccctgtttgttgcgcgcgccccgttttccaggtggtaccttctgtaaatactagtaaatgcaaaaagaacttgtaaagtggcaaggcatggcctatcaaaagtcagcccaagggcagttttcagccctgcctcacctgggtctagttcagctgacggatgagctgattgatgcgttcaccccgatagccaggtgtgcccatctccttgaggaagcccactctatttttggtagcatgacgggccactgagaggtggaaagggcacaagaaccatgagatctcctggaaatgcttccctgggaaggcaatttcatgaatgaggtcttccaagcaaatgacgccaaacttccccaggtgctcctcaatcactgtattgtctgtcagagggatggtcttattcttgaccttggcttgtccacgtttcaaaatgagttctcggacagacttcagatttggaaatccccaggtcacataaggttccactatacgcagcatttttagattctggggggtgacttttacaaagacaccactaaaaattttctttaggcgaagtcttgcaatggttctctgcaccagtaaactcacgccgtcaatcctttcgatgcgtacaacaaaggccaaggaatgtttatctggcaattccaaggcatgaggtttcacttctagtcgtctgagacgcaccttgtcacgtttctgccgccaggaatcatgtaggaatgattccagtcgcttaaacctgagcccttttcctttcttctgctccttctttgcctaaagtgcctgctttgcctgggtggctttgagggcttgataagccttcctctttttcaggagattttctggaacctgtagagatgtcaggccgagctgcccatgtaatgtaacaattaaaannnn

SEQ ID NO: 20484 - DNA, 914 bp, Homo sapiens
  misc_feature 1, 914: n = A,T,C or G
naagccagccccactttgcccagcgggtaccccgagtccagcggagacaaaggagttagaaagagacagaataagagtttaaaaggcaggtccaggggaccggagcgttggaggcttgctcatggcccagagctctttggctccgcccaatttattgatttacaagctctttgttcttagggcagatgggaggggtaggaagggatgaggaaaaggattaatcagtgaaggagaactcgtgagtcattcaataatatgtatagtagtggtggtttctgtgaatttccttgagtaaaggcgtgtgtctaaactactcaagatctttaacttatcgggattgaaatggatgggagtgagtttcaggaggagccaagatgtttgattatactccactgcttcagggagtgttatctcccggagcaacctgtggaatgccgcagagcgtttatgctctaggggtataaagacatgaaggcaataaggagacttttctccttagaggccgcccatggctccccatgggtgcctcacacacaggagaccaactcatctggcaccctagaaactctctgtcccacataagcaaaaacagaagagccaagaatgagaattatggtctcaaaatatacagtgcatgtgtaattgggatatcagaaggagaaaatggaaagaatggaacagaataaatatttaaaatattaaagccctgacattttcaaattaataacagacaccaaaccacaaatccaggaacttcagagaacattaagcagaattaacagaaacaacatttaggtatatcatattcaaacagtggaaagacaaagacaaacagaaaatattgaaagatgccagagggaggaagtgaaccttacctatagataaacagggataagaagtacctcggccgctcn

SEQ ID NO: 20485 - DNA, 796 bp, Homo sapiens
  misc_feature 768, 769, 770, 771, 772, 773, 774, 775, 776, 777, 778, 779,780, 781, 782, 783, 784, 785, 786, 787, 788, 789, 790, 791,792, 793, 794, 795, 796: n = A,T,C or G
ggcaggtacgcgggatgattgaattttgtttccgcctaaaatagtaatctataagatataaactcgagttaggttttacattttttacttatgaacacagggcactagggccacttcagtctaatttcctgctttttaattactttaacactccacaggaggaggactggttttcctctgtgacttcctaatgtatggcaagcaggacttcttctaatccactaccctcttcccctagcttaactaaggcttgcagtaaaattataaatttccactttctttcctacattctcaaatgtaggaaatgaggacaaacaacttcctctctccaatttacaacactatcaactatttgtcctttattgtgcatttcagacacagtgttttaattgttaatcatgtttttacactgcagtggatggcaggtttttaaagatttgttttctgtttgtaaacacttttttattggagacagagtttcattcttgttgcccatgctggagtgcaatggcatgatctcagctcactgaagcctctgcctcccaggttcaagtgattctcctgcctcagcctcccaagtagctgggattataggctgccaccaccgtgccctgctaatttttatattttgagtagagagtgggttttgtcttgttggccaggctggtcttgaactcctgacctcagatgatttatctgcctcagcctcccaagtctaaacattttatgtgagaaaaaaagtagaaaataatcctctggaactccacnnnnnnnnnnnnnnnnnnnnnnnnnnnnn

SEQ ID NO: 20486 - DNA, 1144 bp, Homo sapiens
  misc_feature 1, 2, 3, 4, 5, 6, 7, 9, 11, 18, 24, 34, 43, 45, 47, 51, 62,64, 67, 79, 83, 87: n = A,T,C or G
nnnnnnncncnttccccntgggcntggccagggnttccccctncntnctcnttggggggaangnccnaggttttttttntttnggcncgggcattggctccgccttcaagttccctttgggggaaaaaaggcaggaaattgccccagggtctggtcctgtccctgcaccacccctgagcagctagtcttgggaagggattacaggccctgggccataggctgctcgcccattctggctttccctatcctgtttctctccctgtgctgctcccttttagccagggcttgagaaatgttcagcacttgaggcaaaactgccatagtacctctgaaagctgaatcaagggggaagaggcagaagaacacactaatagagaaaattttccttgctacgggtgctctttcacacccacctagggtaagtcaaggcaacttgtgaaggtgctttgagctgttccttcaagcaaacacattttcattacataatggcttaacgcaagggtgcagggaaggaccaccaccaactttggtgacatatttgaatctgggtgttcatcctactctgatattcaaaaaagcatagaaaaaggtctgatttctgctcatcaccagcccaggatagggttcaggtgtgctctgaccactgccaattcaggaaggcggcaccatggccaaaagctcccagattatttggaaaccatgttttcttcctagtccatggtaacaagaaaaagccaatggaagcatcattccaaacaataatctccaaagatggtggcaaccaagtgtcaaatggggactgcaggcacagaagagaccaccccaaaccctgcctgggtggacgaagcaggtatgctagaatagtcctgtcctgcagaatagggaacggcagcttggtcgatctgtgccctggaaaaagaaaatgagttgcaatagaagtgactctaagacagacaatgaacctactcttaagagagacagggccaggcacggtggctcacgcctgtaatcccagcactttgggaggctaaggcagaagaatcgcttgaacccagtgggtggaggttgcagtgagctgagatcatgccactgcactccagactgggcaaaagagcaaaattccatctcaaaaaaaaaaaaaagt

SEQ ID NO: 20487 - DNA, 735 bp, Homo sapiens
tccggcctctactgtttattagttttgtgaacttgccaagctctttcactgtttatgcctcagtttcctcatcaggaaaatggagagaaatatagttccctcttcatagattttatgagaattaagtgagatatgcatttagtgtacagaataatgcctgtcacatagtaagtatgtaataagcatttattattacttatcagggtatgatttatgaattgtggaacctgggattatgggagagtctggcttcaatcaagggctgaaattccatttccactgacatctcttccttccccatcccccgattctgtcctgcaacagggtaacaagaaggggcccttaggccgttgggactttgatacccaggaagaatacagcgagtatatgaacaacaaagaagctttgcccaaggctgcattccagtatggtatcaaaatgtctgaagggcggaaaaccaggcgcttcaaggaaaccaatgacaaagcagagcttgatcgccagtggaagaagattagtgcaatcattgagaagaggaagaagatggaagctgatggggttgaagtcaaaagaccaaaatactaatcactagttacaaccagagatgctccacaaggatatgctccccactgttttctttctacaatttccaaaggttgcaagatgtttttttgtggatgaatataaaattttattgtgtaattacttggttccattaaaattggttaacttgca

SEQ ID NO: 20488 - DNA, 1445 bp, Homo sapiens
  misc_feature 1, 1445: n = A,T,C or G
naccaagtataaatataaattacaaccctccctccttactatcaacgcgccaacccctttttttttttcctttttttttttttcctttttttttttggccccccccttttcttccaatgttccagggtatcccatcccgcctgactcctgttaccgccgattttcttgttcccccaaactgtttgggcctgaattaagacaaatattctaccggcatattgcacaggatggatggcaaaaaaaagtttaaaaacaaaaacccttaacggaactgccttaaaaaggcagacgtcctagtgcctgtcatgttatattaaacatacatacacacaatctttttgcttattataatacagacttaaatgtacaaagatgttttccacttttttcaatttttaaacacaacagctataaacctgaacacatatgctatcatcatgccataagactaaaacaattatatttagcgacaagtagaaaggattaaatagtcaaatacaagaatgaaaaacgcagtacatagtgtcgcgaactcaaatcggcatttagatagatccagtggtttaaacggcacgtttttgcttataaaaaaagtgcaaaaaagatgtggtttacaagttaaagctacagaatccctttttgctgtaattgcaccagttttaaagcctctggacagagcagtatttcgtttaaaactttgtttttcttaaaagcttacagtgtttggctaattctcctcccctttttacaagacgggggccggagggtggacactggtggcaggttaagggatactgtcactttaagaagcctgcagattgaagtgtaaacatggagaaattaggggctgattttttaaactgtgtgagatattaaccagccgccctgttataaaatcaggaaatccaaacagcgatttacaccgattaacaccccctttatatattttttacaaaaatacactgagaaaataatcaaacgttttcatctctcttgtctttttttgttttttaaaagtgtcaaaagtctacatttaaatataaaaaattaaaagttaaaactctagcccttcagtgaaggagacgtaaaatggcgtgggtaacaacaactaccaaaaaaaaaaaaaaaaaaaagaaaaaaaggaaaaggaaggaataaagaaataaaggaagtaaaaagaaaggaaagaaaaaaagggacaaaagaaaaaatatgtttggccagtataaatacgtccacatataaaatggcatctgattacatttacaaggaaaaagaaatacgaggatggagcatcggtgaaggaaaaaaacacgtcttctcatttacacctataaggaataaacacacacactgagaaaaaatttggtcctgaattgtttttttttaaagtccagcacagatttgagttgcgtttgaatcctttaaagagttaagaatgaaan

SEQ ID NO: 20489 - DNA, 6286 bp, Homo sapiens
  misc_feature 1, 2, 3, 4, 5, 6284, 6285, 6286: n = A,T,C or G
nnnnncctgtgaggaaaagaacagccacacctcgggggcttcctaggtccgagctgcagggtctatatcgcactgctaggggttctgctgctgggtgcggcgcgcctgccgcgcggggcagaagcttttgagattgctctgccacgagaaagcaacattacagttctcataaagctggggaccccgactctgctggcaaaaccctgttacatcgtcttttctaaaagacatataaccatgttgtccatcaagtctggagaaagaatagtctttacctttagctgccagagtcctgagaatcactttgtcatagagatccagaaaaatattgactgtatgtcaggcccatgtccttttggggaggttcagcttcagccctcgacatcgttgttgcctaccctcaacagaactttcatctgggatgtcaaagctcataagagcatcggttagagctgcagttttccatccctcgcctgaggcagatcggtccgggtgagagctgcccagacggagtcactcactccatcagcggccgaatcgatgccaccgtggtcaggatcggaaccttctgcagcaatggcactgtgtcccggatcaagatgcaagaaggagtgaaaatggccttacacctcccatggttccaccccagaaatgtctccggcttcagcattgcaaaccgctcatctataaaacgtctgtgcatcatcgagtctgtgtttgagggtgaaggctcagcaaccctgatgtctgccaactacccagaaggcttccctgaggatgagctcatgacgtggcagtttgtcgttcctgcacacctgcgggccagcgtctccttcctcaacttcaacctctccaactgtgagaggaaggaggagcgggttgaatactacatcccgggctccaccaccaaccccgaggtgttcaagctggaggacaagcagcctgggaacatggcggggaacttcaacctctctctgcaaggctgtgaccaagatgcccaaagtccagggatcctccggctgcagttccaagttttggtccaacatccacaaaatgaaagcaataaaatctacgtggttgacttgagtaatgagcgagccatgtcactcaccatcgagccacggcccgtcaaacagagccgcaagtttgtccctggctgtttcgtgtgtctagaatctcggacctgcagtagcaacctcaccctgacatctggctccaaacacaaaatctccttcctttgtgatgatctgacacgtctgtggatgaatgtggaaaaaaccataagctgcacagaccaccggtactgccaaaggaaatcctactcactccaggtgcccagtgacatcctccacctgcctgtggagctgcatgacttctcctggaagctgctggtgcccaaggacaggctcagcctggtgctggtgccagcccagaagctgcagcagcatacacacgagaagccctgcaacaccagcttcagctacctcgtggccagtgccatacccagccaggacctgtacttcggctccttctgcccgggaggctctatcaagcagatccaggtgaagcagaacatctcggtgacccttcgcacctttgcccccagcttccgacaagaggcctccaggcagggtctgacggtgtcctttataccttatttcaaagaggaaggcgttttcacggtgacccctgacacaaaaagcaaggtctacctgaggacccccaactgggaccggggcctgccatccctcacctctgtgtcctggaacatcagcgtgcccagagaccaggtggcctgcctgactttctttaaggagcggagcggcgtggtctgccagacagggcgcgcattcatgatcatccaggagcagcggacccgggctgaggagatcttcagcctggacgaggatgtgctccccaagccaagcttccaccatcacagcttctgggtcaacatctctaactgcagccccacgagcggcaagcagctagacctgctcttctcggtgacacttaccccaaggactgtggacttgactgtcatcctcatcgcagcggtgggaggtggagtcttactgctgtctgccctcgggctcatcatttgctgtgtgaaaaagaagaaaaagaagacaaacaagggccccgctgtgggtatctacaatggcaacatcaatactgagatgccgaggcagccaaaaaagtttcagaaagggcgaaaggacaatgactcccatgtgtatgcagtcatcgaggacaccatggtatatgggcatctgctacaggattccagcggctccttcctgcagccagaggtggacacctaccggccgttccagggcaccatgggggtctgtcctccctccccacccaccatatgctccagggccccaactgcaaagttggccactgaggagccacctcctcgctcccctcctgagtctgagagtgaaccgtacaccttctcccatcccaacaatggggatgtaagcagcaaggacacagacattcccttactgaacactcaggagcccatggagccagcagaataacttgatccattccagacgctttgctgagtttcataaagcagggcactgagacacccgtccgtgttcctaaccagaaatcctaaagaagaggaattatacagaaggaacagcaggaggttttcctggacaccgccaacttcacattgctcagtggactcattctaagggcaagacattgaaaatgatgaattccaatctggatacagtcatgacagctcatgtgctcctcaacttaggctgtgcggttagccagcctgtaatgagaggagagaggcctgagtcacctagcatagggttgcagcaagccctggattcagagtgttaaacagaggcttgccctcttcaggacaacagttccaattccaaggagcctacctgaggtccctactctcactggggtccccaggatgaaaacgacaatgtgcctttttattattatttatttggtggtcctgtgttatttaagagatcaaatgtataaccacctagctcttttcacctgacttagtaataactcatactaactggtttggatgcctgggttgtgacttctactgaccgctagataaacgtgtgcctgtcccccaggtggtgggaataatttacaatctgtccaaccagaaaagaatgtgtgtgtttgagcagcattgacacatatctgctttgataagagacttcctgattctctaggtcggttcgtggttatcccattgtggaaattcatcttgaatcccattgtcctatagtcctagcaataagagaaatttcctcaagtttccatgtgcggttctcctagctgcagcaatactttgacatttaaagagaaatttagagaatattctcatcctctaaaaatgtttaaatatataccaaacagtggccccctgcattagttttctgttgccactgcaacccattacttggtagcttaaaaacaacacattagcttatagtcctggggatcagaattccaaaatggatgtccctgaatgaaaatcaaggtgtcagcagagctgtgctccttctgaaggctctagggagaagccggttccttgccatttcaagcttctagaggctggctgcattcccaggctccagtggctggtcaagcttttctcacatggcatcactgtgacactggccctcccacttccctctttgacttacaaagcccaccaggaagatccaggataatctctccatctaaagatccttcatcatcctggaagagccttttgccatgcaagacaacatagccacaggtggggattaggaccaggacatctttggggtgctgttattctgcctaccacaccttcctgccactgactcccacaggagaggctacaaaatgatctggcgcacagggatgttttgtttagcttgcggactctaacacttaaaaaaaaacccagatcagaagatctggccatgctggggctcacattctcacctagcaacaactggctggagctgggcaccagctctgcctttagaaggggtgtccacttcaccaggtcaccacagcccacactacgccctatcacttcccacaatgaggctgagtgtttgtttctactgatcaatgcccctgcaggttgcatttattgtaatgaaaaagaaagactgggattaatctctaatcaggtgagtagaccatgagaccaatgtgtgctcacattaccctttttcttttttttctttttctttttctttttttttttaatgtgagacaggatctcattctgttgcctaggctggagtgcagtggcgcaatctcggctcactgcaacctctgcctcctgggctcaagcaattctcccacctcagcctcccaaatagctgggatcactggcacaaaccaccatgcccagctaattttgtattttttgtagagacagggtttcaccatgttgcccaggctggtctcaacctcctgggctcaagcaatcctcctgcctcggcctcccaaagtgctgggattacagatgtgagccaccgcatccagccccacaccctcatttataccaattacctgcccagtaactgtggacttttgcttcctcacccctgctctgatctggaaggagagggattatgttatagcttgtcagcacagtcccaagttcaatatttctgcggcaaaaacttccttcaaaaaataaatgtacttcattgtattcaatgaattcaccttggaaatgcaccgcctcaacttgttcacatggcataaatgaaaggaattttatagtctcctaaatggcgtgtactgcaagacctcttgaacactttccagaggataggatatttaagtcatgcccttggcgttgcctatggcacctttcccttctgaaagtctggttcctgcccagtgacccttggccttgtgagccgagatgctgaccctgcataaagggccaaaggagggctgcggcttccttccctcactgaagagcccttatttgaattcactgtgtggagccctagccctccattctcgacattccccaacctcccagccccttccaagcaggactaggtgccctgcattccacccaaggtgggattggccttccttaggctggctacttgtcaccatcaccgacatcactgttgcctgcaaggacaccacgtggccattttccttcaactgagggctcaaaactcctggacaagttgctggctcctgagaccagtatttcctggagctgtgcctcagtgaaggggcccagcctgaggaaccctggctcttttctttaaagcccaggccccacttacataaaacatttcagggtcactggaaacagtgaagtgccatttgttgaagcctactgcatgccagcccactgctcatccacgtggtctgccatgcctacgaggaaggccagcgcatgcaggactggtctctaatgctgtggtcattgcacagaagggaaaggtctcaaggaagagtcaactgggacaagcacaagcccaccggacatggccttggtaaaggttagcagactggtgtgtgtggatctgcagtgcttcactggaaataatttattcattgcagatactttttaggtggcattttattcatttcctgtgctttaaataaacaaatgtaccaaaaaacaagtatcaagctgtttaagtgcttcggctacttgtcccctggttcagtagaggccccggtttcccagttgttgactgtgacaggctcagcatgggctcagcagatgctgtcttaatttgtggatgatacagaaagccaggctttgggatacaagttctttcctcttcatttgatgccgtgcactgtgtgaagcagatgtttttgtccggaaataaaaataatagtcttggagtctcgccaccactggttttcaagtctccctgtatgcaagtggaaggaatggaagctatgccaatgggtagctgagaggccagggcttgttctgttctgttctgttcttgtgggggctacatgggccccaccctttgtgacctttcccaatacctaacccccatagaggcccagggccaccctaatcactgaccacagttgatctctaagccccgtggaggtcaccagccaccagaacaaaagttaagggagagcagtgagagagggaagttcccatggcccccaccatctgccatgcactaggaggggagacccaagcacattggattgaatccaccgagaaaaccagatgttgctgtgtaatgagccacctccggacgcgnnn

SEQ ID NO: 20490 - DNA, 1441 bp, Homo sapiens
  misc_feature 1, 1441: n = A,T,C or G
ncagctccagggttgcgaggcacccaccagcatcattccccatgcgaggtggcaaatgcaacatgctctccagtttggggtgtctacttctctgtggaagtattacactagccctgggaaatgcacagaaattgccaaaaggtaaaaggccaaacctcaaagtccacatcaataccacaagtgactccatcctcttgaagttcttgcgtccaagtccaaatgtaaagcttgaaggtcttctcctgggatatggcagcaatgtatcaccaaaccagtacttccctcttcccgctgaagggaaattcacagaagctatagttgatgcagagccgaaatatctgatagttgtgcgacctgctccacctccaagtcaaaagaagtcatgttcaggtaaaactcgttctcgcaaacctctgcagctggtggttggcactctgacaccgagctcagtcttcctgtcctggggtttcctcatcaacccacaccatgactggacattgccaagtcactgtcccaatgacagattttatacaattcgctatcgagaaaaggataaagaaaagaagtggatttttcaaatctgtccagccactgaaacaattgtggaaaacctaaagcccaacacagtttatgaatttggagtgaaagacaatgtggaaggtggaatttggagtaagattttcaatcacaagactgttgttggaagtaaaaaagtaaatgggaaaatccaaagtacctatgaccaagaccacacagtgccagcatatgtcccaaggaaactaatcccaataacaatcatcaagcaagtgattcagaatgttactcacaaggattcagctaaatccccagaaaaagctccactgggaggagtgatactagtccaccttattattccaggtcttaatgaaactactgtaaaacttcctgcatccctaatgtttgagatttcagatgcactcaagacacaattagctaagaatgaaaccttggcattacctgccgaatctaaaacaccagaggttgaaaaaatctcagcacgacccacaacagtgactcctgaaacagttccaagaagcactaaacccactacgtctagtgcattagatgtttcagaaacaacactggttctcagcaaaaggaccccggaaacattgcaaactattctaatacctcagtttgaattgccactgagcactctagctccaaaaagccttccagaatttcctgaggcaaaaacacccttcccttttgagaaacctaggggcacattggcttcaagtgaaaagccatggattgtgcctacagctaaaatatctgaagattccaaagttctgcagcctcaaactgcaacttatgatgttttctcaagccctacaacatcagatgagcctgagatatcagattcctacacagcaacaagtgatcgtattctggattctan

SEQ ID NO: 20491 - DNA, 419 bp, Homo sapiens
acgcgggggctgactcctttttcggactcagtctgcctgcacccatgtgattaaaaagctttattgctcacacaaagcctgtttggttatctcttcacacagacatgcgtgacatttggtgctgaagacccgggatgggggactccttcgggagactggtcccctgtcctcaccctcactccatgaggagatccacctacaacctcgggtcctcagtccaaccagcctaaggaacatctcaccaatttcaaatcagatcttggcttagtggctgaagactgatgctgcccaattacctcggaagcctcctggaccatcacagatactttgagtaatctcttatagtggaaggatgcaaagttggaataagagcaatgaccacctctcctgagagacctgtttgttcccacatctgtacc

SEQ ID NO: 20492 - DNA, 1003 bp, Homo sapiens
  misc_feature 1, 1003: n = A,T,C or G
nccacagacggttggtgaacctacaccgcgccccccccgttgtgtccgcgggcccctcgggtgtcccccccgcgggcgtcccccctccccacggtgtgtcctcccgggggccccatcatcaccggcggaatcctccggccgggtctgttccccttggtttttttccccgttaccattaaactgccgcccacgcgccctcttctcacaatacgatgctgatcgccagatcgcccatccatgccatgtctattgtcttatgcttccacacgcctcctgcttcatgcttctagtctgaggacttggcttaatatgcttctgattgccactccctcttgttgacgattcttctttttattttgggagacggagttgctcttgtcacccaggctggagtgcagcgagactgcccatccacagatgaagggataaagtaactgtggtggacatacacaaagagaatagtcttcagccagaaaatcagaatgaaatttcatcctttggagccatactgttgaacctggaggacagcatggtaaatgacctgttcaaacacagctgcagggatgaggaaactgctgtacagatacaccacggaatatgtttcagccagaaacctttgggaaatcctgccatctgcagccacatgaagaaaccagaggctgctggggaagtggaggcagtctcagaaggaatcagtgatgggtacaaagttactctcagatgagactgatcaattctggccttctattccacagcagggtgactagcctgttcatccacagataaagagatcaagaaactctcatatacatacactaggaaatattctccagccatcaaaataatgaaacagtgtcatttagagcaacacagatgaaccgcggagacctgcctcctactccaccatcacatggaacccaccactgcttctccgaagctcgctctgaccacgccgctgctgctgcaggggcctcgcaggaagtgcagtctcccccgcgtaccn

SEQ ID NO: 20493 - DNA, 2065 bp, Homo sapiens
  misc_feature 2064, 2065: n = A,T,C or G
attggagctcaccgcggtggcggccgaggtactttggtatgtttttgtcttgaaaagaggttttctagctagaaattcggggcccagaaggtcaaggctccagagatccccttctcatcatccttcagttgtctgaggagacagaggatcacatgtgtcacagtgagtgctgattccccagaatctgcagtcttaagctcccctgctgacgcacacagccagttctctgcttcatattcatgtgacccactgtgaagtgacaggcagctgccaattctgtcatataagaagcagctctgcccatgcaactttgaaagttcctgcacttctccatagactgctccttcatggaaataaacacatcatcacactgtgggtgcctaagctaagtttgtttgcagtttgatgatgcccagctccttttcaactcagccttaattggcactttaagggccaggatgaggtttctctcaggccaagtcgagatttccagatttccttttgtccaaggctgaccagtttagaagttattcacatccttgttttagttctttccttcttgtcctggtacctcttcctttccaggattatttgcagagtctgtgatggcttacttggtgaccagacatggggtgagctactggtatagtctgattactttgacatctattctgaactggtcattggctgtacatgagtttttgtgctggtaaaggaatatactgggaagattggaaggcacagactgggaactaattctgagaagagaactgctgagttactgaaagaccttttggaccacccctaaatggagcatcttgatagatggcaaatccagtgtttcttaaacttgtccatgctgcccagagcccactgccttttatcagatgtgagacttcactgccacagtgtcatcccacagtttccttccctggacatttgataaagggaaaatcatttcttgtcctttaaggcagggactattattttttcacttttccacataccccacaacacctaacattgatttactcgtagtaggagtttcatactgttgaactctctaaaggccatttgttccagggcctagctgggcttgtgaaggacaacagagtcatttcctaaggaccccaaaagacagcatgaaggaaaaaataataataaactgctgttcacagtgccttgagtgtaccaccgtcctttctgctatgccttgtccattccaatctggacagtctctgtgcccctcctttccactcaagtgttatccagcactcaagttctggctcaaggcccaacatctccgtggggacctcagccatcccagggcattgtgaccccttcctctaagtccccggcacactcgctgattggtaccctctcattcgacaaagcatatgccattgtggcttacttgtcatttctttaggtcttgccttcccaagtagatcatgagccactataagaactagctcccatagtcccagcccctgggcctggtacatggcaatgcttagtgattggtgattgaggataatggtggtaaaaggatgtaccagacacgtcatctcctgaagaagaatgcccgaacaacctgtccttgttttaatgtactttctctttctttcctgtccagttttatttcctctcatagtaaactggctaaaaaaatatgtcaagtttcctggtcatctctttccaacccctttttcttcccctctcccctgcatggttggtctgggcctgttgggtccaactagcaactccccttaggtgtggctaaatctgcctcatggccaaagccaatcccatttcctgtcccccgttacccaaggactcccagtctgtatgcacaaggcgggttgtgaagtctgcatgtgcaagaaaccccagctgtaagaaacagcttccctcgttggcatgggtggtcatgctaatattccagcatttgagaaggtcgaagtgggcaaatcactggagccaggagttcgggactagcctgggcacatagaagattactttaaaaaaaaaaaaaaaaaaaaaaattgtgcgcgcggcgagaann

SEQ ID NO: 20494 - DNA, 2606 bp, Homo sapiens
cagctgatgctgtcggtgagtctagaggattccgggtatcgacagattgcactaattgtgaatttagattgtttatgatgctgagtatatagcgtgctcatgtcggaatcttgtacatgtcaatataaaacgttattatacctcaaacaagaagtggagtcttgtttaggccctcactggtgaccttcagaagtagtctcgtgacgggggaacccctgaggtgtgtgttgtctcagcattccaggtagccttatagtttggcttaaaacttatccctaaaatgtaagatggcattgagggaaagggtataatgatagtacttctgaatgttttttaagttgaattgtttgtaaacttcttgcagaattgggtgagatgtgtgttaaaactgacaaacctggctgaaagcttagggcgttcatcctcttgtgtctcctttagcctgagtttggttatgtcaagcttaccgtaagttttcttaggatttatttattcttggtgcctaaaagaataaattgaaagtactttctgttctttggcacattttgcccagcggatgcaacttctatcctcagtccagttcatatatctcaggcagtgatccattttgtatcagccagtttcccttgttagggccgctagacccggctggcagccaagagcagcactctccccaccttcagcagaacttctcagctcatgtgtgtgtttttaaaagcagtaggcagcttccatcagcaatggaagtgtcccccactccagtggtggaggtgcagtcgctggacctgaggaagtggggaagcattacaaaccctcctgcagtaagaatggcagagttgggaaggatcttctctcgcaggctgttggcccaactcctcttttctgtgtatgagggcatcttagttttttatggcgttttcaaagcagcatatgaggattcttagcatgcagctaagtgacaacccccatggcctatgatgtaatgtttgctctggactagccatcttgataaataggagtgtatgtatcttaggttctttgtagaacagctatttttttttctcattaaaaaggcctctgaaagccctctcaaaatggacctcacaaaggcaaccagtgtgaatggatgggagctggggtggtgcatgcccaggctggtcatggtgtgtgcagcacccagagagttgcacccaccccttcttcaggtggacatccgacctttacactgtggtcttgcaaaaatcagcgagttagtttggccgccctgtgaagcttcagcattcaaggtcctcttctgttaaaacccaactcgtagccgggcgtggtggctcactcctataatcccagcacttcgggaggccaaggcaggtggatacacttgaggccaggagttcgagaccagcctggtccacatggcaaaaccccatcatgtacacaggcacgcttgactcctggcggaagattgctcgtgatgaaggaggcaaagcttttttcaagggtgcatggtccaatgttctcagaggcatgggtggtgcttttgtgcttgtcttgtatgatgaaatcaagaagtacacataagttatttcctaggatttttccccctgtgaacaggcatgttgtattatataacatatcttgagcattcttgacagactcctggctgtcagtttctcagtggcaactatttactggttgaaaatgggaagcaataatattcatctgaccagttttctcttaaagccatttccatgatgatgatgatgatgggactcaattgtattttttatttcagtcactcctgataaataacaaatttggagaaataaaaatatctaaaataaattttgtctgcagtatattttcatataaaaaaaaaaaaaaaaaaaaaaaaaaaggggggggcgcggccgggattaaaatagtttttttttttttttttttccggtatatttttttttttgtgtgttttaaaacccccgttttttggtaccccgcggtggtgaatcacccttgatatcccggtgacaccagcaacaacttggggtggggttccctggacaaaaggggcttcaggaaacctccgtgatggggagcaacagctggggaaaaagaggagctcctctacaaaagaggcggggccacagagaccttggaagggtccaagaaaaaggtgcccaaaaggggggcccggggaaacttcccccagggtggtaaagtgacacccccggttgagtcgttggacaagtcttatcagatacccacgccctcagaagaagggttttttaaggaccagggtgggagacaacgatagccgagggcccccttggtaccgagggaatatacgtacaccaacactaaagcgagagcagatgtacctcttgaaggggacatgtgtggtgtgccgatttgtgtccccccacaactgcgaccgggaaaaggaacattgcaggaatatgcccgggtggggggaccctgggaggagagtaaagagaggcggccaagacccagagccagtacacacgattttaaaggcgccataggatatcagcaggcagcaggaggaaactgcatgcgacatgtggctggaccacatgcacagtctgacc

SEQ ID NO: 20495 - DNA, 3272 bp, Homo sapiens
  misc_feature 1, 2, 3, 4, 5, 6, 7, 8, 9, 10, 11, 12, 13, 14, 15, 16, 17,18, 19, 20, 21, 22, 23, 24, 25, 26, 27, 3268, 3269, 3270,3271, 3272: n = A,T,C or G
nnnnnnnnnnnnnnnnnnnnnnnnnnnatgctccagttgtggaaggtggtacgcccagctcggcagctggaactgcaccgcctcatactgctgctgatcgctttcagcctgggctccatgggcttcctggcttattatgtgtccaccagccctaaggccaaggaacccttgcccctgcccttgggagactgcagcagcggtggggcagctggtcctggccctgcacggcctccagttccacctcggccccccaggcctccagagacagctcgaactgaacccgtggtccttgtgtttgtggagagtgcatactcacagctggggcaggaaattgtggccatcctggagtctagtcgttttcgttatagcactgagttggcacctggccgaggggacatgcccacattgactgataatacccatggccgctatgtcttggtcatttatgagaacctgctcaagtatgtcaacctggatgcctggagtcgggaactgctagaccggtactgcgtggagtatggtgtgggcatcattggctttttccgagcccacgagcacagcctactgagcgcccagctcaagggctttcccctttttttacactcaaacttggggctccgggactaccaagtgaatccttctgccccgctactgcatctcacacgccccagccgcctagaaccagggccactgcctggtgatgactggaccatcttccaatccaatcatagtacatatgaaccagtgcttcttgccagccttcggccagctgagcccgcagtgccaggaccagttcttcgtcgggcccggcttcccactgtggtacaggacctggggcttcatgatggcatccagcgggtgctctttggacatggcctttccttctggctccacaaacttatcttcgttgatgctgttgcatacctcactggcaagcgcctctgcctggaccttgaccgctacatcttggtagacatcgatgacatctttgtgggcaaggaagggacccgcatgaaggtggctgatgttgaggctctgttgaccacccagaacaaactcaggaccttagttcccaacttcaccttcaacttgggcttctcgggcaagttctatcatactgggacagaggaggaggatgcaggggacgacatgctgctgaagcaccgcaaagagttctggtggttcccccacatgtggagccacatgcagccacacctgttccacaatcgctccgtgctggctgaccagatgaggctcaacaaacagtttgctctggagcatgggattcccacggacctggggtatgctgtggccccccaccactcgggtgtgtaccccatccacacgcagctctatgaggcctggaaatccgtgtggggcatccaggtgaccagcactgaggagtatccccatctccgccctgcccgctaccgccgtggcttcattcacaatggcattatggtgctgccccggcagacatgtggcctcttcactcacacaatcttctataatgagtatcctggaggctctcgtgaactagaccggagcatccgaggtggagagctctttctgacagtgctgcttaatccgatcagcatctttatgacccatctgtccaattatggaaatgaccggctgggcctatacacctttgagagcttggtgcgcttcctccagtgttggacacggctgcgcctacagacccttcctcctgtcccacttgcacagaagtactttgaacttttccctcaggagcgaagccccctttggcagaatccctgtgatgacaagaggcacaaagatatctggtccaaggagaaaacctgtgatcgtctcccgaagttcctcattgtgggaccccagaaaacagggactacagctattcacttcttcctgagcctgcacccagctgtaactagcagcttccctagccccagcacatttgaggagattcagttcttcaacagccctaattaccacaagggtattgactggtacatggatttcttccctgttccttccaatgccagcactgatttcctatttgaaaaaagtgccacctactttgactctgaagttgtaccacggcggggggctgccctcctgccacgagccaagatcatcacagtgctcaccaaccctgctgacagggcctactcctggtaccagcatcagcgagcccatggagacccagttgctctgaactataccttctatcaggtgatttcagcctcctcccagacccctctggcactacgctccctgcagaaccgctgtcttgtccctggctactattctacccatctacaacgctggctgacttactacccctctggacagttgctgattgtggatgggcaagagctgcgtaccaacccagcagcctcaatggagagcatccagaagttcctgggtatcacaccctttctgaactacacacggaccctcaggtttgatgatgataagggattttggtgccagggacttgaaggtggtaagactcgctgtctaggccggagcaaaggccggaggtatccagatatggacactgagtcccgtcttttccttacggattttttccggaaccataatttggagttgtcgaagctgctgagccggcttggacagccagtgccctcgtggcttcgggaagaactgcagcattccagtctgggctgatgtcccagcctcccataccagcaaaatgccccctgcttccctaagggtcaggtccagagcagggcccacaagggggattagagtggcctggcccctccccctctacctcagtagcccccaggcctgagatggctgagaagggaagggtatccttttcccacagttctgggacaaataaaggggcttcctttggtaccccacataatagtgctaggtacctttgacccatcatcttgggaggtggggaggaatgagagggtccaggcagggtgtaggggaatgtattagtccaatgagatttccctcttcatccgcagcagtgtatctattctatacctggctatgggagagaccccttgcatgggagggaccccttgctatggcccctttagccaggcagtgggatctacctgtggcccggcctccctaatgtcattcacattgaatggggatgaggtcggacagtggctcatagagccgagtatgagccctagctgtgggctagaaatgtccttaataaacatccttatttttcaaaaccaacacaggaagggctctccgaccaggaagaggacagagagcaaatgannnnn

SEQ ID NO: 20496 - DNA, 683 bp, Homo sapiens
  misc_feature 1, 2, 3, 4, 5, 6: n = A,T,C or G
nnnnnncggagtgtatgtggacagtgccaactttattgaagacagttccctctgagactacaggcccagccactcaaaaggctgaggcaggaggatcgcatgagcccaggagtctgaggccgcagcgagccatggtcacaccaccgcaccccagtctggcaacagagcaagaccctgtctccaaaaaacaaacacaaaaacaaaacaaaacagccaaaagcaggctagaggatgctaaatgagactttcctaaatctccattttggctgggacccaaagctgaggacaaaaattggcaaatatatccatatgttgcagatttgctgccgatccatgaatgatttgttaaggagtagcccaaagctcctctaccacaggaggcaagagtgatggagaaaatatcagaaagtgcaagcttcttgaaaggggctggagtgccttgggtctgcaagctaagtgagggtatactttaaaacactcagggtttgacatgtgtctgtcccctggagtttggagagcataagatttggggtacctggttctcccctgaaacagtctaaaggaaagggattgagctgcctaattacacagccaagagagccatctgggtgagaacatggcgagagtgcacaccctggaaggtgtgtcagcctgaaagggcctcctggaagatcaaaggagcc

SEQ ID NO: 20497 - DNA, 648 bp, Homo sapiens
  misc_feature 1, 2, 3, 4, 310, 618, 619, 620, 646, 647, 648: n = A,T,C or G
nnnnaccgcggtggcggccgaggtacatggagttttgatcaacggacttatctcagctctcctaggaactaaaatgccagggccaggctgtgtatttctttcccaggaaattagctttccagcccctttatatatggaaggctgggttaaagttatggttccagaagcttccaaatcctgaaatagatgttttaaagatgcaacctcaaacaccaatgctgttgttaaagagcctatggggaattgctgctctttaccaaagaatggttgataggcccagaagcccatcttagttaggggaagggagcanggaagagggttgttcaaatgcccactttccagtttggccttatgcttcatgcagacttgagtgtatgcaggatttcattatctgcctgggttttttgtttgttttttgttttttaattcaagaagtaggctgagccacctcacccacccccaagatgaattttgaaaccataggctgctggttgtcccaccaaatccattctcttttctttccttttcctttttcctttttcctttcctttcctttctttttttccagacagagtctcactctgtcacccagactgagattatgccactgcactccannntgggcgacaagagtgaaactccatcnnn

SEQ ID NO: 20498 - DNA, 4480 bp, Homo sapiens
  misc_feature 1, 2, 3, 4480: n = A,T,C or G
nnnctaccacgcgtccggccggggcggagccgagagtttggagccccggagtggggtgtcggcgcctcattcgggtggagctgagccggagacaggcagttgtgaaaaacttcaggacaaaaatgtttcatttaaggacttgtgctgctaagttgaggccattgacggcttcccagactgttaagacattttcacaaaacagaccagcagcagctaggacatttcaacagattcggtgctattctgcacctgttgctgctgagccctttctcagtgggactagttcgaactatgtggaggagatgtactgtgcttggctggaaaaccccaaaagtgtacataagtcatgggacattttttttcgcaacacgaatgccggagccccaccgggcactgcctaccagagtccccttcccctgagccgaggctccctggctgctgtggcccatgcacagtccctggtagaagcacagcccaacgtggacaagctcgtggaggaccacctggcagtgcagtcgctcatcagggcatatcagatacgagggcaccatgtagcacagctggaccccctggggattttggatgctgatctggactcctccgtgcccgctgacattatctcatccacagacaaacttgggttctatggcctggatgagtctgacctcgacaaggtcttccacttgcccaccaccactttcatcgggggacaggaatcagcacttcctctgcgggagatcatccgtcggctggagatggcctactgccagcatattggggtggagttcatgttcatcaatgacctggagcagtgccagtggatccggcagaagtttgagacccctgggatcatgcagttcacaaatgaggagaaacggaccctgctggccaggcttgtgcggtccaccaggtttgaggagttcctacagcggaagtggtcctctgagaagcgctttggtctagaaggctgcgaggtactgatccctgccctcaagaccatcattgacaagtctagtgagaatggcgtggactacgtgatcatgggcatgccacacagagggcggctgaacgtgcttgcaaatgtcatcaggaaggagctggaacagatcttctgtcaattcgattcaaagctggaggcagctgatgagggctccggagatgtgaagtaccacctgggcatgtatcaccgcaggatcaatcgtgtcaccgacaggaacattaccttgtccttggtggccaacccttcccaccttgaggccgctgaccccgtggtgatgggcaagaccaaagccgaacagttttactgtggcgacactgaagggaaaaaggtcatgtccatcctgttgcatggggatgctgcatttgctggccagggcattgtgtacgagaccttccacctcagcgacctgccatcctacacaactcatggcaccgtgcacgtggtcgtcaacaaccagatcggcttcaccaccgaccctcggatggcccgctcctccccctaccccactgacgtggcccgagtggtgaatgcccccattttccacgtgaactcagatgaccccgaggctgtcatgtacgtgtgcaaagtggcggccgagtggaggagcaccttccacaaggacgtggttgtcgatttggtgtgttaccggcgcaacggccacaacgagatggatgagcccatgttcacgcagccgctcatgtacaagcagatccgcaagcagaagcctgtgttacagaagtacgctgagctgctggtgtcgcagggtgtggtcaaccagcctgagtatgaggaggaaatttccaagtatgataagatctgtgaggaagcttttgccagatctaaagatgagaagatcttgcacattaagcactggctggactctccctggcctggcttcttcaccctggacgggcagcccaggagcatgtcctgcccctccacgggtctgacggaggatattctgacacacatcgggaatgtggctagttctgtgcctgtggaaaactttactattcatggagggctgagccggatcttgaagactcgtggggaaatggtgaagaaccggactgtggactgggctctagcggagtacatggcgtttggctcgctcctgaaggagggcatccacattcggctgagcggccaggacgtggagcggggcacattcagccaccgccaccatgtgctccatgaccagaatgtggacaagagaacctgcatccccatgaaccatctctggcccaatcaggccccctatactgtgtgcaacagctcactgtctgagtacggcgtgctgggctttgagctgggcttcgccatggccagtcctaatgccctggtcctctgggaagcccaatttggtgacttccacaacacggcccagtgtatcatcgaccagttcatctgcccgggacaagccaagtgggtgcggcagaatggcatcgtgttgctgctgccccatggcatggagggcatgggtccagaacattcctccgcccgcccagagcggttcttgcagatgtgcaacgatgacccagatgtcctgccagaccttaaagaagccaacttcgacatcaatcagctatatgactgcaattgggttgttgtcaactgctccactcctggcaacttcttccacgtgctacgacgccagatcctgctgccattccggaagccgttaattatcttcacccccaaatccctgttgcgccaccccgaggccagatccagctttgatgagatgcttccaggaacccacttccagcgggtgatcccagaagatggccctgcagctcagaacccagaaaatgtcaaaaggcttctcttctgcaccggcaaagtgtattatgacctcacccgggagcgcaaagcacgcgacatggtggggcaggtggccatcacaaggattgagcagctgtcgccattcccctttgacctcctgctgaaggaggtgcagaagtaccccaatgctgagctggcctggtgccaggaggagcacaagaaccaaggctactatgactacgtgaagccaagacttcggaccaccatcagccgcgccaagcccgtctggtatgccggccgggacccagcggctgctccagccaccggcaacaagaagacccacctgacggagctgcagcgcctcctggacacggccttcgacctggacgtcttcaagaacttctcgtagatgctgcctagggttgcttgggccactgccctctccacacccatgactgccccttgcttctcaactaaagaatagtgcctcagcgctgcccacaccaccgccctcctcgctgtgccaccacccctccctctgctctcataggagttaggctgtcgtccccctccagtgcttggctgccccacaggccacacgctgcccaggctctgctgacttctgagcagttttccaggaggccggggggagcaggaggaggaaaggtagcccccgagggatgtccttggggaggggtcagctctggccacaatcctccccaccagtctcacccactaggataggaactgggccttgtgtgctggcttccgctgtcacccagcaaggcacaggctcctgtatttgagactaggatagcttcatcttgagcctgagccttagaatctgtagaggagcctggagtcggatctagccatggctggcagaggtttctagggtgggccccagccgtggcgtgaactgaggatgacccggggcagctggcaggagagagccttggcctgacctggcacagaaagggcagcttcagtctctgcagtgtccattatctgctgttccttcgagggttccaggctgtgtgtggggcccaagcatgccccacccacccctcctgggcccaggcagcacctggagcccacagagtctgtgtgtagccaggaagccccgctcaggtagccaccgccggggcactggctgctctgtcttggtcctgttaaccctccacctcctctcttggactccctccccaccccaaccactctttctttctcctttaacccaatggagactttctgatgcatcgttttctttgctgtgccaaagcaggtcagaagagggagaggaggggctgggggtgaggggccaggccatggccaaggggccagctgcccctcatttatcactctgaccttcacagggacagatctgatttatttattttggttaaaaaaaaaaaaaaggaacagaaacaactttgcattgcattggcttgacccataaactaagttatatccgtgggaaaaaagaaacaagagagacagccacatacaaagactcaaggacaaacaaagaaggggggctcaaaagtatccccggggcgaactctgcccgcctttttgtcagaggcgccacagcgggatataagcgggggggcgtaaagacgagagaacaggtgcggtttgagacccttgtggggagtgggccccccagaagcgcgagacacatcggttgtgacn

SEQ ID NO: 20499 - DNA, 2367 bp, Homo sapiens
  misc_feature 1, 8, 9, 2339, 2340, 2341, 2342, 2343, 2344, 2345, 2346,2347, 2348, 2349, 2350, 2351, 2352, 2353, 2354, 2355, 2356,2357, 2358, 2359, 2360, 2361, 2362, 2363, 2364, 2365, 2366,2367: n = A,T,C or G
natagacnncccttggtcacgggccgcgcgccattgtgttggtacccgggaattcggccattatggccgggggtggcgccagggatttgaaccgcgctgacgaagtttggtgatccatcttccgagtatcgccgggatttcgaatcgcgatgatcatcccctctctagaggagctggactccctcaagtacagtgacctgcagaacttagccaagagtctgggtctccgggccaacctgagggcaaccaagttgttaaaagccttgaaaggctacattaaacatgaggcaagaaaaggaaatgagaatcaggatgaaagtcaaacttctgcatcctcttgtgatgagactgagatacagatcagcaaccaggaagaagctgagagacagccacttggccatgtcaccaaaacaaggagaaggtgcaagactgtccgtgtggaccctgactcacagcagaatcattcagagataaaaataagtaatcccactgaattccagaatcatgaaaagcaggaaagccaggatctcagagctactgcaaaagttccttctccaccagacgagcaccaagaagctgagaatgctgtttcctcaggtaacagagattcaaaggtaccttcagaaggaaagaaatctctctacacagatgagtcatccaaacctggaaaaaataaaagaactgcaatcactactccaaactttaagaagcttcatgaagctcattttaaggaaatggagtccattgatcaatatattgagagaaaaaagaaacattttgaagaacacaattccatgaatgaactgaagcagcagcccatcaataagggaggggtcaggactccagtacctccaagaggaagactctctgtggcttctactcccatcagccaacgacgctcgcaaggccggtcttgtggccctgcaagtcagagtaccttgggtctgaaggggtcactcaagcgctctgctatctctgcagctaaaacgggtgtcaggttttcagctgctactaaagataatgagcataagcgttcactgaccaagactccagccagaaagtctgcacatgtgaccgtgtctgggggcaccccaaaaggcgaggctgtgcttgggacacacaaattaaagaccatcacggggaattctgctgctgttattaccccattcaagttgacaactgaggcaacgcagactccagtctccaataagaaaccagtgtttgatcttaaagcaagtttgtctcgtcccctcaactatgaaccacacaaaggaaagctaaaaccatgggggcaatctaaagaaaataattatctaaatcaacatgtcaacagaattaacttctacaagaaaacttacaaacaaccccatctccagacaaaggaagagcaacggaagaaacgcgagcaagaacgaaaggagaagaaagcaaaggttttgggaatgcgaaggggcctcattttggctgaagattaataattttttaacatcttgtaaatattcctgtattctcaacttttttccttttgtaaatttttttttttttgctgtcatccccactttagtcacgagatctttttctgctaactgttcatagtctgtgtagtgtccatgggttcttcatgtgctatgatctctgaaaagacgttatcaccttaaagctcaaattctttgggatggtttttacttaagtccattaacaattcaggtttctaacgagacccatcctaaaattctgtttctagatttttaatgtcaagttcccaagttccccctgctggttctaatattaacagaactgcagtcttctgctagccaatagcatttacctgatggcagctagttatgcaagcttcaggagaatttgaacaataacaagaatagggtaagctgggatagaaaggccacctcttcactctctatagaatatagtaacctttatgaaacggggccatatagtttggttatgacatcaatattttacctaggtgaaattgtttaggcttatgtaccttcgttcaaatatcctcatgtaattgccatctgtcactcactatattcacaaaaataaaactctacaactcattctaacattgcttacttaaaagctacatagccctatcgaaatgcgaggattaatgctttaatgcttttagagacagggtctcactgtgttgcccaggctggtctcaaactccaccaaatgtacttcttattcattttatggaaaagactaggctttgcttagtatcatgtccatgtttccttcacctcagtggagcttctgagttttatactgctcaagatcgtcataaataaaattttttctcattgtcaaannnnnnnnnnnnnnnnnnnnnnnnnnnnn

SEQ ID NO: 20500 - DNA, 1729 bp, Homo sapiens
actttttttttttttttaacatctttgtttttaaaatagaatgatagaactttgccagtctttaagatcttggcttaatttaatgtattaatctgtttgtgcaaacataataccaccatttaaaaatgttagggggatgagttgcagtttttataatagattttttttaaagtttggtattgtaaaacattcacacctctgtccctcaaaattgataattacgtttaaagtgcagtcatttgtggttagaatcttgttttgtttgcttccattattgagttcctcctaaggaaattgaggagagggactgaatagaagcccaaattcatataaaagttgcgtttaagttgtattaaaaatagatatataagaaaaaattctttcacttgatgtttgttagaccagaaagtgtgtgcgttctgtagctcagttcccagacagctttttaggtagtggaggaggtggcttcatgtggcacttgggcatttatattccacttgggagggtcaggctgtggccttctgaagcaggtggctcgttaaggaacgctagcagggcatggcacgtgagctccggaatagatgtcttcatcacttcttccactgtgtgttgacactgttttccttacctatttcctcagatccccagctttctcctctgctacgcattttcttcacagtgcagcttgcagtccgttgctgaaaatgattataagccctgcataatgttaagctttattgtgattacgtgtatgtttcttctttcttttaagcagacccatacctttccagggtcaaagtacagaatagaatacattgatacaaagtacagaaaaatactttgatttttatccatttcttttactctgtgtaaagacttgagaagtctaattcacaggcaaaccaatacagaattgactgcagttgaacagactagaagtatttgtgggaggagtgacatgaagcatgagttatctgattttttttgtagctgctatatattttaagccttcatttgcaattcatgtaacagttgtgtcataaattacacaataaagcagtcctgttcaaatttttttttaacgtggcttgtagaatttttaaaaaagtgatcttaggtttgctttttcatgcgggatgcagatgggtgctatcagagcctctcccacaccactatagtgtaataatgttattattactctacactgaaacgtattcagagttagatattattttagcttcagttgttctttagaggctttcaaatgtaccgatgatactgtttcttgcactgaatatataaacactccacagtgtttatattgggaagatattgggaaggaaatatatttgtaaaagatgaaggctgtatctatttttttttctttttaaagtttgttcacttaaattcttttgaggatgggatgtatttttcttgctgttcagtgctttttccttttcatctgttgttctgtggtcacagtgaccttagctacatagcagactttcccaaatgtattgattacaaataaacagttgttacttagcaagacctgaaaaatatgtttggcgggttccttcttgaagcaatgtgtggggtcttgctttccggaaattgggctccttaccctcggtgacggttttggctgcccccctttcctctagcgggcgtaatcttcggccttatgggcgacgggctgctccgcggtatcccggggcgccaccccctc

SEQ ID NO: 20501 - DNA, 2285 bp, Homo sapiens
ggccgcatcttttttttttttcttcctgtctgcttggaaagatggcgtccgcgcaaggaaggtaccggctctactgccacctcttccagctccaccgccggcgcagcagggaaaggcaaaggcaaaggcggctcgggagattcagccgtgaagcaagtgcagatagatggccttgtggtattaaagataatcaaacattatcaagaagaaggacaaggaactgaagttgttcaaggagtgcttttgggtctggttgtagaagatcggcttgaaattaccaactgctttcctttccctcagcacacagaggatgatgctgactttgatgaaggttcattcatagtgcagcatacatcagaacttcgttccttgttattgctgagtagtattccattaaatgtattccaatatcagatggaaatgatgcggagccttcgccatgtaaacattgatcatcttcacgtgggctggtatcagtccacatactatggctcattcgttacccgggcactcctggactctcagtttagttaccagcatgccattgaagaatctgtcgttctcatttatgatcccataaaaactgcccaaggatctctctcactaaaggcatacagactgactcctaaactgatggaagtttgtaaagaaaaggatttttcccctgaagcattgaaaaaagcaaatatcacctttgagtacatgtttgaagaagtgccgattgtaattaaaaattcacatctgatcaatgtcctaatgtgggaacttgaaaagaagtcagctgttgcagataaacatgaattgctcagccttgccagcagcaatcatttggggaagaatctacagttgctgatggacagagtggatgaaatgagccaagatatagttaaatacaacacatacatgaggaatactagtaaacaacagcagcagaaacatcagtatcagcagcgtcgccagcaggagaatatgcagcgccagagccgaggagaacccccgctccctgaggaggacctgtccaaactcttcaaaccaccacagccgcctgccaggatggactcgctgctcattgcaggccagataaacacttactgccagaacatcaaggagttcactgcccaaaacttaggcaagctcttcatggcccaggctcttcaagaatacaacaactaagaaaaggaagtttccagaaaagaagttaacatgaactcttgaagtcacaccagggcaactcttggaagaaatatatttgcatattgaaaagcacagaggatttctttagtgtcattgccgattttggctataacagtgtctttctagccataataaaataaaacaccttgcacacaacgaccacagccaacaacacagcaccaccaaaaaccacccaactcacccatacgacgacactcacaccaactctctactcacaccactactaacatacaacactataacaaccggcaatctaaccccctcgtgcgccaagctcaaaattttatatttatatactaccacaaactcacttactaccaccaccaccacctccgccccccccccccccaacacgtacccgccccaccaccagacccccaccccacacacgggccgctcgccgcggacgcaaaagcaggagtcaagagaagaccgccgcgtccgaacgcgccacgcgtcgcgagagggaacactaaccgcagctcaacggccgagcaagaagagcacggacacgctcagagcgacaccaccgaagagcaggcagtggcgggggacagcacgcacgcacgccggcgacaccgcagccgcaccccagtcgaagttcgacggccccaaaaagataagaaggactgaaagaagaaagagacaacagaaagaaaaagaacaacaggcaacaacactaaccgagagcgcgcggcacagagggctcgcattgcgcacaatccgactcagcaagacgagcaaaacgaagccgacgagcgcagccgagaagccgaaggaacctacgaggaagagcactcagagagatacggcagacaactaggagaagcggatgaccgctgacaggagaggacccgggagcggagtgagcaggaaaggggtgctcagtagcagaggaaaatagaagtagcgcgagacgaacgaccagacactagaaacacagagaaccagacgaaagaatgcacgaagagtcaacgacaccggaacacaagcaagactgtggagtgtgaagacagcgggggcaaggatcgtagaaagacacagcccgaacagaataaaaccaagacgag

SEQ ID NO: 20502 - DNA, 729 bp, Homo sapiens
  misc_feature 1, 2, 3, 4, 5, 6, 7, 8, 9, 10, 11, 12, 721, 722, 723, 724,725, 726, 727, 728, 729: n = A,T,C or G
nnnnnnnnnnnnaatgagactgtgctattcactgttcttttaggaatctctggctccccacaaacactattttgtgaagacatgctccagaccactgtgtatgccaatatctctttctccccagagcactgctgacacccctacacaaattaatgtccccatctctactgatacatctgataggtacaaacgatgtgtccgtgatgactggtggggctcatgtaatccccacctaagaaaagtagaaagtgcaactttatcttttaggttaataagtgctgagagatggaggtttttccttctcattttgatggagatgcctagaaaacctcgcctgacactctttgtccaacgcaggatagagaacatagcaacagaaagggtgaggcaaaaggcatggctggtgaagaggcactgcatgttatcaggatgtggggcctggtcctgtatcgtattcacatgtttttcttctttttatacagaaataggaatctaccagacagtaataaatgccacttctcacagaaagtctgacaggcttccactgcctctgagagaacaacaacatgttggctccataacataaagaaaaacaatgctgggtgcggtgcggtggctcgtgcctatgatcccagcactttgggtggctgaggcaggaggactgcttgagcacaggagtttgagaccagcctggccaacagggcgaaaccttctctctacnnnnnnnnn

SEQ ID NO: 20503 - DNA, 905 bp, Homo sapiens
  misc_feature 1, 2, 3, 22, 520, 905: n = A,T,C or G
nnncaggtactttgtttctttnttttcctttttctttttttaagacatggtcttgctctgttgcccaggctgcaatgcaatggtgccacctcggctcactgcagcctcgacctcctgggttcaagcaattttcctgcctcagcttcccaggtagctgggattacaggcgcccgccaccacaccaggccacatctatgtatttagagacagagtcttgctccagcctgggaagacagagccagacttccgtttcaaaaaaaaaaaaaaagggaaagataggaggaaattttgaacccagtgcccgttccttgcagatctgcgaacagtggcaccagcctctagtctcagtgtgaggtttgactccaggacgatgaatttaagctgggactgccaagaaaacacaaccttcagcaagtgtttcttaactgacaagaagaacagagtcgtggaacccaagctcagtaacaacgaatgtacgtgcacatttcgtgaaatttgtctgcatgaaggagtcacattngagggtcacgtgaatactagtcaaagaggattccacagaactgctttatccaaatcaggaagggagggtaccccgctcagaatttctccggtttcaatctacaatgcggatttaatgaactgtacctgggccgagggttccgacgccccccctgacgtccagtattttttgtacatacgaaactcaaagggaaggagggagatccggtgtccttattacatacaagactcaggaacccatgtgggatgtcacctggataacctgtcaggattaacgtctcgcattactttctggttaacggaaccagccgagaaattggcatcctattctttgttcttttgacatagacgattcaccctcccagctatgtcaccgtacgatcggn

SEQ ID NO: 20504 - DNA, 987 bp, Homo sapiens
  misc_feature 959, 960, 961, 962, 963, 964, 965, 966, 967, 968, 969, 970,971, 972, 973, 974, 975, 976, 977, 978, 979, 980, 981, 982,983, 984, 985, 986, 987: n = A,T,C or G
acatttgctatttttccacctatgtccacaccttctcatgaactttcaaagtcagaggcagataccagtgccattagaaatacagattcaacaacgttggatcagcacctaggaatcaggagtttgggcagaactggggacttaacaactgttcctatcaccccactgacaaccacgtggaccagtgtgattgaacactcaacacaagcacaggacaccctttctgcaacgatgagtcctactcacgtgacacagtcactcaaagatcaaacatctataccagcctcagcatccccttcccatcttactgaagtctaccctgagctcgggacacaagggagaagctcctctgaggcaaccactttttggaaaccatctacagacacactgtccagagagattgagactggcccaacaaacattcaatccactccacccatggacaacacaacaacagggagcagtagtagtggagtcaccctgggcatagcccaccttcccataggaacatcctccccagctgagacatccacaaacatggcactggaaagaagaagttctacagccactgtctctatggctgggacaatgggactccttgttactagtgctccaggaagaagcatcagccagtcattaggaagagtttcctctgtcctttctgagtcaactactgaaggagtcacagattctagtaagggaagcagcccaaggctgaacacacagggaaatacagctctctcctcctctcttgaacccagctatgctgaaggaagccagatgagcacaagcatccctctaacctcatctcctacaactcctgatgtggaattcatagggggcagcacattttggaccaaggaggtcaccacagttatgacctcagacatctccaagtcttcagcaaggacagagtccagctcagctacccttatgtccacagctttgggaagccctgnnnnnnnnnnnnnnnnnnnnnnnnnnnnn

SEQ ID NO: 20505 - DNA, 1015 bp, Homo sapiens
  misc_feature 1, 2, 3, 4, 5, 6, 7, 8, 9, 10, 11, 12, 13, 14, 15, 16, 17,18, 19, 20, 21, 22, 23, 24, 25, 26, 27, 28, 29, 30, 1012,1013, 1014, 1015: n = A,T,C or G
nnnnnnnnnnnnnnnnnnnnnnnnnnnnnntttttgagacggaatcttgctctgtcacccaggctggagtgcagtggcgcaatctcggctcactgtaagctccacctcccgggttcacgccattctcctgcctcagcctcttgagtggctgggactacaggtgcccaccaccacgcctggctacttttttttgtatttttattagagacggggtttcactgtgttagccaggatagtctcgatctcctgaccttgtgatctgcccgccttggcctcgtagccctttttgaccctcagggacagtcactgaattatgtcttgggagcccatgcttctgaggcaggcttagggagcaggagagcatacaggtgtagcagcctttccagctgatccccatgccctgctgcacctggagggctggaacaagctattctcatattggggaaaagggctgatgggacctcagtcatgtggcagagaatctgaaagccagaagcttggcaggtctgtctcggggtggggtgacggagagacatttccctagaattcagctgctgggagcagaaagacagagcaggggcaagtgctgggtttctgaggcccgcagtcctgagcatggcctcaggcagtctgttctatgacagaacctgaagaaaggcccaggcatttgcatctatgtgtgcagttctacttgtcctaaaggcacttctcacactgggagcctgcctgtctgtacctgtctagaaatcagcctggctgggacgcacaccaataggagggcatcctcacctttcccacccatgagtcgggactgttgcctgctgtgcagcaaaggcaccaggaacacggagtcagacacttagggtctaccccaggctccacttcccactgcctatttgactctgggcaagtcttttacagcttttcaaacttctctctttcttgagccgaagaaggaagaactaaaaaatgtgcggccgtttgactggttttgaaaaaaaactttccacannnn

SEQ ID NO: 20506 - DNA, 2419 bp, Homo sapiens
gtcgacccacgcgtccgaccgcccaccaagaaattgatgatgtggaaagagacaggaggagtagaaaaactgttttctttacctgctcagcctttgtggaataacagactactgaagctctttacacgctgtcttacaccgcttgtaccagaagaccttagaaaaaggaggaaaggaggagaggcagataatttggatgaattcctcaaagaatttgaaaatccagaggttcctagagaggaccagcaacagcagcatcagcagcgtgatgttatcgatgagcccattattgaagagccaagccgcctccaggagtcagtgatggaggccagcagaacaaacatagatgagtcagctatgcctccaccaccacctcagggagttaagcgaaaagctggacaaattgacccagagcctgtgatgcctcctcagcaggtagagcagatggaaataccacctgtagagcttcccccagaagaacctccaaatatctgtcagctaataccagagttagaacttctgccagaaaaagagaaggagaaagagaaggaaaaagaagatgatgaagaggaagaggatgaagatgcatcagggggcgatcaagatcaggaagaaagaagatggaacaaaaggactcagcagatgcttcatggtcttcagcgtgctcttgctaaaactggagctgaatctatcagtttgcttgagttatgtcgaaatacgaacagaaaacaagctgccgccaaagttctacagcttctgggttcttaaaaagcagcaagctatgtgagctgacacaggaagaaccgtacagtgacatcatcgcaacacctggaccaaggttccatattatataaggagctagaagcattatagctagggtttgattcactagtgcttacaaatggcccccatgtgtaggggacacagaaccctttgagaaaacttagattttgtgtctgtacaaagtctttgcctttttccttcttcatttttttccagtacattaaattggtcaatttcatctttgagggaaactgattagatgggttgtgtttgtgttctgatggagaaaacagcaccccaaggactcagaagatgattttaacagttcagaacagatgtgtgcaatattggtgcatgtaataatgttgagtggcagtcaaaagtcatgatttttatcttagttcttcattactgcattgaaaaggaaaacctgtctgagaaaatgcctgacagtttaatttaaaactatggtgtaagtctttgacaagaaaaaaaaaacaaacaaacacttctttccatcagtaacactggcaatcttcctgttaaccactctccttagggatggtatctgaaacaacaatggtcaccctcttgagattcgttttaagtgtaattccataatgagcagaggtgtacgcgaaattgtgttatgactgatagccttcagctacaaaaagataggactgacctggtttaaagtgttctattttgtaaatcattccatttgagtctttctgatgaacttggctatactgaaatctgttattttagtgaggctccaaaatgagcaaagctaggcctgattagagtagagtgactattaaaaaacataactttctaggagctataaatcaaagttttaaaaagatgtttggatatatttgagtattccgatcatgaaaacagaaattgccctgcctactacaaggacagactgatgggaaattatgcacctggtcaacttagcttttaagcagacgatgctgtaaaaactaacggcttctctgatatttattgtaagttttagtactgatctccttttccagtgctgcacactcctggtttggaactttaatagcgttgcaacgaaatcctatatccagtttcctgtaatttaattgaagaaaaatacatccaaataaagactttattattaacagaccagatagcatcagaaatcatgtgactgttatgattatcagaatgtcttaactttttagggcaaagttaacactgaaagttctagcttaagtgttgaaacttttgtgggaaaaaaaaatcacttttgaaactcagacttcagtgtatacccaataatttaaaattatgtgaaatgttttaaatttgtgaactcgtaattactgttttaatgattcagtttcttcagagtggtaattgtataaaattgctattgcagctttacattcaatatgatgtgcctgtaaacaaggagttttccccgtttgtaaaaagacattgtagataattgaatgtttgattttagaaaggtcattagtttcttgttacacattttgttagtctggtttttgttgcttatcgggtttaatattgttcttgaaaatagttgatgctatgttgtgtataacttttctaataaaagttgtgttataagctg

SEQ ID NO: 20507 - DNA, 1611 bp, Homo sapiens
  misc_feature 1, 2, 1604, 1605, 1606, 1607, 1608, 1609, 1610, 1611: n = A,T,C or G
nnaattatgtatttttaatagagacgaggttttgctatgttgtccaggttggtctcgaactcctggcctcaattgatccgcctgccttggtctttcaaagtgctaggattataggcacgagccactgcacctggcctcaaaaatcatttttaaaagaagcagtatattagctctgggtcttctcatgactaaaatgactatttttaaacataagaccatattttataaatgtacagataattcaaatctattatctaatgtattaggttaatttctatttgttctatactttttttttttttttgagatggagtcttgctctgtcgcccaggctggagtgcagtggtgcaatcttggctcactgcaagctccgcctcctgggttcatgccattctcctgcctcggccttccaagtagctgggactacaggtgcccgccccgacacctggctaatttttaaaaaaatatttttagtagagacagggtttcaccgtgttagccaggatggtctcgatctcctgacctcgtgatccgcccgctttggcctcccaaagtgctgggattacaggcgtgagccaccgcacccggcctattgacattttttaaggtttcagattttcttttgtgtgtctagtaattcgtcttttattgtcaaagataatttgcttatttgacttagaaaaatgatttgtgggcatacaatattgtatgtggtacctaaacgttgccatttagttactcttacagaacaactttcattacactgtatattaatataaattacttcttgagtaatcccagaattgtagaaccaattggtagaatcagaaactgtctttggacttgaggtttttcttcccttagggtaaattttaggttttctggttagtttccaggagttggcggacaagttcatatcactaaaggtgttcatatcactaaaatagtaatgctaatttgtttcatatttctattttaaaaagcaatcaataaagacatttcaatacatttcatttggaagcccccaagtgtatggtggttaataaggctcagcatgctggtaacccaccattctcttagctagtgactccactaaatagtgctagccgctgagatggttttgaccctttaacagcctttttttttttttgagacagagtttcactcttgttatccaggctggggtgcaatggtgcgatatctcggctcactgcaaccactgcctcccaggttcaagcgattctcctgcctcagcctgccaagtagctggattacaggcacgtgccatcacgcccagctaatttttgtatttttggtagagacggggtttccccacgttgaccaggctgggttcaaacctcgcctcagtgatcacccgcttgggtcccagtgctggatcagggcgagccccggaatggccaacaacttaatggctggttacttttacaagaagagaccctgggggcatcaccataactgcggggaaggcatatcatattccccgtcttcgttttccacttgcaacgtgtgccaaagttgacaactagcgggggatacacgatcaaatacactttgatgcagcgagacgacgcacaaaaaataannnnnnnn

SEQ ID NO: 20508 - DNA, 977 bp, Homo sapiens
  misc_feature 1, 2, 971, 972, 973, 974, 975, 976, 977: n = A,T,C or G
nnggtgcatgcgtgacctaagctgcgactatgttagagtagaactgcggagcaaggcgggtcttttcgaggtaggagtcgactcctgtgaggtatggtgctgggtgcagatgcagtgtggctctggatagcaccttatggacagttgtgtccccaaggaaggatgagaatagctactgaagtcctaaagagcaagcctaactcaagccattggcacacaggcattagacagaaagctggaagttgaaatggtggagtccaacttgcctggaccagcttaatggttctgctcctggtaacgtttttatccatggatgacttgcttgggtaaggacatgaagacagttcctgtcataccttttaaaggtatggagagtcggcttgactacactgtgtggagcaagttttaaagaagcaaaggactcagaattcatgattgaagaaatgcaggcagacctgttatcctaaactagggtttttaatgaccacaacaagcaagcatgcagcttactgcttgaaagggtcttgcctcacccaagctagagtgcagtggcctttgaagcttactacagcctcaaacttctgggctcaagtgatcctcagcctcccagtggtctttgtagactgcctgatggagtctcatggcacaagaagattaaaacagtgtctccaattttaataaatttttgcaatccaaaaaaaaagaaccatacgcaaacgacacaaacaacaccgacggaggccccatctgggggggggcggaacaaggctatgcaaagggggcaggggatataagtgtcactgacccgaattctggctcacagggggaaatgcgggccccaaggggcgaaatggaagcgggcaccgctatttctctcacaagggcaccagacaacaaggagagaccgcacacactgacgcacaggtggacatgcgcacaactcacggacagcgacatcggacgccacgcannnnnnn

SEQ ID NO: 20509 - DNA, 1136 bp, Homo sapiens
atcttgtggaggagtgcacagtcaatgcctgttcaagattaatcattttccctgtgcctatgactgaggctgtttctcacatcctgcccctggttttgcctgtcccaaggatttcgtctgaagggcgggacattccccctgcctcttcgcaccacagccagagcctgccattaggaccaatgaaagcaaagtacctcatcccctcagtgactaagaatcgcagtatttaagaggtagcaggaatgggctgagagtggtgtttgctttctccaccagaagggcacactttcatctaatttggggtatcactgagctgaagacaaagagaagggggagaaaacctagcagaccaccatgtgctatgggaagtgtgcacgatgcatcggacattctctggtggggctcgccctcctgtgcatcgcggctaatattttgctttactttcccaatggggaaacaaagtatgcctccgaaaaccacctcagccgcttcgtgtggttcttttctggcatcgtaggaggtggcctgctgatgctcctgccagcatttgtcttcattgggctggaacaggatgactgctgtggctgctgtggccatgaaaactgtggcaaacgatgtgcgatgctttcttctgtattggctgctctcattggaattgcaggatctggctactgtgtcattgtgggcagcccttggcttagcagaaggaccactatgttcttgattccctcggcagtggaaactacacctttgccagcaccgaggggccaagtaccttctggatacctccacatggtccgagttgcactgaacccaagcacattgtggactggatgttctctgtttctaatcctctggctcctggtgggattgattctcttgtgtctatcagtactaatggtgctggggcttgggctttgggccccccacgcattgcgtgctaagaacacccgggagggcaatttcttttactggtcttttcctcgttcctcggactggttcggtgattcccccgtggttttagcgcgacggttccggggggactcacccctgcgggcggggggtcgtgggacaccgcggttctggccttctactgctgcatcctctttgttgtggagcccgcggctccggggcac

SEQ ID NO: 20510 - DNA, 1027 bp, Homo sapiens
  misc_feature 1, 2, 3, 4, 5, 81, 134, 135, 136, 137, 138, 139, 140, 141,142, 143, 144, 145, 146, 147, 148, 149, 150, 151, 152, 153,154, 155, 156, 157, 158, 159, 160, 161, 162, 1020, 1021,1022, 1023, 1024, 1025, 1026, 1027: n = A,T,C or G
nnnnnctattccactgttctttctctaaattatttgctcctggccctatttaaagagttaacagtgtatttaggaagaganaactatcatttaatgaactctttagacataccagcctccttacaaaccttacnnnnnnnnnnnnnnnnnnnnnnnnnnnnnagacagggtctgccgctgtaacccaggctggaatgcagtggcgtgatcacggctcacagtgttgcccaggctgggcgcaaaccatcctcccgcctcagcctcccagtgttgggattacaggcgtgagccatggcacccggcttcatctctgtgcttccagagaggttattaaatgatgtgtccaagggcaccaaatgaggcagtgacaaagctaggttcaagtctgtttcaaagcccattttctccctcttgcgtaagttataccgcctccaaggcaaatgagttgtgtaaagtgcctaactccctcttgtgattccccattgccctcagaataaaaagtcttaaactccctactatgtcctacaaagccttgtgatgatcacttacttatatcgccagtttaatattgtcttattctcacgctgtattctcccatcactgaactttttttttttgctctcatgtgtcagattctatctcaaccacctgctcttccattgaccaaaaatagttttcccatctctggctaacttctgttccatctgtcaagtttcagcttggaaatcacttcctctaggaagccttccctgcctattcctgcccttgtctggattaggcatccctccactgtggtcccagtctttgctatctgtacactgtgtagtaaactgccctgtttccttgtctaggttgtaaactccatgaagccaggaacttaactgacttagacagtcttgaatcctcagcactagcatagtgcctggtacatgataggtacttaatcatttgttgagtgaatgagagacacagttaaggcaataagaatcctagttgctttacagcccatcatggtgaaannnnnnnn

SEQ ID NO: 20511 - DNA, 947 bp, Homo sapiens
  misc_feature 1, 2, 940, 941, 942, 943, 944, 945, 946, 947: n = A,T,C or G
nncttggatgtccaacccggagaactgctgccaacgatcaggtgttcaaatgccaactccaccaccaagtgggtataatgcctgggacacgctcccatctccaagaactccaaggactacacgctcttctgtcacctccccagatgaaatcagcttatctcctggggatttagacaccagtttgtgtgacatttgtatgtgcagtatctctgtatttgaagaccctgtggatatgccctgtggacatgacttttgtagaggatgttgggagtcgtttttgaatctgaaaattcaagaaggtgaagctcacaacattttttgccctgcatatgattgcttccaacttgtacctgtggatatcatagaaagtgtagtttcaaaggagatggacaaacgatacctacagtttgatattaaggcctttgttgaaaataatcctgccattaaatggtgtcctactccaggctgtgacagagcagtaagactaacgaaacaagggtcaaatacatctggatctgatacactcagcttcccattgctgagagctcctgctgttgattgtggaaaaggacacctcttctgctgggagtgccttggtgaagcacatgagccttgtgactgccaaacatggaagaattggctgcaaaaaataaccgaaatgaaaccagaagaacttgtgggagttagtgaagcctacgaggatgccgccaattgtctctggttattaactaactccaagccttgtgccaactgtaagtctccaatacagaagaatgaaggctgcaatcacatgcagtgtgctaagtgcaagtatgacttttgctggatttgccttgaagagtggaaaaaacatagttcgtccactggaggttattacagatgtactcgctatgaagtcattcaacacgtggagggcaatccaggaggactgtgggaggcnnnnnnnn

SEQ ID NO: 20512 - DNA, 3802 bp, Homo sapiens
accacgggctcggctggaacagtgctgagtcaattcatttaccatgacgctgccccaggcactcccagaagagagattctgagtcaggccagactgctgggtaaaacttctcaccagaataacactcctaccgggtcgtaataaacgaaggggcccagtgtgctggtggtagccagcaataaggtgctgttgcagctcagccctgcttgcagtcactcggttggctacctacaatctgggttaacagctgcccggttctaacttctccagaccctgacagttaaaaagagtaaaagtccctcgcaatttccgactgttggaagaactcgaagaaggccagaaaggagtaggagatggcacagttagctggggtctagaagatgacgaagacatgacacttacaagatggacagggatgataattgggcctccaagaacaatttatgaaaaccgaatatacagccttaaaatagaatgtggacctaaatacccagaagcacccccctttgtaagatttgtaacaaaaattaatatgaatggagtaaatagttctaatggagtggtggacccaagagccatatcagtgctagcaaaatggcagaattcatatagcatcaaagttgtcctgcaagagcttcggcgcctaatgatgtctaaagaaaatatgaaactccctcagccgcccgaaggacagtgttacagcaattaatcaaaaagaaaaaccacaggcccttccccttccccccaattcgatttaatcagtcttcattttccacagtagtaaattttctagatacgtcttgtagacctcaaagtaccggaaaggaagctcccattcaaaggaaatttatcttaagatactgtaaatgatactaattttttgtccatttgaaatatataagttgtgctataacaaatcatcctgtcaagtgtaaccactgtccacgtagttgaacttctgggatcaagaaagtctatttaaattgattcccatcataactggtggggcacatctaactcaactgtgaaaagacacatcacacaatcaccttgctgctgattacacggcctggggtctctgccttctccctttaccctcccgcctcccagccctccctgcaacaacagccctctagccctggggggcttgttagagtagatgtgaaggtttcaggtcgcagcctgtgggactactgctaggtgtgtggggtgtttcgcctgcacccctggttcctttaagtcttaagtgatgccccttccaaaccatcatcctgtccccacgctcctccactcccgcccttggccgaagcatagattgtaacccctccactcccctctgagattggccttcggtgaggaattcagggctttccccatatcttctctcccccacctttatcgaggggtgctgctttttctccctcctcctcaagttcctttttgcaccgtcaccacccaacaccttccatgacacttccttgctttggccagaagccatcaggtaaggttggaaagagcctctgacctcccttgtttagttttggaaccatactcactcactctccaccagcctgggaaatgaatattgggtcctcagccctgccaccctctgctgtcatcagctgatgcattgtttttagctcaggttttgataaggtgaaaagaatagtcaccagggttactcagacctgccagctctcggagtccttggtggttgaacttggagaaagaccgcatgaagatacttgtaagcacacatgatccctctgaattgttttactttcctgtaactgcttttgcttttaaaaattgaagaagttttaaacagggctttcatttggtcatccttgcaatccattggggtctagtttggaatctgacaactggaacaaaaagaaccttgaatccggtgcatgccttggttttggtgctgctgctgcttcccaagatcctcagcagggattaagaaggaacccggtgtgcacagcagatccccgaaattggtgggcttgacctcctggcaaattgctgcgtctttccacttgctgttcaggaccactaaatgctgaaatgtggatgcataccgaaataaaagcaattcattgtgtactaaaggttttttttttttttttaatttagtatttgtgtaaaaccaccttttgaagcagcaactatcaagtctgaaaagcaattgatgtttccattaatctttttctgggggggaataccttagttctaaggatttaacatcctgtaagtgaagtttaacataacagtattccataagcagcctttttattgtcagaccattgcctgattttaatataataaaaaaaaagtgtgcgttaatatttaaaaaaaaaacctttgtcaccccctgcctgctagctggggaccgctccttggcagatgtcatcatccatgagatctcccacagttggtttgggaacctggtcaccaacgccaactggggagaattctggcacaatgaagtttcaccatgtacgcccagaggaggatctccaccatcctctttggcgctgcgtacacctgcttggaggctgcaacggggcgggctctgctgcgtcaacacatggacatcactggagaggaaaacccactcaacaactccgcgtgaagattgaaccaggcgttgacccggacgacacctataatgagaccccctacgagaaaggtttctgctttgtctcatagctggcccacttggtgggtgatcaggatcagtttgacagttttctcaaggcctatgtgcatgaattcaaattccgaagcatcttagccgatgactttctggacttctacttggaatatttccctgagcttaagaaaaagagagtggatatcattccaggttttgagtttgatcgatggctgaatacccccggctggcccccgtacctccctgatctctcccctggggactcactcatgaagcctgctgaagagctagcccaactgtgggcagccgaggagctggacatgaaggccattgaagccgtggccatctctccctggaagacctaccagctggtctacttcctggataagatcctccagaaatcccctctccctcctgggaatgtgaaaaaacttggagacacatacccaagtatctcaaatgcccggaatgcagagctccggctgcgatggggccaaatcgtccttaagaacgaccaccaggaagatttctggaaagtgaaggagttcctgcataaccaggggaagcagaagtatacacttccgctgtaccacgcaatgatgggtggcagtgaggtggcccagaccctcgccaaggagacttttgcatccaccggcttccagcttcacagcaatgttgtcaactatgtccagcagatcgtggcacccaagggcagttagaggctcgtgtgcaatggcccctgcctcttcaggctctccaggctttcagaataattgtttgttcccaaattcctgttcccgtgatcaatttcctggagtttatatcccctcaggataatctattctctagcttaggtatctgtgactcttgggcctctgctctggtgggaacttacttctctatagcccactgagccccgagacagagaacctgcccacagctctccccgctacaggctgcaggcacgcagggcagcgggtattctcctcccacctaagtctctgggaagaagtggagaggactgatgctcttcttttttctctttctgtcctttttcttgctgatttatgcaaagggctggcattctgatgcttttcaggtttaatccttattttaataaag

SEQ ID NO: 20513 - DNA, 356 bp, Homo sapiens
  misc_feature 1: n = A,T,C or G
ntagggcgaattggagctccccgcggtggcggccgaggtactctccgcctaagtccatagagaggctaacacccttctagtttattagtctttgttaaacctatgaaattatgaatttaatcctaatttatatgcattgtggaggtcactcaaaaatgtttctctcaacagctgtgataagtataggcttattttgatgtctaaagatctgttacctgtatctgatttcatcttccaacacatatttattgaatatctactatgtcctgtgttctggacaagtatgcatgagaacaacatacacgaagtttatcattaaatgggaaaagagcagacattttaaaaagcacccaaac

SEQ ID NO: 20514 - DNA, 3749 bp, Homo sapiens
gagtcgacccacgcgtccgcggacgcgtgggcgctcccagactactccgttcctccggatttcgatccccctttttctatctgtcaatcagcgccgcctttgaactgaaaagctctcagtctaacttcaactcactcaaatccgagcggcacgagcacctcctgtatcttcggcttcccccccctttgctctttatatctgacttcttgttgttgttggtgttttttttttttttaccccccttttttatttattatttttttgcacattgatcggatccttgggaacgagagaaaaaagaaacccaaactcacgcgtgcagaagatctccccccccttcccctcccctcctccctcttttcccctccccaggagaaaaagacccccaagcagaaaaaagttcaccttggactcgtctttttcttgcaatattttttgggggggcaaaactttttgggggtgattttttttggcttttcttcctccttcatttttcttccaaaattgctgctggtgggtgaaaaaaaaaatgccgcagctgaacggcggtggaggggatgacctaggcgccaacgacgaactgatttccttcaaagacgagggcgaacaggaggagaagagctccgaaaactcctcggcagagagggatttagctgatgtcaaatcgtctctagtcaatgaatcagaaacgaatcaaaacagctcctccgattccgaggcggaaagacggcctccgcctcgctccgaaagtttccgagacaaatcccgggaaagtttggaagaagcggccaagaggcaagatggagggctctttaaggggccaccgtatcccggctaccccttcatcatgatccccgacctgacgagcccctacctccccaacggatcgctctcgcccaccgcccgaaccctccattttcagtccggcagcacacattactctgcgtacaaaacgattgaacaccagattgcagttcagtatctccagatgaaatggccactgcttgatgtccaggcagggagcctccagagtagacaagccctcaaggatgcccggtccccatcaccggcacacattgtctctaacaaagtgccagtggtgcagcaccctcaccatgtccaccccctcacgcctcttatcacgtacagcaatgaacacttcacgccgggaaacccaccttcacacttaccagccgacgtagaccccaaaacaggaatcccacggcctccgcaccctccagatatatccccgtattacccactatcgcctggcaccgtaggacaaatcccccatccgctaggatggttagtaccacagcaaggtcaaccagtgtacccaatcacgacaggaggattcagacacccctaccccacagctctgaccgtcaatgcttccatgtccagctttctgtcttctaggttccctccccatatggtcccaccacatcatacgctacacacgacgggcattccgcatccggccatagtcacaccaacagtcaaacaggaatcgtcccagagtgatgtcggctcactccatagttcaaagcatcaggactccaaaaaggaagaagaaaagaagaagccccacataaagaaacctcttaatgcattcatgttgtatatgaaggaaatgagagcaaaggtcgtagctgagtgcacgttgaaagaaagcgcggccatcaaccagatccttgggcggaggtggcatgcactgtccagagaagagcaagcgaaatactacgagctggcccggaaggagcgacagcttcatatgcaactgtaccccggctggtccgcgcgggataactatggaaagaagaagaagaggaaaagggacaagcagccgggagagaccaatggagaaaaaaaaagtgcgttcgctacatacaaggtgaaggcagctgcctcagcccaccctcttcagatggaagcttactagattcgcctcccccctccccgaacctgctaggctcccctccccgagacgccaagtcacagactgagcagacccagcctctgtcgctgtccctgaagcccgaccccctggcccacctgtccatgatgcctccgccacccgccctcctgctcgctgaggccacccacaaggcctccgccctctgtcccaacggggccctggacctgcccccagccgctttgcagcctgccgccccctcctcatcaattgcacagccgtcgacttcttccttacattcccacagctccctggccgggacccagccccagccgctgtcgctcgtcaccaagtctttagaatagctttagcgtcgtgaaccccgctgctttgtttatggttttgtttcacttttcttaatttgccccccacccccaccttgaaaggttttgttttgtactctcttaattttgtgccatgtggctacattagttgatgtttatcgagttcattggtcaatatttgacccattcttatttcaatttctccttttaaatatgtagatgagagaagaacctcatgattctaccaaaatttttatcaacagctgtttaaagtctttgtagcgtttaaaaaatatatatatatacataactgttatgtagttcggatagcttagttttaaaagactgattaaaaaacaaaaagaaaaaaaaagcaattttgaagcagccctccagaaggagttggttctgtattatttgtattaaatacgagcttgcgaaccaatcattttacatctggtttttaaaccgtaagggcaccatgaatgcagtgccgttactttttttttttttttttctgtgtgaaacaactcttattgtgatgttacttgttattgtttaaatgtacagaaacaaagggtaaaaatgtgttaatataccttgttccatggtgttgttcttttggggggaggggacgctactcaacacttaatagaatcacaacgctgttgggccagtagtatttattgctttagagattgcttgtcgtacctgtatgtcgtccctttttaaatatgttttcctttttcttgaaactgtataaagtttttttcccccttagcataagcatcttatatataacaactcatttgtacaaggtttttaagtttatatataaaatgtgtatatatatttttgtttcccctttttgactttttttttttctgtatgaaacccagatgtcaccaaatggacattaatagttgcattaaggatcagtagcattaacaaaagttgctttaaaagccattatgtaaaacaagacttgaaaatgagtgagggaattttagcgacactgtctgagcagcagtgggaaccatcttcgtttcccctttgaactcccagtgggatgccctaccctgcgcccttaggacccggactgaccgtgtacaaaactttacgtgccaaaattctcagtgaatctagctttctccctctttttgatgctgtaatttttgctcatcaattgcacaggcgtcgacttcttccttacattcccacagctccctggccgggacccagccccagccgctgtcgctcgtcaccaagtctttagaatagctttagcgtcgtgaaccccgcttctttgtttatggagttgttgcacttttcttaatttgccccccacccccaccttgaaagggttggttttgtactctcttaatttcgtgccatgtggctacattaggtgatgtttatcgagttcattgggaaataatagacccatccttatttcaatttctcctttaaatatgtagatgagagaagaa

SEQ ID NO: 20515 - DNA, 2171 bp, Homo sapiens
  misc_feature 1, 2, 3, 2169, 2170, 2171: n = A,T,C or G
nnnccgcctttttgggctccgggacccccgggagtgggagcggcagtcggggacgcctcaactcgttcactcagggaatcctgcccatcgccttctccaggccgacttcgcagaactactgctccctggagcagccaggccagggcggcagcaccagcgccttcgagcagctgcagaggtcccgacggcgcctcatctcccagagatcttccttggagaccctggaagatattgaggagaacgcccctctccggagatgtcgaactctctcaggttcacccagaccaaagaattttaagaagattcattttatcaagaacatgcggcaaccacgtaccaggaatggcagaatagtccttatcagtggcagaagatccttctgtagtatattttcagtgctgccgtatcgcgacagtacccaagtcggggacttgaagttggacggaggaagacaatcaactggtgcagtgagtttgaaagagatcattggtctggaaggtgtggagctgggtgctgatgggaagactgtttcctatacccaatttctgttacccacaaatgcctttggagcccggagaaataccatagactccacctcctctttctcccagttccgtaacctgagccaccgcagcctctccataggccgggcaagcggcacccaggggagcctcgacacaggtagtgacctgggagactttatggactatgacccaaatctcttggatgacccccagtggccttgtggcaaacacaaacgcgttctgatcttcccttcctacatgacaacagtgattgactacgtgaagccctcggatctcaagaaggacatgaacgagaccttcaaggagaagtttcctcacattaagctgacactcagcaaaattaggagtctgaaacgagagatgcggaagcttgcgcaggaggactgtggccttgaggagcccacggtggccatggccttcgtctactttgaaaagctcgccctcaaggggaaactcaacaaacagaaccggaagctgtgtgctggggcatgtgtgctgttagcagccaaaattggaagtgacctcaaaaaacacgaagtcaagcatttaattgacaaactgcaagaattcggctgaacagcggaaatggtgccttgaatcccggtaggctgatcgcctccattgcggcgaagtgtcctttaaacgggggcgagaccacatgcccggaaacacgggggattttctcggggggccatcaaatggggaaagacacaaggttccccagggcgcacaaactcactggtgtccaacaactccagagggagacctgacttttcttcctctcgacatagtttggggagaagcagtactagaaactttccaaggagtcttgggtgtgtagccaagaggagccatgagctatggactcctcaagcacgggaagaggaggtgtgtgctgagaacagagaggccctgccctctgtccactagcgagaatccctagctgccccagcccagtctttctccccggcattcacaaactttgcaagcgtggtccagggccttctccagatctgttccaacttggagtgtgaagggcttgagcatacgggggaagagagtctgcagaagttgggggaaaacttttaaaagataccctcattgtgtcaaagagtgtgccaatctatttttgtatcagcattggaagtgcactttcccctggggcgtgtgggtgtgtgaatgtgcaagtgtctgagagatactgcatcagccctagacccccagagccagtcccgccctttacagagcagcccttagcctggggccatgggtcaggctgaccttcaacaattatttctagatgatttctggataagaattgctctctcgctacccgaccagtttgaccttcttccagccctttggaaaatgactggccttggttcggtgctggctcctaccccacccgggggatacacgcagggcgttcctgatggtcggctgggtcagtccgctgcagatctggtatgtgggttcgtagtctcggcgtggtcacccggctgtggttttaccgcctttcccggggacggtgcggcgccccggttttctcctctctgtggtgtggctcgggggtctctctctacgtgtgaccagcggcccgggttggccgcgactgcgtgcaaannn

SEQ ID NO: 20516 - DNA, 3734 bp, Homo sapiens
ggagatgcttctgggtcgcggtgtgctaagcgaggagtccgagtgtgtgagcttgagagccgcgcgctagagcgacccggcgagggatggcggccaccgggaccgcggccgccgcagccacgggcaggctcctgcttctgctgctggtggggctcacggcgcctgccttggcgctggccggctacatcgaggctcttgcagccaatgccggaacaggatttgctgttgctgagcctcaaatcgcaatgttttgtgggaagttaaatatgcatgtgaacattcagactgggaaatgggaacctgatccaacaggcaccaagagctgctttgaaacaaaagaagaagttcttcagtactgtcaggagatgtatccagagctacagatcacaaatgtgatggaggcaaaccagcgggttagtattgacaactggtgccggagggacaaaaagcaatgcaagagtcgctttgttacacctttcaagtgtctcgtgggtgaatttgtaagtgatgtcctgctagttccagaaaagtgccagtttttccacaaagagcggatggaggtgtgtgagaatcaccagcactggcacacggtagtcaaagaggcatgtctgactcagggaatgaccttatatagctacggcatgctgctcccatgtggggtagaccagttccatggcactgaatatgtgtgctgccctcagacaaagattattggatctgtgtcaaaagaagaggaagaggaagatgaagaggaagaggaagaggaagatgaagaggaagactatgatgtttataaaagtgaatttcctactgaagcagatctggaagacttcacagaagcagctgtggatgaggatgatgaggatgaggaagaaggggaggaagtggtggaggaccgagattactactatgacaccttcaaaggagatgactacaatgaggagaatcctactgaacccggcagcgacggcaccatgtcagacaaggaaattactcatgatgtcaaagctgtctgctcccaggaggcgatgacggggccctgccgggccgtgatgcctcgttggtacttcgacctctccaagggaaagtgcgtgcgctttatatatggtggctgcggcggcaacaggaacaattttgagtctgaggattattgtatggctgtgtgtaaagcgatgattcctccaactcctctgccaaccaatgatgttgatgtgtatttcgagacctctgcagatgataatgagcatgctcgcttccagaaggctaaggagcagctggagattcggcaccgcaaccgaatggacagggtaaagaaggaatgggaagaggcagagcttcaagctaagaacctccccaaagcagagaggcagactctgattcagcacttccaagccatggttaaagctttagagaaggaagcagccagtgagaagcagcagctggtggagacccacctggcccgagtggaagctatgctgaatgaccgccgtcggatggctctggagaactacctggctgccttgcagtctgacccgccacggcctcatcgcattctccaggccttacggcgttatgtccgtgctgagaacaaagatcgcttacataccatccgtcattaccagcatgtgttggctgttgacccagaaaaggcggcccagatgaaatcccaggtgatgacacatctccacgtgattgaagaaaggaggaaccaaagcctctctctgctctacaaagtaccttatgtagcccaagaaattcaagaggaaattgatgagctccttcaggagcagcgtgcagatatggaccagttcactgcctcaatctcagagacccctgtggacgtccgggtgagctctgaggagagtgaggagatcccaccgttccaccccttccaccccttcccagccctacctgagaacgaagacactcagccggagttgtaccacccaatgaaaaaaggatctggagtgggagagcaggatgggggactgatcggtgccgaagagaaagtgattaacagtaagaataaagtggatgaaaacatggtcattgacgagactctggatgttaaggaaatgattttcaatgccgagagagttggaggcctcgaggaagagcgggaatccgtgggcccactgcgggaggacttcagtctgagtagcagtgctctcattggcctgctggtcatcgcagtggccattgccacggtcatcgtcatcagcctggtgatgctgaggaagaggcagtatggcaccatcagccacgggatcgtggaggttgatccaatgctcaccccagaagagcgtcacctgaacaagatgcagaaccatggctatgagaaccccacctacaaatacctggagcagatgcagatttaggtggcagggagcgcggcagccctggcggagggatgcaggtgggccggaagatcccacgattccgatcgactgccaagcagcagccgctgccaggggctgcgtctgacatcctgacctcctggactgtaggactatataaagtactactgtagaactgcaatttccattcttttaaatgggtgaaaaatggtaatataacaatatatgatatataaaccttaaatgaaaaaaaatgatctattgcagatatttgatgtagttttcttttttaaattaatcagaaaccccacttccattgtattgtctgacacatgctctcaatatataataaatgggaaatgtcgattttcaataatagacttatatgcaggctgtcgttccggttatgttgtgtaagtcaactcttcagcctcattcactgtcctggcttttatttaaagaaaaaaaaggcagtattccctttttaaatgagctttcaggaagttgctgagaaatggggtggaatagggaactgtaatggccactgaagcacgtgagagaccctcgcaaaatgatgtgaaaggaccagtttcttgaagtccagtgtttccacggctggatacctgtgtgtctccataaaagtcctgtcaccaaggacgttaaaggcattttattccagcgtcttctagagagcttagtgtatacagatgagggtgtccgctgctgctttccttcggaatccagtgcttccacagagattagcctgtagcttatatttgacattcttcactgtctgttgtttacctaccgtagctttttaccgttcacttccccttccaactatgtccagatgtgcaggctcctcctctctggactttctccaaaggcactgaccctcggcctctactttgtcccctcacctccaccccctcctgtcaccggccttgtgacattcactcagagaagaccacaccaaggaggcggccgctggcccaggagagaacacggggaggtttgtttgtgtgaaaggaaagtagtccaggctgtccctgaaactgagtctgtggacactgtggaaagctttgaacaattgtgttttcgtcacaggagtctttgtaatgcttgtacagttgatgtcgatgctcactgcttctgctttttctttctttttattttaaaaaatctgaaggttctggtaacctgtggtgtatttttattttcctgtgactgtttttgttttgtttttttcctttttcctcccctttagccctattcatgtctctacccactatgcacagattaaacttcacctacaaactccttaatatgatctgtggagaatgtacacagtttaaacacatcaataaatactttaac

SEQ ID NO: 20517 - DNA, 367 bp, Homo sapiens
  misc_feature 367: n = A,T,C or G
aaacagggtcttgctatgttgcccagactgatctcaaactcctggcctcaagcaatcctcctggcttagcctctcaaagtgctaggattacaggtataagccactgcactaagtccagtgaatcattttccagacaacatttactgaatatccgacactgccttccacagacggggaggtttcccaaagaggccgtgctttttgagaagctggcaagataaccctggggtggagggaaggtggcccgcagctgagaccaccaccttactgtccccaaatcctcaccagaggttgctgacacttccctcttccccatcctcatactacttttcaaattagaaacagtagaaaatgggatgattaggcn

SEQ ID NO: 20518 - DNA, 2053 bp, Homo sapiens
  misc_feature 1, 2, 2051, 2052, 2053: n = A,T,C or G
nnacgcgtccgaaagaacccggaaagagaaggactatgggggaactgatggcgttcctgttacctctcatcattgtgttaatggtgaagcacagcgattcccggacgcactctctgagatattttcgcctgggcgtttcggatcccatccatggggtccctgaatttatttcggttgggtacgtggactcgcaccctatcaccacatatgacagtgtcactcggcagaaggagccacgggccccatggatggcagagaacctcgcgcctgatcactgggagaggtacactcagctgctgaggggctggcagcagatgttcaaggtggaactgaagcgcctacagaggcactacaatcactcagggtctcacacttaccagagaatgattggctgtgagctgctggaggatggaagcaccacaggatttctgcagtatgcatatgacgggcaggatttcctgatcttcaataaagacaccctctcctggctggctgtagataatgtggctcacaccatcaagcaggcatgggaggccaatcagcatgagttgctgtatcaaaagaattggctggaagaagaatgtattgcctggctaaagagattcctggagtatgggaaagacaccctacaaagaacagagcccccactggtcagagtaaatcgcaaagaaacttttccaggggttacagctctcttctgcaaagctcatggcttttaccccccagaaatttacatgacatggatgaaaaacggggaagaaattgtccaagaaattgattatggagacattcttcccagtggggatggaacctatcaggcgtgggcatcaattgagcttgatcctcagagcagcaacctttactcctgtcatgtggagcactgcggtgtccacatggttcttcaggtcccccaggaatcagaaactatccctcttgtgatgaaagctgtctctgggtccattgtccttgtcattgtgctggctggagttggtgttctagtctggagaagaaggccccgagagcaaaatggagccatctaccttccaacaccagatcgatgattgcagatccctcttttccagttctccttcctctaggagccatgttatcctctgtcccccatagagtcaagcctagtgcttgaaggtcctgacgacacccacaacatacatgagagtaatgggattgagcatttatggcagcaacagaggagccacaaaatgttctttgttctttggctccaaaaagactgtcagctttcagtctcttttgatggactgttttatcagagttgactttaaatacagcttgtctcatgacacaacgcttccctacattctatttgtcaatgatgatttgcaactagttggagattctcagagcaggaaggaatcttttcaaccagagcaggaactgtcttctgcaatgccttggacttgagcctccagcctccacttgaacaccatgtgaagggaacctcagtacttcataaaatggcctttctcattcatctttcatgggaacatttattgtacaagcgctttgaatatcatgggcaccatgactgtgaccctacaggtaggattggatcactccatgagagtagccggcaggtttctacaatggcctgggaatggactgattatttttatacattttctggcctgagagaaagccaaagtcccctgctgttcacagcaaccctgcctgggagcttggaatcttggtaatctgcccggttggatctatggaggtagtctcaccctttttgtcttttgtgggaaattaagagaaataattatcagacatatcatcacctccagtggaactacagagacctggacccagctgcactattttaatgtaaaaataacagtatggccaggtgcagtggctcacgcctgtaatcccatcactttgagcagccaaggcgggcggatcacgaggtcaggagattaagaccatcctggccaatatggtgaaaccctgtctctactaaaatacaaaaaattagctgggcatggtgttgcgtgcctgtagtcccagctacnnn

SEQ ID NO: 20519 - DNA, 1001 bp, Homo sapiens
accctatattcttcttgatttctagccttttattggctctcagattgccagagttgggactcaatagtaagtaaccattctggtgaggtggtagcgattctaccagggtgtgttatcatgacagcagaatcactgcgtttttctctctactctgtggcatagactctatgccatagagtgacgtgtgaaaggcttgaggctccctaacctacgagacacccttggtccattctagtcagtatggcacgtgctgactgggttttgagtctcttgctgtaaaatcacattactgcacttccctgcattttctcatccaaaaatggggattacctgctttgtggatcggtttgcagatgaaataacacacgcagggtatctagcatggtcccccacatggcacattcagtgttagccacacttccatactaactgccctgcggggatatttaatgagcccttaaatggcagaaatgttgtgtcttttcctgttcccttagtattcctatttttgttggtaatttttcttatgaactatgcagttgtctagttcaggccattttagtatgcagttttatctttgcttccaacatgatttaatgttcccaaattggatttcacataatcctagtgtcctttgagacttgaattggttctaggccaaaaaagggtgagggggaaggaagaaattcagagtcaaatttggcaaataatatatccctgtcgttttgttttttctttttaagacttgggccaggtgtggtggctcacgcgtttagtcccagcactttgggaggctgaggcaggcaaatcacctgaggtcaggagctcgagaccagcctggccaacatggtgaaaaatacaaaaattatccaggcatggtggcccacgcctgtagtcccagctactcaggagactgagactgcagttagccgagagtgtgccactgcagtccagcctgggtggcagagcgagactgtctccaaaaaaaaaaaagtaacaca

SEQ ID NO: 20520 - DNA, 344 bp, Homo sapiens
  misc_feature 343, 344: n = A,T,C or G
ccgggcgggtacgcgggggtctccagagtgagtgttccggagagcacgtgttagggaaggaggaggctgcgggctaacctgccgggagggaggatgctactgcctgtttcctattagtagacaacccacctcctaatcacgtcctgcttcaaacaaggtatcatcacaggacagcctccgaaacaataactgtttgaatatccttaatcttcggcaacttcaataactccccaaaatatatgtaatcagagaattaacttttacaacttttggttattgtttgcttgaaccataaagcatagctctttctgggataaaaaagaaaaatcgctcacttgccggnn

SEQ ID NO: 20521 - DNA, 840 bp, Homo sapiens
  misc_feature 1, 829, 830, 831, 832, 833, 834, 835, 836, 837, 838, 839,840: n = A,T,C or G
nataggccaagattaccaaattgggcctcggtacccgggtggggaattttaaagggggtgtaatcacagagaggtggccatggcttaccttgccgaaccagcgggagagcaatatctgcttcattgtaatgtgatcacggaagaacttcattgtcaaaaagggaagctgcaacatcctgagggtcttagcatcaagcggtaacacaggaccctcccgaagatggcgtacctcagctctaacagaacatcgaacatcactctggttctagcagagacgcttttattcttgtctttgcccagaactcagccgctccagccacaggttcaactgctcatcatagcgatagtagtgggctcctgagagtggtcatatagctgactgataggggaggccgaggttgctcagtgctggctcttccccagtgggctgggtgacccggtccaaacctcgggactggtagaattcccgaatccgtttctcttcactgtcttgcaagccaggcaccagcttatacacgatgtcctgcatgacccggtccagtttgaggttgagcagtggctgtgtctcgtggatcttaatgttgcacatggggcagtactggcggcggccgaggtacttcacaatacaactcttgcagaaagtatgaagacactctgtgatggtggtggcatccacgaagtagccggcgcataggcagcaaacaatgtgttcattcaagtctttgatcttcactcgaacctcctcctgaccctcctttcccaggggagactacacaacgtcggcgacacaacgcgcaggccccctaattaattctagaagactttcgannnnnnnnnnnn

SEQ ID NO: 20522 - DNA, 1151 bp, Homo sapiens
  misc_feature 1150, 1151: n = A,T,C or G
ctggagttaaaaatagtgcaagccatgctcacctgggctatttttatctggaaaatagggactagaaacagtatagcaagcaaagaaaggcgagtttaccacaacaggattaaaactctcacacactttttaaaaagtcccactacagttttagaaatcggatggaaaggtggtaaagcagaggtgaggtacagggcagaggatcagctgagggcagttcactgagtgttagcaagatatgactaatactgtacataacaagcaataataaaagtcctctgccgaagacagaatagtgtaaaacctttccttcccctgcccttacagatttctagagaagataatttgggaataaaaggtataaaaggtttttgagaaaagagagatcaaaggacattcagagttcgggaggatatctgggaagcagacttagcttagatcctaaagggtgtagaagatctgcattgctggggaggagtgtgggagtggtaaaccagtcaaagaattcacagatgtgctgggaggaggagaaggggagcagaagcaggaaaacagtctggctgaaacactggttgtatttcaaagagcagtagcaaatcagggtggataaatggtgtgggcctaagcagctggtgagcattaaatgtgtaagaatcaaattgtatccttagcaaacctctgaagatttctgagtaagatttttatgagtgttggtaaatttatataggatgcatatgggtagtacatggagaaaaatgaattaaggggaaaaaaagtgtgtaacaatccagatagaaagtgatttttaaaattctaattagagcggtgcagtgggaattcaaatataatacttactgagtcctcgacgcaagatgctgagtacaccaatgttggaaatacaagggttctcgcctcaagtggctcactatagtagaggaaatgggaatggaaaccagccacagtgaagtatgctatcacggtgatgggaagtgccagaggaacagacaggacaaagttgtagctctgcttagagaaatgagggcaagaagcaagttagaggaccttctcaccactttccaaacgaaagaaatgaggaaatgcacagcactagaaaatgaaggtaggttcagggacctgcaaacaggttccnn

SEQ ID NO: 20523 - DNA, 530 bp, Homo sapiens
  misc_feature 1, 2, 3, 4, 5, 6, 7: n = A,T,C or G
nnnnnnnaatggaaacaacttgaccaaaaatttgtcacagaattttgagacccattaaaaaagttaaatgaggaaaaaaaaaaaaaaaaaaaaaaaaaaaagtactttttttttttttttttttttttaattacaacagatcttttaatgactatttttaacataaagattgttgttttgggaaacatctattctctttgaacatttcactaaattttcaatgtattaaataactgacagaaataagttctgtgttctgtacgcgggaagccacttcggggaaaactccttccgccccaggtttcttcttctcttaaggagagattattctcaccaacccgctgccttcatgctgccttcaaagctagatcatgtttgccttgcttagagaattactgcaaatcagccccagtgcttggcgatgcatttacagatttctaggccctcagggttttgtagagtgtgagccctggtgggcagggttggggggtctgtcttctgctggatgctgcttgtaatccatttggtgt

SEQ ID NO: 20524 - DNA, 3646 bp, Homo sapiens
  misc_feature 1, 3637, 3638, 3639, 3640, 3641, 3642, 3643, 3644, 3645,3646: n = A,T,C or G
naattatacaggggagagaccttatggatgtcatgaatgtgggaaatccttcagtgaaaagtcaacccttactcaacatcaaagaacgcacacaggggagaaaccatatgaatgtcatgaatgtgggaaaaccttctcatttaagtcagtccttactgtgcatcagaaaacacacacaggggagaagccctatgaatgctatgcatgtggcaacagcctttctcagaaaatccgacctcattaaacatcagagaattcacacaggagaaaaaccttatgaatgtaatgaatgtgggaagtcattctccgagaagtcaacccttactaaacatctaagaacacacagatgggaaatcttatgcatgtattcaatgtggaaaatttttctgctgctactacagtttcacagaacatctgagaagacacacaggggagaaaccttttggatgtaatgaatgtgggaaaaccttccatcagaagttggccctaattgttcaccagagaactcatataagacagaaaccctatggatgtaatgaatgtggaaaatcattctgtgtgaagtcaaaactcattgcacatcatagaacacacacaggggagaaaccctatgaatgtaatgtttgtggaaaatcattctatgttaagtcaaaactaactgtacatcagagaatacacttggggagaaaccctataaatgtagtaaacgagggaaattactctgggtgaagtcagaactttgtagaacacagaacataaagggtgagagaaatctgttaatataatgataatgagaacacctttgccctgaagtcagttctcacagtatagaagagaacttaaagagggaaaaaacaatatgaagatagggaatgcaggaaaacattattctggaatttggaccatacactatgttacaaaactaaaagtggaaaaaacttattggtgaatgaatataggaaacattttgcccaatgccactcttcattaaacatcagagaattcacacgggatgaaacctgggtcagcatccctaggttgagaagggatgcatttttctgctactactacagtttcacagaatacctgagaagacacacttggagaaaccttttgggtgtaatgaatgtgggaaaacctttcatcagaagtcagctctaattgttcaccacagaactcatataagacagaaaccctatgggtgtaatgaatgtggaaaatcattctgtgtgaagtcaagaggccagagaaaatgcacaaactgtaggaaactataggaaagcatttactatgaggttatattttatggagtatatgtaataagaaagtagcttctcagtgaacatcagatagtagagaaagtatttttaactgtatccaatgtgtggatgttttaagttaaaatctaaatttaatatagaacagaggtgttgagttgcaggatatctagcaatttaagaaaatgtggaaaaaatatttttattgagaaatagcattttactttgttaatatctagtttagttcattgtcaagactgctattttctaagagacttctaaagacgccactcaagccaatggctataagtagttcaaaggtttattgcttagccatatgaaaaataagggaagattttttagcaaggggacccacaaacaagagtgctcttgtatgtccagaagaaagagaaagaccatcaatcaggggccatagtacaggagcccaccagcaggatttttgaataatcctagggcagactaaattcagacgacccatctcagaatggtggatcaaagcagcaagtcaatttgccttgtatgcaacttatgaggattagtagaagagagtgggtccagatttctggtggtttctgccctgcagatgtctaacacataagccaggacattctgctgtgagtgacttattgtacccaactctatttctctccatactgaaacatgtctttcataggtgatacaactttttaaaatgtatgtgtagatataacttaaatatggagctttcaaaaagcacaaataggctggacatggtggctcatgcctgtaatcccagtactttgggaggctgaggtgggcaaatcacctgaggtcaggagttccagaccagcctggccaacatgatgaaaccctgtctctactaaaaatacaaaaattagccgggcatggtggtgcacatcggtggtcccggctactagagaggctgaggtgggaggatcacttgaacctgggaggtgggggtttcagtgagctgagatcatgccactgcactccagcctgagtgacagacactttaaaaaaaaaatagattttgctattgggtaaggtatagtagtcggcagcagaatggactgattgaggacaactataaaattacaaaaaatatttaaatgcaacttattgctatagaagcaaagagaactaaaggagcaaaattctagagagtggtaaatcccagaaagcacatgcacagaatgcagctctttgctctggggaccctttccacttctggctatagggaagaacctgaatactgaacttggttcaggcagagggccataccctgggggtcaggggaaggcatgggggggaccagaaaccagaagaacaatcaagactgcaatgaaaaaaatggatacattaggagcttcaaacacatataatttctcaagaaatttccagatgtctcatgctgcatagggcaggagcctgaaaagctaatttgagaagataataagtaggatttttgttttgttttgcattttgcagtacaaaggagaaatgattagaacttaggaagtgccagtgggttggtgaacatgccatcagtaaaagccctggaaacaaggtcatactagagattggttgtgccttgtcacaactgcaaacaatacctgagtggagtattcaaaaacttgcttagaaagaaaactctaggaacagatggcttcactgaagttattccaaatatttaagaaataataccaggcttttataaacttttctagaagaaaaaagatggaacttttccaattcagtttttgaggccagtacaaccttgataacaaaacctaaaaaaaaaaacaacaaaaaaacccataaagctatagaccaaagtctcatagatttagatgcaaaatcctaaaattgaaaaaaacatctagccatatccataaactatatcatcaccaagagatgtttattagggcaatcaaaagatttattattttaaaaaaatcagtgtggacttccattcctctttcttttgattcccccctttgacttttcatgtatctctcctgcttccttccccagagtggaggagttagacttgcctcgtgggatgagaggagttgtggcttgtgtctgctggcaccaagagggctgagggtgacggtgtgcgccaggaccggcggacggagatgggcacctttgttgacagatggtcacctgcgccaataatattgttgcgaatgatgacagcagaatctccattagagaagggttttcacactccgcatgcggggctgaaaccgggtgtgccttaataaccttcctctattttcgccccatcaccgtgcttgccaccaaaaaaagggggcaaaccccggcctcgcccnnnnnnnnnn

SEQ ID NO: 20525 - DNA, 212 bp, Homo sapiens
ccggggaggtaccactgaatccaaggctctcttgggtagcctatgtgcctcttggatggtatgtggaagccaaggactgtctgaacgtgctgaacaagagcaacgaggggaaagaattactcgtcccactgacgagttctatgtatgtccctgggaagctgcatgatgtggaacacgtgctcatcgatgtgggaactgggaactgggtacct

SEQ ID NO: 20526 - DNA, 939 bp, Homo sapiens
acaagaagaaaaagagaatacagatgacatcgggggtccaagagacattccatatttaagcttcataatgtccttatttgcacacatataccacactgccttcattttctccagctgatagatttgtgtaagaaatcttgactttgagagttcaatgtcattcccaacagggtctttatgtctgtctggtcatgttatcagccagtcttacttaatgtattaggccagttggaaaccatcattaaagaaactgaccctggtgacccgcgtacgcgggggcgcagctcttagtcgcgggccgactggtgtttatccgtcactcgccgaggttccttgggtcatggtgccagcctgactgagaagaggacgctcccgggagacgaatgaggaaccacctcctcctactgttcaagtacaggggcctggtccgcaaagggaagaaaagcaaaagacgaaaatggctaaattcgtgatccgcccagccactgccgccgactgcagtgacatactgcggctgatcaaggagctggctaaatatgaatacatggaagaacaagtaatcttaactgatgcagaagtgccgaaagagcactggactccggaaggacacagcattgttggttttgccatgtactattttacctatgacccgtggattggcaagttattggatcttgagcactttttcgtgatgagtgattatagaggctttggcataggatcagaaattctgaagagtctaagccaggttgcaatgaggtgtcgctgcaacagcatgcacttcttggtagcagaatggaatgaaccatccatcaacttctataaaagaagaggtgcttctgatctgtccagtgaagagggttggagactgttcaagatcgacaaggagtacttgcctaaaaatggccacagaggagtgaggagtgctgctgtagatga

SEQ ID NO: 20527 - DNA, 727 bp, Homo sapiens
  misc_feature 1, 2, 3, 4, 5, 722, 723, 724, 725, 726, 727: n = A,T,C or G
nnnnnattaagagctattacaaagttctttcctctaagtaaaaaacccactagaaaaagatatttgtaaaaatcattgcagggttactgatactgaatgaagcacaggggtactggaacagggataagttcttggataaggtgccaacatacctataaaagctgatttttgagtaaattattgattctaacatatgtaatggatttggtgtgataattttctgatctttaactataagtgactttttattctccaccagaaaagataaatgactgagaatgtaagtctgcgctctgattaacacaatggagaaacggaaaaactatctctgttaaaaactgattcctgtcattcttctgatatcaaataagaggaaggaaaataaactttttgtgtgtagatagaaaaacatacctgaggccaggtgcagtggatcacgcctgtaatcccagcactttgggaggccaaggcgggcagatcagctgaggtcaggagttcgagaccagcctggccaacatggtgaaatcacgtctctactaaaaatacaaaaattatctgggtgtagtggtgcgtgcctgtaatcccagctactcgggaggctgaggcaggagaatcactttaattcaggaggtggagggttgcagtgagccgagatcatgccactgcactccagcctgggcaacagagggagactccacctcaaaaaaaaaaaagaaaaagtnnnnnn

SEQ ID NO: 20528 - DNA, 367 bp, Homo sapiens
ggcaggtactctggctgcagactgaccttgctcaggtccgagaaggatggggcagccactggagtggatgccatctgcacccaccgtcttgaccccaaaagccctggagtggacagggagcagctatactgggagctgagccagctgaccaatggcatcaaagagctgggcccctacaccctggacaggaacagtctctatgtcaatggtttcacccatcagacctctgcgcccaacaccagcactcctgggacctccacagtggaccttgggacctcagggactccatcctccctccccagccctacatctgctggccctctcctggtgccatacaccctcaacttcaccatcaccaacctgcagt

SEQ ID NO: 20529 - DNA, 3899 bp, Homo sapiens
  misc_feature 1, 2, 3, 3899: n = A,T,C or G
nnnatgtgcaccagcgacatgtcctatggtgctattattagtgttgaaccactgaagggagtcagaatcacctccagcttcaaacaagttgggaagttcattaacctgtgtgtattctaagtctcctcgctttcgagctatatacctatgttctatagccaacactccacaaacttaaaacaaaatagtaatttatttacaatagcaaagatgtcaaaaataacaggaacaatatataacaaatccaagatttttatgaaaaaggcaaacagtatatacacgaaacaaaagatgaaacaaaatccatagggtaaacttaatttgaccttagctaaacagttacagaatgtggcaaaatggttatgatttatttaagtaaccctgggccaattaaacacacacacacacacacacaatctttttcaacccttctcttttaaatgctgaatcttcctctcaactcagttaacctttgaagaatgtaaccatgggaggccacacgagatttaggaagtgcaggctatttacatgtgcgctaaaggcatacttgttgacttggcaggctcacacttttaaaacagcaaatggaaggtataaactgtctggggtcctatttttctctcactgttcatttctgattttttgtgataatttctttcttatctaccacacaaaatgctgaaccagtcatcttttaggttcctcaagtgctctaaaagtgtttcccaagtttgaacaggcatcagaatcacttggagaacatgttaaaacaaagactgctgggtcccacgccagtttcccaattcagtaggactagggtggggctgagaatttgcatttttaacaaagtcccaggagattaagatgctgccaatgctgtccggccacactttgaaaaccactgctctgaaagattgcccctttaagatattgattagccatgtttttccttacatgaatgctagaatttgtgggaaatgaaattattaatactgagattcccagagaatacaaatacagcagcatgttatcggacttgttggatcacagacaggttaggtgtcatttgttgggtgttccattacaaaagtttttcagcatgctatgtatggttttgtctgatttatggctctggacagtgacattcaccacattcccttcgtcatttacctaaaattttaatttattgtttcaactattaggcaaacgtttgttcatacagttggaagaactgcagaatcttgtctataaaatcaaagatggcacaactctctctcttttgactcctgacatttacttaactgccgatttttaactgtggcaatgaccattccctagtatgttagcatctactagtcctctaaactgggcgcagtggggtaactcgagggcatgatttctgttgtggaggtggtaacagtccccactgattaaatatgctgtaaattaatactgaaatgaactttaagtgctctcaaaaaccactttatgcatgagtaatttatctcaggggaattggagatgctaataaaacaaatcctttatgaagataaaagaaaaaatgaattccaaggacatgctcatcaaaggactcaccaatcacctcttaacttctctgaaatattacttgcaaattcacagaactgaaatattaccagtatttgcatccgagtcacaaaattcaaagcaatcaagcactttgcattccactgctgtgaaaaagaaattaagaaatggggggatgaaaataatccactgcttttgatgtttattaggtttacaaaaactgtacattttttttccttgagaaaaagcattaacttagtactggtatcaaatagactaaacattcaataacaggaaaatattctgatttttatttttgcacgttattctcaagtacacaattacaataatgtcacacatccctatatgattttctttttatgtattttactttctttacaaagtgtacagagggagggacatacaatatttaataggatatttctacagaacaataacttatattatgtccttgtaaaaatctgtacctctttaaaacatttaactgaaacatccatttttttttagctttgctaatcaaaattgttttaagaattaaaactaggttgtaactaatgtcagtacctgcccgggcggccgcccgggcaggtacataggcatcctattcactgcaccctgtcacacccggcaccccccgccccgcacattatttgaaagactgggaatttaatggttagggacagtaaatctacttctttttccagggacgactgtcccctctaaagttaaagtcaatacaagaaaactgtctatttttagcctaaagtaaaggctgtgaagaaaattcattttacattgggtagacagtaaaaaacaagtaaaataacttgacatgagcacctttagatcccttcccctccatgggctttgggccacagaatgaacctttgaggcctgtaaagtggattgtaatttcctataagctgtaatagtggaggtattgtgggttcatttgagtaagccctccaaagataccattcaaataacctgggagaatgtcataaattattcagataattaacactgcatgaatctgattcagaggcatgcatttacatatgttgccctaattaccatttgatgatcataaatacaagtgaatgacattggacttttagtaacaaacttaatttttaaaaaggtgtagacaatggtggttaaaaaaaaaaaaaaacaggtaccaggttctgtgtgtttgcaccaagtaattgacatgttttttgtttaatacatgtggaccatgaacagtattcattctactttttcaaatgatatgctgtagaaaatattccttgaagatgtgagatttaaaaatttttccctttcaatgttgttttaattgtatttcttacttggtttttttgattgatagcacagtgataaatcataatactagacaaaattgtcttctctttcaaaccagagccatatatatgtctgtatatatgggacctactgcttctctgaggaaatgcataatctgttaatatcagacaaaatgagcaattggcagtgctcataatatattccaatttttattggaattttcgatggaatgttatttcaataaagccatgtaaggtgaaactttgataactttttactcttcaagttagggtaaattctgatccaatattcaattcatttgtgtactcccacatgcaaaatgctaaattacaatgcagacattaagaaaaaagtattgactggaggggttgaattccttgagaatttattttatagtctaaatcacaaatactttactcaatttagtttttaaaatagtaaactgaatatttttgttgtaagcctatcagagtcaatccttcgttggaattgttttcctgtttttccttactataaatcatttaaaaatgaattcattttcttagatggataagtctgtctcttgagaaataagtaaaaatatcctattttcagtattctgttagcacctggaacataggtcttcggtatagccagaaaacaagttatgttcgaagttagcttcactttggtcaacagtttgggccactacacaatctggaagctattaacactgaatttcctactggggccttcaaccttgctggagacatcgcccagatttctccgttcaagtataccatgggtgccgcagacggcacaattactcagatctggccctaccttcggcatttccacgccacttcatatccaacgtcggcggggcaaccgcacgacacaaacacggcgacgccgccgaatgcctgacaaacgcttatcttcaggcccacaagcaaccgtcgcattgtccaccgcaagccattaan

SEQ ID NO: 20530 - DNA, 1615 bp, Homo sapiens
  misc_feature 1, 1602, 1603, 1604, 1605, 1606, 1607, 1608, 1609, 1610,1611, 1612, 1613, 1614, 1615: n = A,T,C or G
naccaccttttgtgttttttttattcgagaagcggggtctcactatattgccttggctggtattgaattcttgggctcaagcaatcctcccctcttggcctcccaaagtgctgggattacaggcatgagccacctcacccagcccacttattcatctttttgcctgcaagctacaccaccaaagccccaggtcaaacatctttctccacagactgtgagaaaagagcctttcttcctcctaatttgtaatggctttcagctctatatgtctagcttcaatcctgacatctgcagcttacattttttcttcttacaatgttcaagttaaattagaaacatctgaagactggggaagcagataggtgccactctggagtaggactggcattcaaccagcatgctctgatgggattgtatttgctgttaaaataatgaaaatgttcagtcctagttgataaaaggcagctgctgtgagccctctaagtgtcccccacgactccaccaatagcctagttctcctctaagatccccaacaacccagcaacacaaccatggaagtaaagaggcaatgctggtaccataaggagcctcctgtgctggctgcttctgctggaattggccaatgcccatgccaaacctatggttaaatgctttgaattccatcccttttccagtagatcatgactgcacatgcatgatttggaaccttccctgtatactgtcaaagccatcctgattctggacaatgatggagatcgacttttgccaagtactatgacgacacctaccccagtgtcaaggagcaaaaggcctttgagaagaacattttcaacaagacccatcggactgacagtgaaattgccctcttggaaggcctgacagtggtatacaaaagcagtatagatctctatttctatgtgattggcagctcctatgaaaatgagctgatgcttatggctgttctgaactgtctcttcgactcattgagccagatgctgaggaaaaatgtagaaaagcgagcactgctggagaacatggaggggctgttcttggctgtggatgaaattgtagatggaggggtgatcctagagagtgatccccagcaggtggtacaccgggtggcattaaggggtgaagatgtcccccttacggagcagaccgtgtctcaggtgctgcagtcagccaaagaacagatcaagtggtcactccttcggtgaagacctcactgttcctggctcttcatcctcttcaaaaaatttgcatgtctgctgtgaattttcatctagttccccaatcgatgctctcagggtcatctcggggatcacagggatccttaaatctccattctgtttgtggttgccccctcaacctcccctaaacccttcctattctttttcattcttcttgcagttctgggagtaaagctcccagcatattcagataatagggcggggaagcaccctctttctttctagactggtatgcccacatgcccttgcctgaatttggtaatctggccttgtgggtcacttcgatcaaggggaccacgggggggtcccctggcctaggcgctcacagccaggggaaaaaccttaacccccnnnnnnnnnnnnnn

SEQ ID NO: 20531 - DNA, 1128 bp, Homo sapiens
  misc_feature 1, 2, 3, 4, 5, 6, 7, 8, 9, 10, 11, 12, 13, 14, 15, 24: n = A,T,C or G
nnnnnnnnnnnnnnngaaaggcanccagtttacccttcccccgtaacaatgaaggcttggctctgtgtgatgcactctaaccagcccacacttcagcagcggcatcatttggattcagggagagtttctgcagcatgaaggagtaggaagaacacagggtgagttcacaggaatccctacttttccatgtgaccttgtttggcctgaagtgattttcttgacctctctgggcctgactttcctcatctgtaaagtggagggtttgaaaatatcacagaaaacaaaataccttaaaggatgctctggcacacagcaggtatttccatataatgatacctcccattcctttttatgtgagctatatcccctgaaacccaggtttgactaaattgagaccaactttcataatatacacaatgactgttagatatgaattttggtgtggtgaagatgggagtgaaaaagtagaaaagtcaaatctcattgaataaaaagggtggaacccaagatgagaacatttgggatagtaatcatctgtatggctcccagaaacttctaagaacttggcacattggaacctctatgcaaatcatatacgcctcaagagttggtcttcgagcaggagggcttctggttaatttccagagtcccctgggaaatctgggcaatagagatgtggccttcagtgcagccccgcttgggttagctgggatctgatttaaatcagcaaaacttctgactgataaaggtaggtgcaattaacacagctcacaaaaaatgtgttagcaaaatgtctgcagtaatgctttcaagtctcaagaaaattcttttctcatgaggaccaaggactttaatgtttctgaatatctccacaagtgaaataaaatattaattcatcctcttggcacctcagagacataggtaactggcataaataaataccaatttctcaaggtctaaatgtgaaacattctcataacgtgtttttttcacatattgccccttccctaaatcttaaccattaaatacagaaaaaaatgtcatacaataattaagagttacccatttgccagatacaactagccttctgaaacatccctaaaccctcgggcatatcacacagagagt

SEQ ID NO: 20532 - DNA, 1944 bp, Homo sapiens
  misc_feature 1, 1917, 1922, 1934, 1935, 1936, 1937, 1938, 1939, 1940,1941, 1942, 1943, 1944: n = A,T,C or G
ngaagggaagagactgaaaatacgaaagaagtatctggtgatatcatctgagggaaatccccaggcttaggtttgacttggttcagggttggaggtttatagcctcttgtgtgatccttgataccagcaaactgggtccaaatcccaggagttatcctcactccaccatggactcactgttgttgtagcacttttgttttcccagtagttaaatgctacctgtgcagctgacatcactggactagatctgggaatagatgaaataatgttgaaaacaaaactttagaggtgccttctggtatcagatgctgcaaggccttgagcatcagagtgtgttaagtcccatctactgtatcaaggccagagtgtggctccatgctcttaggaagggtttcccaaccacggggccagagcccaaaaggtttccccttccctaatatgctaatgaacgaaacatgtaaatctgttttcccctgttaggctagtcttactgtgatgagaagtgtacctggctttccttttcctgggtggagacagctggggcatattcgggtggcattccctctcagtaccagaggccccactgcctgcagctggaggcatgtgaccataagctcctgcttttgctttttgggcttgcatccctcttttctgtgaactctggagaatgctggaattaaaacatttaagcattttgattaaatgagcttgagctcctctgttcttttctaggtgctcttgttctccaactctcctgcctctttctacctctgccctatacattccagctctggagacagagtctgaaactggagtctctggagggatgagaaaaccatctttaattgtaacaaatggggtgggtagacgagcttcagagtgggagcagattgcattgaggttcaactctcccacccatgcctgggagtcaagtcttggagaggagtaacactttggtggtcagcacagctcagagtcagagacaatagccagcaggccagcaaggctggctgtgtgaggcacaggaagcagggcataggtagggagcagagctgggggttctctctctgctggaagatagcagctgccccttggcatatgggggttgcacactgcaccttgtagccagggctgctatttgctgttctgtgaaggagttggccactcattgtgacatgcaggacagtggccttctgagaacctgctgcttgcttgcatagtgcagcacaagtgaggacaggcaggggtgggagcatttatggtgatcagatgtgcctggcaagcccctgttcagacattgctcacattccaaatgttttcgtgtagaatattgcacaggtctggggacgctctacctgtgccctgtgagtgttaataatggtggagaaagagtgtagctgtgcccttgagagagaaggtgagggaaagagtgcaccagtcagctgaccgtcagctggctaggctcttcactgagtcctatgtcgcagtgcacaaatcactgcccatcaggcctcagtttcctcatctggtaaatggtgataacatcaatctgcccccccgccagggtgctgttatgagggtcaaaagtggtagtggagggtaatactgggtgagtccattgtgtgtgggaggagaaaggctttacattcacctggtacatgaaggtttttctgcttcaggcagcacagcacagccatttcttctggcctttacaaaaaggcattttgttatactacagtgtaaacctcatttttttcactccaaaaggtagcagcccctcttcttcccaccctggacctgcctttcactccctgggcacagagcgcatggtaccattgatgtttggtttattccaggatccaaggagctggttctgctggttggaccaaacctcgtgagccagccacccctgacccnatgangagagctctgannnnnnnnnnn

SEQ ID NO: 20533 - DNA, 583 bp, Homo sapiens
  misc_feature 566, 567, 568, 569, 570, 571, 572, 573, 574, 575, 576, 577,578, 579, 580, 581, 582, 583: n = A,T,C or G
accttattacatatgatttttattagtttctggaggcaaatttaatttttattttaaaatcaaaatctattttaaaagaaatagttctcaaaaagacaacgatgactgggtgtggtggtgtgtgcctgtagttcaggctgctcgggagacagaggcaggagaaccacttgaggccagttcagtctagcctgggtaacatagcaggaccctgtccctaaaataataaaaaatttaaaaaccacaataatgtgagttacaaaaaagtgtaacttatgaaaagtcgtatttatattgacctttgtaagagctcaattatttcaggaagcaaggagtatcaccattctgagtaatacaatttcaactaatctttatttcttctacttgaagtcagtgcctatctaccacaaacattcctatatcagtgtgcaaattaatttggagacaataggctttttacgacaatgaattggttaacttttaaaagttgttttttatctcacattttataatacgataaataaatgtacagcagatctttaagaacattgtttaactataatgttgannnnnnnnnnnnnnnnnn

SEQ ID NO: 20534 - DNA, 1067 bp, Homo sapiens
  misc_feature 1067: n = A,T,C or G
agggagtcgacccacgagaggagtgacgctgctcacctctggtgccaaagggcggcgcagcggctgccgagctcggcctggaggcggcgagaacatggtgcgcaggttcttggtgaccctccggattcggcgcgcgtgcggcccgccgcgagtgagggttttcgtggttcacatcccgcggctcacgggggagtgggcagcgccaggggcgcccgccgctgtggccctcgtgctgatgctactgaggagccagcgtctagggcagcagccgcttcctagaagaccaggtcatgatgatgggcagcgcccgagtggcggagctgctgctgctccacggcgcggagcccaactgcgccgaccccgccactctcacccgacccgtgcacgacgctgcccgggagggcttcctggacacgctggtggtgctgcaccgggccggggcgcggctggacgtgcgcgatgcctggggccgtctgcccgtggacctggctgaggagctgggccatcgcgatgtcgcacggtacctgcgcgcggctgcggggggcaccagaggcagtaaccatgcccgcatagatgccgcggaaggtccctcagacatccccgattgaaagaaccagagaggctctgagaaacctccggaaacttagatcatcagtcaccgaaggtcctacagggccacaactgcccccgccacaacccaccccgctttcgtagttttcatttagaaaatagagcttttaaaaatgtcctgccttttaacgtagatatatgccttcccccactaccgtaaatgtccatttatatcattttttatatattcttataaaaatgtaaaaaaaaaaacaaaaggaaaaaagaaaaaaaaacaacgcgaagggagaaagaagcgagctgggagagagcaagaggcaggagaggagaagaggagaacaagagggcagcaaagagagaaggagaaggacggggagacggccaacacgaacgacgcaggaaaggagagggagcacagcagtagtcgggtaaagagaaaaagaggaggagagggaaggagcagggacacgaaccan

SEQ ID NO: 20535 - DNA, 424 bp, Homo sapiens
  misc_feature 1, 2, 3, 4, 5, 6, 7, 8, 9, 10, 11, 12, 13, 14, 15, 16, 17,18, 19, 20, 21, 22, 23, 24: n = A,T,C or G
nnnnnnnnnnnnnnnnnnnnnnnngagatataaattggtatgttcacatgttggtaagaaagatctaatagctagaaaaggaactgctgaagttgcaggaaagagaagagaaatataaggaatgaaacctgaaaaatagagggcagagtcagaggggtggagaaggaaggggccctgacgggaggtggaccacttcttccaaggcacatgcaggcaggcacctctctggagggtcccatggctggctatgtgtggcagtgcatgaaatagtcactgaatatgctcccttgctgtcctctgcttgtgctcaccgaggagtgactgtgtctactggaaacaagtttgccttttcactgttctaaataaaaggatcaatgacctcaaatctaaagagcatcaggaaacctctgaagcacagaactgt

SEQ ID NO: 20536 - DNA, 1117 bp, Homo sapiens
  misc_feature 1, 2: n = A,T,C or G
nnataagaatgcataactagtttaatgttttttttagtttgcctgtacggtaaacaaatcagaagagcatttattgggaactgacacgtcaggcctcacaggtgctgggcaggaatcacagaggcttgctctgcatcatgtcttccgttaacctgaagctttgggtttattgtgtttggcaaaccactcgtcacttttatctgctgccattgcatcatccaacaatttgcttccctctggatccatcttagaaagttctcgaaatgcttcatccccgacaaagcaaatttcatgtccgtcagggtcggccagaatgaccacccgcactgttgctttccctggggtgtccaggctcaccaggggagtcagaatcttctggttctcccttttcatcaagtcttctaagtctggcaactctttctgggggcaagagaaggcaattcttccaaaagctgctgcatggtccaccccacccttgacgccctgtagctccagcttacactggttatcagcatagcccagcaaagccctttgcttttcttcatctttttcataaattttcattcccagtagattacaccagtagttcaaggacttttgaagatcagacactgctagagttacttttaatacaggatctgactgaggcagactgcgattctgcatatagaacttatatcctcccggggcctcggtttcaaaaacaccttctgcaacttccgtcagtggccactccagcttcctggcgttgctgacagcctggctagaagcgagcgtgattcccataaagtcattgccaagcttgtagtctccgacgccataattgtaagtcagttctgcgacaaaatgatcatcctcaggcccaaatcccaccattgttttactccatttcccatcataaggctttgagaaactgtcttctgttatccgggtgtagtcagagcagtgagccgagatcgcgccactgcactccagcctggcgacagagcaagactccaccttcatccccaggacgtcccgatagaaacgcgccgtctggaagcggtttcccactttgaatacgaagtgcagagctctgcgagcagccatgattcccgccgcacgcagccccccgcgt

SEQ ID NO: 20537 - DNA, 1041 bp, Homo sapiens
  misc_feature 1, 2, 3, 4, 5, 6, 1030, 1031, 1032, 1033, 1034, 1035, 1036,1037, 1038, 1039, 1040, 1041: n = A,T,C or G
nnnnnncagcaaaccagatggagaaggaaggccaaaaagataagtagaaagctggaccatgagctccttgagggcagggactgaatggttactatgtccccagggcccagcatgaccttctcctggattcctcatcttccttctgtgacctgtgtctccatcagtagcctggacctacagcgctgttggtggaggtcctgcctccaggaatagatggacatggcctggcagatgatgcagctgctgcttctggctttggtgactgctgcggggagtgcccagcccaggagtgcgcgggccaggacggacctgctcaatgtctgcatgaacgccaagcaccacaagacacagcccagccccgaggacgagctgtatggccagtgcagtccctggaagaagaatgcctgctgcacggccagcaccagccaggagctgcacaaggacacctcccgcctgtacaactttaactgggatcactgtggtaagatggaacccacctgcaagcgccactttatccaggacagctgtctctatgagtgctcacccaacctggggccctggatccggcaggtcaaccagagctggcgcaaagagcgcattctgaacgtgcccctgtgcaaagaggactgtgagcgctggtgggaggactgtcgcacctcctacacctgcaaaagcaactggcacaaaggctggaattggacctcagggattaatgagtgtccggccggggccctctgcagcacctttgagtcctacttccccactccagccgccctttgtgaaggcctctggagccactccttcaaggtcagcaactatagtcgagggagcggccgctgcatccagatgtggtttgactcagcccagggcaaccccaatgaggaggtggccaagttctatgctgcggccatgaatgctggggccccgtctcgtgggattattgattcctgatccaagaagggtcctctggggttcttccaacaacctattctaatagacaaatccacattaataaaaaaaaaagaaatannnnnnnnnnnn

SEQ ID NO: 20538 - DNA, 1904 bp, Homo sapiens
  misc_feature 1, 1900, 1901, 1902, 1903, 1904: n = A,T,C or G
nagagaaaagtggcctccaggagctttcatttatgtcttctccagaccaggttttcctgtgatcttcctttaatcccctttcaaccaacaggtgaagttcttccagcccacagaggtagtaatatcatcttttctatctcctcctctccttggccatgtaatgaagcaaaatattatttatttagcccaggcttgagagccacgtgtttgtggacagtcttcatctagattccataccctggcctaggcgaggtaaggctctctggttattgccaggatggagcccctctaccccagtctgctgtagggaataccctaattagttgaggcatgcttttggaatcctggcatgttggcatatggctggtctatcctttttaagatctctggttgggggtatctggatatggattaggagggacaaggagcctttttcttggctaatgttttccaatacttttttgaatggtgccagcccctccaggcatcccacccccaaatcatcatctttagtactaacagggtgtctggtcttagaagcctcccttcagatcccagctgaccctggtgactgcctggccttgatgttggctgcagccttctgatagaaccacatggattccacccacagctggccaggcttgttacatgggtcagggaatacaaatggcccccccccagggagcaggtgttggcctcagttttcagggacccttggtgttgctccttacctagagcccattaatctaccccatcaactctctgccatgaaagccatcttccaggagccctgttttttggagctgaactgcacagattatagctgctattgtacttaaataagggagaggaaaagaaggttctcaggcacagactttctatttttctcaagccaaaccagtttaaaatgtctagcagaatgaactgtatttccatttcttcatgtctacctgccttccccccacaccctaaagttgtacttgtttctagcaaactagaaggaaaagataggaaagcctggcactactaacctcacctctcatacacctctttgaaggccccagctcttttgttcaggcctctcttctcccctagactcactcagcttggtatccatcatcttgagcattcttcagtagattcatctagggttcagattccagactctcagctgaagacagggagccaatttcccccaggtccctgcaggtaatccagggaccccatagggagaacaggctgactggggcattaggaatgtttgtacctctctgcttccctggcagcctggggaagggtgcagggctcagtgcgctaaaccatggtaaacatcttcaatagaactaccctagaatttagtgagtgtgagactgagatattgctcagaataaatttattccatagccatttaggattgcatgttctggaccaaccttgtccagctatgttcgctgttgagctttgcattcttctgttaagccaacaagtcgagaatttggccctgctgggatccatgtacgtgggcactagctgctctttggccaaggccttcatacaatgatacagtctctcataatctgtcctctagcccaaaccctgattagaccgggggcaagcgacgaacctggaggtcaagacgcaacaaaccgcgaatcacagcggcaatcaccccgccacaggcggatggcaacaaggcacgggaatggtgcaaaccataagagcatgaacagctaagaacgagcacaatcacacagtaggcgcacagacagtggaacgctactggacaccacaagagagaccacaaccaaggcaacggctcacactcccaataccgccacacacagtcacgagcccagcgctccaaaaaaacaccgcgagcacgagcgcaccaaccaccgcnnnnn

SEQ ID NO: 20539 - DNA, 1323 bp, Homo sapiens
  misc_feature 1, 2, 3, 28, 40, 57, 64, 71, 92, 1315, 1316, 1317, 1318,1319, 1320, 1321, 1322, 1323: n = A,T,C or G
nnngtggcccttgggttctgaaatcccngggtctgaaaanacatgtgacttgaaaantatgaancccaganaacattctcccagatccaganttaaaagggggtcctattgggggttgccatacacagtcctccaaactcccttctccctgaatggtcatccttaagatcctgttagacttgctttctggctttgctagctgctgccggcatgaaggccctcagacggctcagaacattctaggtatgactagagacatgaaaacctagtccctcagtgggcttggtaggtcctctacatatttggctcaatgcagaacccaaaacagcagctttctggtgacagcacgacattctacaatctgctctattcaaatatttatcggatccattttgagagaagaaaagcaccagagactgcttggaaagggacagcttcatttccaaatgagtcttcttttctttccacagaccaccacatgaacacagctgagtacgcgggcctcacaaagtgctgggattacaggcgtgagccacctggccagcccacatcatacagtttgaaatgaaactttgccacaaccagcctttgctgtagcacacacatatatcactgaacctgtttgaaataaagttttttttcttttcatgattcgtctttgagtacctccaggctgaaaggactgttgtaccagtaaaaacttaaaggcacaaattctccttgaagaccttctcccttttatgtggccccatattttatgtgctttatctttgaaattttgcatgaaaaggaacatgaaatggattcgaatgaaattgtcctttagagcatgattacttgttcccatggacaaatatttttctccccttgctcttcctggcctgaaacacgggaaaccagagtcaaaagttatctccctctccctgtgatgccttgagatttttctgcgtgttaatgcctgaaatccaagtcttcctccatgggaaaatactgttataccaaataattctagatgagtaacaaagatcttttaggccttcattttagtgttttctcactgttatattattgattgtgacctagatcatactactactaattggggtgtctcacaaaggtcagaagtcacaagatgtttgcaagcttaaaaaaaacacaaaaaaaaaaactttgtgggctccggccccgaaaatttaaacacctggtgggccggcccaagagagaaacgggccaggtcacaaaccggcggaagtgcggttcccaaaaaaccggcgcgctcgacaccagcttggttggtctacgccccccgcacgcnnnnnnnnn

SEQ ID NO: 20540 - DNA, 272 bp, Homo sapiens
  misc_feature 1: n = A,T,C or G
nagggcgaattggagctccccgcggtggcggccgaggtacatgaaaagacatatataaaatgtataatacagacaaagggtcctgttacacagttggaagtcattccctcagattttgggcctaggaaggtaggtgatttaaactcactgaaagcatgtacaccttgctgttgctgctgctgccactgctgctgtttcatctgttcctgctgccgctggaatcgtggaggtaaagacttctgaaactgtttgaaatagccagataatacagc

SEQ ID NO: 20541 - DNA, 932 bp, Homo sapiens
  misc_feature 1, 925, 926, 927, 928, 929, 930, 931, 932: n = A,T,C or G
ncgtccggccggcggaaggggtggtgtagggccgggcgataatggcggcgtcgaggctggagctaaacctggtgcggctgctatcccgctgcgaggcgatggcagcggagaaacgggacccggacgagtggcgcctggagaagtacgtgggagccctagaggacatgttgcaggccctgaaggtccacgcgagcaaaccggcctctgaggtgatcaatgaatattcctggaaggtggattttctgaaggggatgctgcaagccgagaagctgacctcctcctcagagaaagcactggccaaccagttcctggcccctggccgtgtgccaaccacagccagagagcgagtgcccgccacaaagacggtgcatctgcagtcacgggcgcggtacaccagcgagatgcggagtgagctactaggcacggactctgcagagcctgagatggacgtaaggaagagaactggagtggcagggtcccagccagtgagtgagaagcagtcggcagctgagctagacctcgtcctgcagcgacatcagaacctccaggaaaagctggcggaagagatgctaggactggcccggagcctcaagaccaataccctggccgcccagagtgtcatcaagaaggacaaccagaccctgtcacactcactgaaaatggcggaccagaacctggagaaactgaagacggagtcagagcgtctggagcagcacacgcagaagtcagtcaactggctgctctgggccatgctcattatcgtctgcttcatcttcattagcatgatcctcttcattcgaatcatgcctaaactcaaataaagacccccgcccccctaaataaaaatagaaaaaaaatcggggttatggggggggaaaagggtaagactgggcgggaaaggtttgaacagtcttggaaaggaaannnnnnnn

SEQ ID NO: 20542 - DNA, 643 bp, Homo sapiens
tagggacggggttttaccatgttggccaggatgatctcgatctcctgacctcatgatctgcctgtctcggccttccaaagtgctgggattacaggcatgagccactgggccaggccttttgtccattttttattgaactgcctatttcttcttactgatttgtagaaagtctttattctagtctggcaggtattttttttcaacacttccaagattattcattggctttggcagctaatgtttcatttgagaaaatgctacctgtattattgatgcccatgtgaaagtaatgagatttttctccacattgaagatttctctttaatctgtggctgatgttgtctttgaaggattctcgaccatccctgtatctctctctctgtctctttctcacccactttgggttgggacctcaaagagctgcaccctagcagtaaaggtggggtagaaattcaggccttaaaggggttaaaacccagcatcaaataatcttagttcctgattgaattaaggtgatctgtgactgctagatcctcagtctagctctctgcacatcaaatattttctaaaggaaggtaagtctagttagaaagttagaccaacagacttaagctaggctttacagaactgataggttcgaagt

SEQ ID NO: 20543 - DNA, 475 bp, Homo sapiens
  misc_feature 1, 2, 3, 4, 5, 6, 7, 8, 9, 10, 11, 12, 13, 14, 15, 16, 17,18, 473, 474, 475: n = A,T,C or G
nnnnnnnnnnnnnnnnnntttttttttttttttttttccgaccaatatggtttatttctgccccagccaagcttctttggaccctggctgggggaaaggcaccccaggcaccggcaagttccagtcattgcagatcctccaggtctaggtgtgactggtagtagcctgggcactgttgctggacgttgtattctccttccttcttccgccggcgggtggtcaccaggacaccgcagatcaggcatgtgatgagtcccaggagtcctgccaagccgatgaggatgacagcccagaagggaaggtcagaattcccagttaagggctcatttctgttgggagaatacccatccacaaggacactgctcctgtccagggtgaagttctgcagctgggtaccattccgggtcacccgcagaaattcctcatagatgcactctgtctactctccgagccagtggcgagaagtacacagnnn

SEQ ID NO: 20544 - DNA, 962 bp, Homo sapiens
  misc_feature 941, 942, 943, 944, 945, 946, 947, 948, 949, 950, 951, 952,953, 954, 955, 956, 957, 958, 959, 960, 961, 962: n = A,T,C or G
acgcgggggacatgctgttctgacagtttgagattacttattgtcttttctgggaagacaaaaacatgtcggagactgctccacttgctcctaccattcctgcacccgcagaaaaaacacctgtgaagaaaaaggcgaagaaggcaggcgcaactgctgggaaacgcaaagcatccggacccccagtatctgagcttatcaccaaggcagtggcagcttctaaggagcgcagcggcgtttctctggccgcgcttaagaaagcgcttgcggctgctggctacgatgtagaaaaaaacaacagccgtatcaagcttggcctcaagagcttggtgagcaaaggtactctggtgcagaccaaaggtaccggtgcttctggctccttcaaactcaacaagaaagcggcttccggggaaggcaaacccaaggccaaaaaggctggcgcagccaagcctaggaagcctgctggggcagccaagaagcccaagaaggtggctggcgccgctaccccgaagaaaagcatcaaaaagactcctaagaaggtaaagaagccagcaaccgctgctgggaccaagaaagtggccaagagtgcgaaaaaggtgaaaacacctcagccaaaaaaagctgccaagagtccagctaaggccaaagcccctaagcccaaggcggccaagcctaagtcggggaagccgaaggttacaaaggcaaagaaggcagctccgaagaaaaagtgaaactggcggctcgttcccctttgaaaattttacccccccccttccggggccacccacaggtctcagtcaaaagagctgaagctttttggaggggggagtggggtggagaggggtgcgggtgctgcggtgttgtgcggccacggtctatcctagtcgtgctggtggggggtcagttattactagctccccccagccccggggaaaggatcnnnnnnnnnnnnnnnnnnnnnn

SEQ ID NO: 20545 - DNA, 384 bp, Homo sapiens
ttggagctcaccgcggtggcggccgaggtacgcgggaggaaggggagggcttggtgttccctacgcgaaggtctgactcaatgcttattccctcttcttcctctctctgcagactgaagaattgaaccgggaggtcgctggccacacggagcagctccagatgagcaggtccgaggttactgacctgcggcgcacccttcagggtcttgagattgagctgcggtcacagctgagcatgaaagctgccttggaagacacactggcagaaacggaggcgcgctttggagcccagctggcgcatatccaggcgctgatcagcggtattgaagcccagctgggcgatgtgcgagctgatagtgagcggcagaatcaggagtacctgcc

SEQ ID NO: 20546 - DNA, 1233 bp, Homo sapiens
  misc_feature 1227, 1228, 1229, 1230, 1231, 1232, 1233: n = A,T,C or G
actgagctaaccacttctaagaaactccaacaaaggaaccatgtgtcttctattctgacttaacttcatttgtcataaggtttggatattaatttcaaggggagttgaaatagtgcgagatggagaatagtgaatgagtttctaccactctatactaatctcactatttgtattgagcccaaaataactatgaaaggagacgaaaatttgtgacaaaggattgtgaagagctttccatcttcatgatgttatgaggattgttgacaaacattagaaatatataatggagcaattgcggatttcccctcaaatcagatgcctctaaggactttcctgctagatatttctggaaggagaaaatacaacatgtcatttatcaacgtccttagaaagaattcttctagagaaaaagggatctaggaatgctgaaagattacccaacataccattatagtctcttctttctgagaaaatgtgaaaccagaatttgcaagactgggtggactagaaagggagattagatcagttttctcttaatatgtcaaggaaggtagccgggcatggtgccaggcacctgtaggaacaatccagcaggtggaggttgcagtgggcaccatctcagctcactgagggtccggctctttgggttcaagtgattctcctgccttgttcctcctgagtcgctggtattcacaggtgcttgccatcaaaacccaagctaatatagagtcctgatagaaggacacggggtttcctccatgtggggcaaggctgtgtctcaaggctccttgacctcaagtgacctaaccaaccctgtggcctccccaacagtggttggaaggccacgtgaactggttcaggaaatactttttattggagaatgcagtctttgacactcatacacggcaggtggagtgaaagggggaaatctgggtacatggacctccactacggagtcaaggcgatcatcttcctcaggaccccaggtagctggattaagggtgggcccaccagaaacagctaactgggactcacagaaacgggttcgccaggtacagggtggtccaaagccagccatggagatcaccactggtcaaaaggtagatacgggggagccacgccgccaaacttcaaagaggacggcgcaacaccgtgcgcggggcacgtgtacaggagccatcagagaaacgtagcgcaggaggcaaatcaggagggaaaacaacacgnnnnnnn

SEQ ID NO: 20547 - DNA, 312 bp, Homo sapiens
acggggagtgggggtgaagcgtgttctctacataggcaacacagccgcctaagtcacaaagtcagtggtcggccgaggtactttggtaaggagatagggaaggaattaaggctattactctgaagaaagttggggggccagggctcctatttttttgctgaggagatggaagatcagggcttgtattcaataagaatgggaggggccaggggatgcctggcaaaagccttgcactgtgaggtgcaggtagaggcttttattctggtgagaggacatggactctctctctcccctcaggtaactgtgccctgt

SEQ ID NO: 20548 - DNA, 1303 bp, Homo sapiens
  misc_feature 1, 2, 3, 4, 5, 6, 7, 1303: n = A,T,C or G
nnnnnnncaacttttgccaaattcctaccaatcacttgctttttaaaagaaatgtataatagccaaaagagaaattatgtccctgttgtacagaagttagaatttttgactccaggcagcagtttgctcagtgatcttgaacaagttatccaattgcctctacatttgcatcagtttctctagctgcaaaatggggataatactatatacctacctcacagtgggagggcaggagattttgaggccctgaggttttaggtgggctgtgagggccaacgcttgacacaaagtccatgggttattattcaagaatgcacaggcccatcggccttttagaaagacaagacagggagtgcttgtttgatatttcaaggaataaagccggagctcctgaattgtagtccaccttaaaagagagacctgtattggagaatattttatttttttggcaaatttgatcttaccctttaccagttctataatttggttaaaagctgattacgtcctacaatgtcaaagtcagctaactgtcgtctacttaagacttctggtcatttccaacttatagaggaagggagtctctaaaatctcttcttcagaaggcacctcacttctcagacttaaaattccacatcaagtgttccattaaaagaagataaggcattctgagtgcaaacaaatgggggcttcttaaactacacaccagcagtcagtgaggaaaactttgaacaattattgagttgctttcttgggtctctataatcaataacctgtctgcagatatctatctatataaagatattatatataaatataaatttacatatatatgcacatgtatatatagttgtacatatatgtgtgtatatatatacttaaatgtaatatttacaaaataaaactgtgatctcgtctagagaaaatgtattcatattacaaactgctcttccatatttatgtaccatattatacctttttattattgttataattattatgggtatttctaattaatatgatgttgaaacctgtttggcaccttctggaagctaccaaaaaaatgacactccattgaagtgcttaaaagctgttctcataagaattctactggcctattggcaacgaaacacaatccgagaggggagggccggagttttttaacccacgtaaaccattccaccttttggccacgcgaaaggggcaatttcgggagggtcggcccaaacctggcgcaacgaggcgcagctttcgcggcaaacacaggaattacacgacatggggaacggggaggcctggcaaaccn

SEQ ID NO: 20549 - DNA, 1054 bp, Homo sapiens
  misc_feature 1, 1054: n = A,T,C or G
nctggtgtaaatcggacgaggagtgatccacccatctcagcctcctgggtggctgggattgcaggtgtgcaccactaccactggctgatttttgtacttttagtggagatggggtttcgccatgttggccgggctggccttgaactcctgacctcggatgatccgcccgcctcggcctcccaaggtgctggggttacaggcgtgagccaccgcacccggcccccttccttcgtcttagtcaatcctatcccacctcttcttccaccagtcccctcacctgatggtcccaacacttcatcatccaccacctcctggagggggtaccccgaggtgctccgctggggactctgctcattctgggggtgcggttgacggctggtcgtgatctttcccgtaatctgtcccctcttacggaacctagtctccgttctgtccatggccttcttctggacactgctaggatccagaagagtatgttatcaattctcaagcctaggagaagtcaggagtggagaacagctctgagaagatactgttgtccaactgatctccaggcaccacggagtccggtccctccaatcaggaaggtcggaatctctgatgtcatcgttcatgccaacctggcaaccagtttgaaaaaaaacacatgtaactgccaggctgatctcttgtcctggagatcctgggtgaatggtatctcctgccactgtcccaacctcagaccattgtccaaaagcatcttcagggactccacatccctctgttccctgtcccagcagaggctgtgtcctctccactcaagctgaagcatgttgggtccttcgctctgtacatgcccatttcagagtccagtctggtggggaggaccgacgggaagaaataggtagcgaacgagaaccctttaaggagattacggcacgggcatctccgcccgagggctccggccaaggattcttgcaagcccggtcggtggaacctcacaccgggagttgggatcccccacaagaggggaacccgcggaggcaaaaggacagcgccatgcactgtcgacaan

SEQ ID NO: 20550 - DNA, 1026 bp, Homo sapiens
acaaacgggtttcccaccttgccagggatcctggggacaacagatgtaaaactcctgagtctctgtgtgtgtgcctgagtggccagtctgccagaactccacacagctctgtgtattgaacccaaggccttggtggcctgggctcatgagcaggtctcctgatccatggattgcagagatccatgggagaagcatgatttcccaggcagggtcgcacattcactcattgcttcccttggctggggattggggttcctttggctctgtgccactcctgggtgggccattgcctcacccttctttcctcagttcttcgtgggttgtttgcctagtcagtcacaatgtgagaacctggcgatttcagttaaggggctgaattcactcaccgctttcattcctctccatgagtgccatggacagcagctgcttcaaatagccatcttggcctctctctgtgtttgtggtttttgactgtgagctattcatttccctttgaaccttacctgtagtattctttgaggcctgaattgaaggagagtttctcagaagataatttttatttgcttctatcggccacctacatactaccaacctaggtccatttaaattctctggttgatggttttgaaccacagagatagtgaatttaaccatgaacccacatggaagttgacttgtggttatggattcttggaaatttcctattagatatccctcaaagctcaaggttcccagcgttcagcagaaactttcagcatgaaagacctacttgttggcacttggttaggcaagtttcaaagaaaggccctgacatcttcagacacaaaagctgatctagcaaattcttaacttttctctgtcctcaattgaagcaactcttcatgctttggaaatggatttactttctagaaaaaagtaaaagcaggttggaattcacagtccctgcttctatttatatgggagcttgacagattccttattttttttttttttttttttgagacggagtctcgctctgtcgcccag

SEQ ID NO: 20551 - DNA, 1942 bp, Homo sapiens
  misc_feature 1919, 1920, 1921, 1922, 1923, 1924, 1925, 1926, 1927, 1928,1929, 1930, 1931, 1932, 1933, 1934, 1935, 1936, 1937, 1938,1939, 1940, 1941, 1942: n = A,T,C or G
ggtggcggccgaggtacactcgccagcggttttgccacaagagtatacggaacaaaggagacaggctcatttataatctgacgcggccaccctcctgctgcgttcggtttccattggctgggacgggacctcaccttctgtatttgtcccgactggctagcacttagaactttttaaaagaggcaaaggcataggagaacaaaggaaggaggaagtaacttgtggaatattgagaaaggtaaaaacacctttaaataaggaagaggaacaggctatgacctaatgcttgtttggatcagtataagcatgttagggcaaatatttaggctaaattgtgggagctaagaacataaagtatattgattttttattatggctagcagatatttaagcatgttagcacaggttcttgaataaattttgcttctaagagaagttactattcctaattatatggggagtaaagtctctttgaagaggaatctctactttactttttacacttgtgctttgataattttttacttggaaacctcatcttttggcgttttttttttttgagctatttctctagtgttgctatttgatttaatttctgaccttcatttttgtttcccaaccttttttttttgtttgatatgaggggttccgtgactgaggttctgagctgctgttgatgtgctatacctccttcaattctcagctatcaaaggggaaaacaactgcagaggatgggaaatgctatactgccatgcctggaaacacccacaggaaaattaccagttttgagcttgctcaactgcaagaaaaactgaaggagacagaagcagccatggaaaaattaatcaacagagtgggacctaatggtgagaggataagggcttctgatttcccatgacttaggaaacagaattaagactgtttcattcattgaagatcagaatgccctgcgtacagtctggaaaagtaacatgtgccgcctgaagagacaagagtttgtgataagcagagcacagactgtgacttctgaccaagagaaacggttgctacatcagctccgagaaatcaccagggtcatgaaagaaggaaaattcattgacagattttctccagagaaagaagctgaggaggccccttacatggaggactgggaaggttaccctgaagagacttacccaatttatgacctttcagactgtatcaagcgtaggcaagaaacaatcttggtggattaccctgacccaaaagaactttctgctgaagaaatagctgaaagaatgggaatgatagaagaggaagaatcagatcatttgggttgggaaagtctgcccactgaccccagagcccaggaagataattctgttacctcgtgtgatccaaagccagaaacatgttcctgctgttttcatgaagacgaggatcctgctgtcttggcagagaatgctggattcagtgcagatagctaccctgagcaagaggaaaccaccaaagaagagtggtcccaagactttaaagatgaagggttgggcatcagcaccgataaagcatatacaggcagcatgctgaggaagcgtaacccccagggtttagagtgaaaacagccagtctgaagtatccattactcaagtcccaagatgggaccactcagtggcaaaggtctgactcttcctggtaggtgtaacagatagttcacctgtgaacgaacatcagcttacagatgatgaggacttaaggttgcaagaatgaagatttcagactccaagatcccttattctttgggccttgagcagaatatcctgtatgcgctatttcccaccagaggcagaggccacaggagataggccatggttcaggtaggaaatgctcttggtcacatcagaactctagatctgggggaataaacaaacccgaattattannnnnnnnnnnnnnnnnnnnnnnn

SEQ ID NO: 20552 - DNA, 396 bp, Homo sapiens
  misc_feature 1, 2, 369, 370, 371, 372, 373, 374, 375, 376, 377, 378, 379,380, 381, 382, 383, 384, 385, 386, 387, 388, 389, 390, 391,392, 393, 394, 395, 396: n = A,T,C or G
nnagaatgctaaggttgccgctttcacttcctctcaccctttagcccagaactgctttgaatacaccaattgctgtggggcggctcgaggaagagaagacaccagtgcctcagaaactgctcggtcagacggtgatagcgagccacgcattcacagggccactgctgctcacagaagcagtgaggatgatgccaggatgatgtctgcctcgcgcctggctgggactctgatcccagccatggccttcctctcctgcgtgagaccagaaagctgggagccctgcgtggaggtatgtggctggagtcagctcctctgaactttccctcacttctgcccagaacttctcactgtgtgccctggtttgtttannnnnnnnnnnnnnnnnnnnnnnnnnnn

SEQ ID NO: 20553 - DNA, 3189 bp, Homo sapiens
  misc_feature 1, 2, 3189: n = A,T,C or G
nngatgataagggtaagaggtaaaagggggtaaaaaggagagtgattaggattgaagaactttgaattagagaaggttggatagtttatttttttttttttcacagtacaactcaacactttattccattgtgattggtatacatgtaagattgagacatcaagagactaaaaatcagtgcagaacttctctgaactaaagggccgtgaaaggcatgattggttttggcacacagagtggataaccatacattggctggaatgaggtggtcaggaaaataaaatgcacaaatctaacaccatgttgaaatcatgtctgagttctggagaaagttaaagtgtaaataattacaaagactgacatgcaactctttaccttacattattcatctacagactatttttctcccttagagatgaggagatggccttagtaatctgttcagagtagctgaaaagaccaatcaatacacattagaaagatctgcctgatttctatagcaattcattatagctgaagaaataatgctaaataatgtattttctctatatcatcctttaactaaattgaatcacatcacccaagtaattctgacttaacttttacttagttaaatataatttctcctgtcttttaatgtcaaaaagcagtttccgttagtttatccattggtgtatatcacaacagatgaggaaaacttatgtgatagtatctttccttttcaaaaataacattatgctaatgagaacatcaaagaagtaatactatgctgcaagtaatttaggttttcacatcatcaatcatatagggagtccaaagaagccagcctagcaggtaacatagcagagcagaatgcaatgtagaagaggcacacagagtctaagtgatttctccagacaaaagagaaggaaagacagaaagaagcaaaagaaaggaaaagtgaaaaacagccttctgcagaacaaattgttacaaagaaaaatctatttgcttgcaattgattaaacataatagagaagagttctttgatttgggatgatagaagtaaagatattaaaaattatatgctggtaagcctaaactggcagattgggccatttttcctgtggttgtatttgagatgttgagctctcacagggagaatttttgcttttgccaaggaagggccagatttaacccaaaaggacaaccttgagaacattttttctttgttaacttgggcatgtggctaacattcgttctctctctggtaaaaagatattattcatctctgatgagatggttcaaaatatgacagtgaccaagacgtggtttattcacaggatgcacataattggatatctgcatatggcatgaattaaaaagttaagcaacaaggaagagaaggaggagaaaaaaacttttgcaaatttctgacataaaataatcaaataaaagggaaagatagtggttaaggatgttttcattttctcagaggtttctcacttccatctgctacgggggaaatgaaatgaatgaaagtaattctctttaggtcaccaacataaggaataatttgactgcaaacatagaagtgagcagagcaagacttgaagtgatacttcttaatctctttgattcttaatcttaaacaacaagccacaggcaatacaggaaaggtggagatgactaggaagtgtgataatgtgcctggatcagttaccattcattggaaagtaccgtttcccctgcctgttaataggctgattcctgcaggtttgagtaaaggaatcatctcttccttcagtgccgcattgttctttgtaagagatccgtgtcagttcaaagttgtgtaatttaaaggctagagaagaaagaagtttaaattggatcccacagtaaatattcacggatatttcaaagtagaattgtccactgtctggggttgggttcaagcatcaaggtgatcgcttcctgaacatgttcattgaccatgaggagctgtttactctggctcatattagactaccagtaattattttcagacatgatgtctcttttgaaagaaatgactttgctggactaggataactgcaggggtagaagactggaaatacggtgagtcagggtaggtggaaacagaaatgagtagaaggaaaaaaaaaaaagagttcctccaaggtcatatatggtcagtaatgaagcaaaaattcatggtatgtgacttaaagactttctaagacattgtacccatgggatgtttccaagcttcttgatctttaatcttttagcaaccttctgatactggatttaccttcctaggtgtggtgccctccttctggaatttagatctctggggcaaaccctgtcaggatgtgcctctgtgtagttaacactgccccagacagcagctctgatttcagtcacagttctgctgagaagcctgtctgcccctggcaggggtgaggggagggttgttggtggcagatgtagtcagaggcagaggagaccaatggcagacagggtggacctgcaggaaggtagccagaaggaaagaccttgggttttacccaaggtcaaggtggctgtgatagaagagcgaaaggcaaaagtaactaactgaatttcagaattcagaagtaaaagagaaaggaggaggatccctggaccagggactttcacaggaaccaaacatgattcatgaaaaaaaaaaaaaaaaagcaagcttatctgactgatcaagaagacattcttcagaatatactggcaactaaataattttcacaccaaaaatacagacactaaatgagtgtttccttactgggattaatcacattttgataattcattagctctgtatcttctaggttgcttaattcatttagcaaatccacagcttaggtaccacctcgaggggagggagggtgggggtgttgaatgaagcaattcaacttagaatcaaattttgtaaacaagagttagtagcacagtggcacagtagattgtcaaggaaaacaacaggagtgggcacagagtcatcggccttgcctgtgcggtcttgccggctacccggggggactctgcagctcaggagtctactttcttgttaattaaaactgagcagcaggtgagcagcccatccaccttttccagttcagacatgctcacggggatcagcatatggtccttcagtttctcataaacctttcn

SEQ ID NO: 20554 - DNA, 2774 bp, Homo sapiens
  misc_feature 1, 2, 3, 87, 1743, 1744, 1745, 1746, 1747, 1748, 1749, 1750,1751, 1752, 1753, 1754, 1755, 1756, 1757, 1758, 1759, 1760,1761, 1762, 1763, 1764, 1765, 1766: n = A,T,C or G
nnngcccaactcccagttattcggcaaaagtgccccaagtaaaggcccccacccaacaaatacccacaacaacacccgcctcggggnatggaaacaaagggcctgaactggattggataaagcctccttggaaaaaattccttaaaagcctccactgccatccccttccaaggtcctccccaaaggaaatgcctaaagttttcctccccctgttgttaagaagacatgaaagtgaacttaagtgttgggagatggaagctggatggccctcaggggctgactcgcagggtgccagacttcaggacatagcggagagagcttggcacgacttattactcccaggctgtagaatcctgaaaaagagctatcatgcagcccacacctggtcaactggatgactaccttagtgaaaaggggacaaatcccaggtctggcctgccatgtgcacaagcataacgattgcttttgtttaatgtgcggaaagaatatttgatccattccaaccaggcatttgcatcttggtatactgtcttaattgccaaagtttgttttaagtctttaacttctatgatcctttagtaaaatgaatgcttcctttagcacctatttttgttagtttttagaccaaagaaagctaaacaccattttatatttaataatgtttcttgtatgatttttataccagataagctaaattttacctttatattagtgtgttattaattttaaactgaattttaataaaaccttgtagacatatttatccaatttttcatgtttgaccataaggtaagattttatagactctttttaaccttttataatttttgttaaagagcaggttgatgctttaagaaaaacctgtggcattttttactttaatgtccagttcacagaaaaactggatgatacctttttaactttagctaatatgtttacacacagaattttctttataattaacgttttaaaacttgcttaaacttttaaaacaataattgtttttaaccttttaatgtaggtaaaaatccacattcttatgcccctttataatctttttaccaaaggtatgttttacttttcttatacaccttgcacataaactgtttttttaatagttttacattcaggaggcctagctacttttaaattatacaacatttcttgcataaattctttttttataacatttttctctttcatgacttttgcagacaattctttgacatgcctcagctttctgacttattacaaacctttctttctttaaacaaccagttaatttatttcaggacaagaatttaccatataacactctttttatgtaaattctgccccttcttttttttttttcctgaagatgataaccattcttttccaaagcgaacttcctttatgtctgtggactagactgtctgaggccacaagatcagaagttactataatacatgttacactgttaacttttagcaaactttacttttgttgaaaaccttgtaagcttgggattttaattatcctttgctattagtaagacctcgttttgtcaaaattaacttagaattcgtatagatggcttttttttttttctttaattacctgggaggaaccatagatcatcctttcctgaagggagttcctcctaggtatggtagggcctttgtacggtaattaagatttagatcccctgttaggaaacctgctgggttaagggaatttcagtagttaatgttaaatcacccnnnnnnnnnnnnnnnnnnnnnnnncccttaggatacttctgaactggggaggggtgctcacaatgaggtttcctctaaaaggtattttttactttcttctgttagcaaagcagttgccactacagattgaatgcatttgggccatccataggttacagggctaaggatttttgataggaaggcctcagtgcttttgggatacccccttgtttacactgacaacaaagtggtattggagtgttataggcttatggagaataccttccattggcaattataggttttaaatttaccctggcttttaaaggaataggtgtacactttctttttcttaaccacttgtatatttctctgtttctttctttctttctttgactttctgtctctctctctctctttgactttccttttgcctctgtcttttcctctttttctctctctctttttccttgactccctctttgtctttctgtctcttcctttctgtctcttcctctctctctctttgcctcttttcctctctgtctctttcctctctctctctctcggctggtctttccttgcctctgccagccgcttatgctgctgttctctcaaccactgtgtggcgcggcggtgggggtgtctaaaaccagctctaaccaagtgtctctgtacaggaactggtctgggtgccctggcttacaggttaccttgtgccatacctttgaaacaagggacctgtccaggcttcacttctgatggccaacccacctctaatgctggccagtctatcttacacaaagttttaagttttcctggtgtcatagtactccatagtctcccttaaatcctttcctgaaatttttcagcatagttcctagtggggtggtcttactttgtgcttgacccatgcttcttcaagacaaaacattacgctcaccctacacgcataccacaaaacaaagaacaggtaaaaagggcacacacacacttttacagtttacaccaaaccaaaatcaaaaccaaaatcagagtatcaacggacgcgtg

SEQ ID NO: 20555 - DNA, 635 bp, Homo sapiens
ctcaccgcggtggcggccgaggtactacgaagccatcttggctctgtggaaccagctctacatcaacatgaagagcctggtgtcctggcactactgcatgattgacatagagaagatcagggccatgacaatcgccaaggtatgtcctcagggccacttaggctgcctggagggagggcagcgctgccccccgcagtgcctgtgtccaacagttcaaccttcttgctgtgtagcagtgcttttgtgtctcgtcaagcaagtcagctcagccctccttagaggttctggtctgtccaatagagaacgggagggattagcatatggctgattatgagagaaagaagcaatactaattcaggtggcctgacaagcaagccagaagtgcctgtggaaaagttatgcactcctgtaagattctggaccctatgctcctttgatgtaatggaaagttaggtcataaaggattaactgggtatcacaaaagtaaaaggtgggatagaattcttggaagagcacccaaagcattacttactctaaatcagttgttttcagatcatggtctgaagaatcctagcaggagagggagatcctttaggagtgacagggatggaagtgaggagaggggcacagaaagt

SEQ ID NO: 20556 - DNA, 994 bp, Homo sapiens
  misc_feature 994: n = A,T,C or G
acgcgggggagatgcgaggtgggcgggggcagcgtccgctgaaagttggagcaagcaggaagtgaactgagggccaccctgggaggaagccgactaggcgaattcacttactgaccggcctgggctgctctgagacatggaggaagccagtgaaggtggaggaaatgatcgtgtgcggaacctgcaaagtgaggtggagggagttaagaatattatgacccagaatgtggagcggatcctggcccggggggaaaacttggaacatctccgcaacaagacagaggatctggaagccacatctgagcacttcaagacgacatcgcagaaggtggctcgaaaattctggtggaagaacgtgaagatgattgtccttatctgcgtgattgtttttatcatcatcctcttcattgtgctctttgccactggtgccttctcttaagtaacagggaacctctcccacctgcccttctcttcagggacaaccctccataaatgtgtgccaagagggtctcctttcctgtcttcctctacagagaatgctgctcggtcctcctacccctcttcccgaggccctgctgccatgttgtatgccccagaaggtaccttggtcccccggaaggagagaaaaaagagagatggactgtggctgcatttcttgggtccttagagtgggctggagagacctagagggcccagcatgtggctgggaaactgttggtggccagtgggtaataaagacctttcagtatccctaaaaaaaaaaaaacccaataacatacacatgtggggccccggcgctgaaaaacacacaacacgttgggagcagcacaagccagaggggaaatgggcacaccggcaaagagacggcgaagagagcgcacaaagaaagcgggcggcgcgtcacacacgagagggcgtgggaacagagcacggcataaacgcgcggcagggaaacacagagtgacgaggggcgacaaacacgcgaccatcagan

SEQ ID NO: 20557 - DNA, 776 bp, Homo sapiens
  misc_feature 1: n = A,T,C or G
ngagacagagtttccttcttgttgcccaggctggagtgcagtggtgcgatctcggctcactgcaacctccgcctctcagttcaagcgattctcctgcctcagcccaggaggcggacgtccaatgagctgagatcacaccactgcacaaaggcagaggtgacccttacctagaccaatgctagcactgggactacctgtgtgttggagagcaggggaccccatgggacagggctccctcatgtcctggatcccctttccaaggattttcagagaggtacccacttggatgactggggagaagggctgggctgctgctggggagtaacacaggccttggggcagggttcaggagttcattagtctggagtccagatcgccacccagggcccagcctgatgtagtgttcgcgttctctcagcgctgcagttttccgataaaggagaggactcctgtgtgccagagctctgaatgggagcctcttctcagtccagccaggcagagggtgaggctgccaccttatggccactgggggaattggctctgggcttggactccaataaggggccgggagctgcagagacctccaaaaggtctcttaactagtcctccaaaccaggtccagtcactctctgtgacccttgccatacgcatgttactctcaccttacacgccattgaagcccttgagcagaagtgagaggcagttccacaatggttgttcttggtttttctaattatgggctaggggccttttgaccttctataaagtaatactgt

SEQ ID NO: 20558 - DNA, 1050 bp, Homo sapiens
  misc_feature 1, 2: n = A,T,C or G
nnggtttggggccagatggggaaagctgtgttatggggcttgtcagtttctgccagccaaggcttcagcatagctgacttgtaacaaagttgggaaggccttgcttttgagagccagaccaggagtacctgtgactaacaaggggtctgggaggatctgctgctcccatgccctcctttgtgtgttttaaatctgtttgagccttctgggctcctgtgaattagggagtggcagctcctcagtctaactcctattgtgaccaggttgcctaattggccctttggtttgggcacccactgtccttctgcgtggttggatagatgctgctcccaatgtccctgatctcttacagacccctctgattcttcactcttggctttgagagcccctgatgccctgcagtcttgactgagcttctaatggttgatcagacccttgaatgttgagctctttccatactagacttgaatattctcctgcccatttgatttgttaattaggattcattggctgtttctctgctctcctcttttctctctgttcctgctggttcaagtttaacctccattttctttctcctctgggaagtttcccttatgcctcttgaacagggtcaagagcacttaggagctcagatttacactgtatatcatgagaaaagcattgaaagtttcaaagcaggagagtgacataattagctttatgttttaaagcggatttttgtctttagattctggcaatacagtggtcctgtggtctaagacatctgactaaccttcctgctagcaacaattaaaaatgctgagtgcaataaaaaactagcccttaaatggaatgaatgagtccactacttggtaaggatgctcagaggcttaaactgaatcaaagcaggaactcttagaagtaagcagtgtgttggctaggcgcggtggctcagcctgtaatcccaacactttgggaggccaaggcaggtggatcgcttgagctcaggagtttgaggcctgccggggcaacatggcaggacccgtctctaaaaaaaaaaatgccaaa

SEQ ID NO: 20559 - DNA, 2491 bp, Homo sapiens
gcagtagaaggtgagtttgagatgagaggaacaagtaggaaagagtgatcccctgaaccacctcttcgctttctcagctttcatccccacctaggttttgtgagcctggaacttgagagactgttctgtagcccaggtctcctaagattggctgctggacttgcctgagttgagggtgcagtgggttgaccctgggctgcccagcattcatgtggtagtgaaggaaggaggactggatcaatcccatttcaaagcatccctctctgcagcccgcactgtcctccaatgacactgtaaggaaaccgctttaagacgtatcaacggctttaagtaaatgtattttctggcatctgggagacctgacattctgtgtcataatgaaaatctgtcatgtttctttattttaaaaatgataaaactgcaggttcacagagtgtcatggcttacttgaggtcacacggggatgagttttcagcactgccaataaaagcaattacatgaattattcagtaattattcataggatccatataattcagtaaatattcacataattatttactagttgttcattgaccaattcgtacaaggcattttgctcaaaactgtgcttatatttggacattgtatcttcatcataatcctgtggtaatgctattatctataagtaacaggtaagaaacctgaagatgagggacagctaatcacgtatttggccatatttccattttttggtttttgtgatgctggaagaatgacccagaatgggtcacgggaagagtattcattcctgtattattttccaggacagaggtgtgcccttctagagtactgggaccaaaattcagaagtgtctgaaaccttgctttaacagtatgggaaataacctctatcacctggaatttccctggaactttggaatatacaagagaagtatgagacgtgggtcttcccttggctgtgtttaattcactcttctatggaataccaatgattctcactaagacttttgcctttttataaccacaatgtatgtcttatggagaagattttacactttgctctatttagaaagaataaatatgagcaatagttttaggttttatgccctggacttcatatttttctgatttctgttttgagattaaattctcatgtaaatagaaaaatacttattatttctcatcaggccaagtttgttatcagcttgagtttttgaagatgaagcacaaacttttgattttatctttgtcctcatcagcgccactcattgtctctcagtatggcctggacttgcccctgcatttaccctcatcctgctgagccatctccatgcactgcgcaattccatcagtgattcggggtcctcccaaggctccctgaaatgtgcacagggatcaggacgtcagacacattccagacacaaaggcaacccacactgtagagtgagcagctgtgttcccacttccctaatgttccagtgatgtcctcaaactgaagggaacactttccctttttaagggtctgttcttcatgtctcaatgcctctgatctagtgaacacaactgtcctgaaactgaaagaacctgctaaatttcgagtttctggttaggtggctagaataggtttataagacttccttacttacctatgactgctgaagtttgaattcttagcagtatgattccttttcttgtaagctgagcagcttaggaaagattggccatgttgctgtgcaaaaagaggtaaacttaatttatactcaaagcatgcttgaatttgaaactagggcttccactcttccaaagttggattgtcactacctcaggcatgtgtcccgaagggctcatgtctctgttgtactcaaagttcaaatggagcccagcaagccagatctcctttactcctaagttccctcaacagtttctcctctgctttagagactgccttgaaaatattcttgtcctgctgttgtgttttggctttggaatgatgtgatgcagctcaatgggtcctacccccaagttgatcagagtaagaaacagctgggaaagtcagtgcaaattcaagttcatcatcctccttacagggattctgattcagagggctcaggtggggcctggaatgtgtttgttaacatgactcagatgtgcagtcagtttggggacccgctgataccatcgaccttatagtttatgggatgattctgttttgctgatgaagaaactgaggcatagacagtctgtaacttgcccaagttccccttgctgtaagtcctggagccagatctcaggtggagcagcctcttccccatccccttcccacattttccaattcagctgggtcaattctttcaaagtacgtgtttctctccccctataactcatatctgaaacaaggagacttgtcattcacttctttcatctaatacaatttctcacaaaatgctgcgagcatcatattctgggctctcactattaaacggagatgc

SEQ ID NO: 20560 - DNA, 686 bp, Homo sapiens
  misc_feature 665, 666, 667, 668, 669, 670, 671, 672, 673, 674, 675, 676,677, 678, 679, 680, 681, 682, 683, 684, 685, 686: n = A,T,C or G
gtggcggccgaggtacgcgggcagagacaatggaataaacagccaagaatgttaaaatagctattataaatatgatccttatgctcatagagaaaaggaaaaatataagtataatgtgaaaagaaatggaagatataaaaagaaatgcaacttctagaggtgaaaaatatgtctgaaatgaaaacaccatatagatggaattaccaggaaattagacactgcagaagaaaaaaatccatgatgttgaagtatattgcaattaaaactatccaaaatgaaactgagagggggaaaaaagcccctgaaatgtatgaagaaagcctcagtgacctgtgagacaatatcacaatggcctaacataagtgtaattggaatcccagaagggtagcagacagaaaaaaataatagttgaataaaggtcaaaagttttccaaatttgaggaaagccagatctaaaaaatctaacaactcccaaccattcataaagaaaagcaaagcacatcacagtcaaattgttgaaaaccagtgataaaaggaaaatgttgaaaagcaggcagagggctgggcatggtggcttacacctgtgagcccagcattttgggaagccgaggcaggaggattgcttgagaccagcctgggcaacatagtgagaccctgtctctacnnnnnnnnnnnnnnnnnnnnnn

SEQ ID NO: 20561 - DNA, 583 bp, Homo sapiens
  misc_feature 583: n = A,T,C or G
accagctagtggacaagatagtgcactgcatgagaccgttgatacagccagaaaacagggagatcttgaggcatggcagtatccggtaatgttacaaccgataccggccgggaaagggccaggaaagggagtcaagcaggagcgtctgtccgaacggaggctaggtaagaatatttcaccatgaaaatgttaaaagacataaaggaaggagctaaacaatatggacccaactctccttatatgagaacgttattagattccattgctcatggaaatagacttattccttatgattgggaaattttacctaaatcttccctttcaccctctcagtatctacagtttaaaacctggtggattgatggagctcaaactcaggtaagagaaaacacacaagcacagccacctgtgcctgtttcttttgaacagctaatgggagttggccctaattggggttgattagaaaattaagcagtaatgaagaatgttgccattgttcagctgtgcactgtgtgcttacaggcatggaaaagaataagtgttacaggggaaaaatatccttctttcagttgtttgactaacn

SEQ ID NO: 20562 - DNA, 911 bp, Homo sapiens
  misc_feature 1, 911: n = A,T,C or G
nagttgcccaggatttccttttcccgtgtgtgcgctatactcccccccaccccttgaccaaaagagtgtcccgcttcccccaaatttggctcttatcttcaccgggaaattcctttcttaaccaaaaagtgtaacttctacatcttctcctaaaaacaagggtagagccaatggaaagtaatggttctgttacatagaatgagttgttgccttgatcttaaatgatgtattggtagatatacttcccaagtggattaaaaagttaaaacttacagcataacaaagtattagacttactgaggtgacttgaatatctccttttgattttcactctatttttcttttcacccatgggaaatgataattttttaataaaccaaggctcttaccatagctgaactttaaaacttagactgtcttttctgtaaacgattctgaggcaaagggaaatgactagaagaggatgagtaaacaataacctgaaatgggaaactcgagggaagcacaggttttttttgttttgttttgtttggttcgttttttgttctttggggtttttttgagacagaatttcgctctcgttgcccaagttggagtgcaatggcgcgatcttggctcactgcaacctccgcctcccgggttcaagcgattctcctgcctcagcctcccaagtagctgtgattccaggcacgtgccaccacaccagctaattttttgtattttaatagaaacagggtttcaccgtgttagccaggctggtctcaaactgacctcagatgatccgcccgccttggcctcccacaagtgctgggattacagatgtgagccaccgcgcccggccagagcactgttttttttaatggccttgcactcttcttatggacctttgctgccctcagttgaccaaacan

SEQ ID NO: 20563 - DNA, 1310 bp, Homo sapiens
  misc_feature 208, 209, 210, 211, 212, 213, 214, 215, 216, 217, 218, 219,220, 221, 222, 223: n = A,T,C or G
tcgacccacgcgtccgctcacagcccagccccctccagagccctgccccaccgcaccctgcttctccagggcctagcagaccagcatctgccccggtgaagggatggatcagctgtgggggtgggtgcagaaggttgccacctcctacctcagcgggagtcacctaggaaagatggagggattgacactattttctcaataaaatggnnnnnnnnnnnnnnnngcgtccgccccgcggtgtgaaacttcctgttcccagctgcatcagagagcctgtctggggccaaggttgccagagatttctgaagacacagcttgttccttgttcttggctggtgggtgcacaaggacttctggaagggatttagacggggctgagtgctaggattaaagtggggatgggagtacggcaacagaaaaacctgggagctagcaatgcacccagcccttgactgtgccctggtggacagccgagctgtggctctagcgtgagccagtgccttcctgtccctgccaagggtgaggccagagttggccccgaggctaatgtttcagtgggtgagattaggtcggccgtacagaggccggtgggctccctgacatcccttccaggcaacctgaaagcactgaaatagcttatggccctgtgccagggaccttggcccaagctgctgacctccagggtggggagggagctacccccaggagaagagtcactcagacagcagtatgagcaagccagccagcagctccgtgcctgcacccagctcaggggaatcccagggggttcagatgcccaggaaggaaaaggggacagcgctactgctatggaatgagaccaccacttctcctgttgtccttcccagcttctccccaacctccccttttccctagtttataagacaggagaaaagggagaaagcaaaaagttggaaagaaacagaagtaagataaatagctagacgaccttggcgccaccacctggccctggtggttaaaatgataataatattaacccctgaccaaaactactggtgttatctgtaaattccagacattgtgtgagaaagcactgtaaaactttttgtactgttagctgatgtaggtagcccacagtcacattcctcacacttacttgatctattatgactctttcacgtagaccccttagagttgtaagcccttcaaagggctaggaatttctttttcggggagctcggctcttaagatgcgagtctgctgatgctcccggccgaataaaaaacctcttccttcttaaaaaaaaaattggtgcggccgcaagcttattc

SEQ ID NO: 20564 - DNA, 617 bp, Homo sapiens
  misc_feature 595, 596, 597, 598, 599, 600, 601, 602, 603, 604, 605, 606,607, 608, 609, 610, 611, 612, 613, 614, 615, 616, 617: n = A,T,C or G
attggagctcaccgcggtggcggccgaggtacagaaaattagcaagagacattttctgcattgtgagaaatcaacatagacaccttaaagacccctttgagagtgtggctttttgaacttttcagattttgctcagtgacctgctaacacttacgtgagaggctccaggtgtaaatagaatctaatggcagaatctgtaagtgtaaacaagcatcttaggagtgagagatcaagaccacaaaatgtccagagctatgaccacagctatacctacccataaaatacgatactggagtagggtatttttgtctttttttcttacctaagagctagctaatcaggacaggtgatgcaggttctggagctctaccagggcagttctattttctttttttgagacagagtctcactgtcgccctgggctggagcgcagtggcacgatcttggtgcactgcaagctccgcctcccgggttcatgtcattctccctcagctacttgggaggctgaggcaggagaaccgcttggaggttgcagtgagctgagattgtgccattgcactccagcctgggcagcaagagcgaaactccatctcannnnnnnnnnnnnnnnnnnnnnn

SEQ ID NO: 20565 - DNA, 1319 bp, Homo sapiens
  misc_feature 1, 2, 3, 34: n = A,T,C or G
nnnccggcctctcatagagctgaatttcaccaanaatttatctccaaagacttgcatttcttggcatataaaaatagtgaccgtttgctgagggccagccgctgggcagacatcctaccgaggctttcggtgcgtctgccatctctgaatcctcacaactcccgggacaggggtgttatcactgttttacagatgaggaaaccaaggcccggagagggcaagcagcctgcccagtgccacacagctcgtgggcggcagagctggcatgtgaatccagctgccctggcctgcaagctaagggcctcgtgtcttacctctgctgcctcacagtcctgtgggtgtttctgtagtcgctgattactcgttgacttatttttgcttttaagacatcttagtataacgacaagctcctggcatgtactattcttaggcatttcacaggagaagttggagcctgggtgggtttggggaggcacccctagtcttggccgctgctccgcccttccaggccacagtttcctgcacatgcttgtgcagctcagtggtcattcgctgtggaaatagcagaattgctcattttcaatgtccggccccatcaaccttcaaaatattccatggcgggccctgtgcctggtccttgtgcatggccttggaagacatggccatggaattaaaaaacaaaaaagctttgactatcagttagcagccatccaacaaatcaagagaccttgttttgaactcttgaaaaagaacataaatgactgtactttttggaggaaaaaggcttcagggtcagttgactgacttttgtcctggtgcccagaatctgtgcctcagctgtccagagctggagagtgtctcagggaaaccagctgtctcttgggggagccctccacccctgttggcctcacatccaggagcaaatgcaggtatttccccacgaagctgccatcactgacccctgactgacctggaatcaaggcttctgaggctgagtcccctccaggctggtggcttgattgggcaccagtctcatctgtgtcctttgtaggaggcaggcaagtgttgggtgaatgacctttaagttcagcttctaactctggagtttcaggcttagaggcagtgaccctacctcctgtatatttggggatggttcgtttcctgacatctatggattggcttcagaaaatatgatcctcttggatatgatccttccatattcccatctgactgaagtgttgagaggcaaagaagaggatgtccctggcatctgtcttaggctggtcaagtcaatctgagaacactgaaagaaatattcg

SEQ ID NO: 20566 - DNA, 1609 bp, Homo sapiens
  misc_feature 58, 1577, 1598: n = A,T,C or G
agtcgcccacgcgtccggatggaagcgtttttggggtcgcggtccggacttgggcggngggtccggccccaggacagttttaccgcattccatccactcccgattccttcatggatccggcgtctgcactttaagttcgagggcggagtggtgattgccgcagacatgctgggatcctacggctcctggctcgtttccgcaacatctctcgcattatgcgagtcaacaacagtaccatgctgggtgcctctggcgactacgctgatttccagtatttgaagcaagttctcggccagatggtgattgatgaggagcttctgggagatggacacagctatagtcctagagctattcattcatggctgaccagggccatgtacagccggcgctcgaagatgaaccctttgtggaacaccatggtcatcggaggctatgctgatggagagagcttcctcggttatgtggacatgcttggtgtagcctatgaagccccttcgctggccactggttatggtgcatacttggctcaggtaagtagtaagtctagaggtgggggaaagggaagacaaaaggaaatggattagtggttgtctgcttttctcctgaaattctgatatgagggatgggctgggatcgctattactgggcagatggtcttctttgtagtctgggggctgtaggtgttgacactgattccagtgacaagatgacatgactgggagtcagtagacatgcaaagagaggacaccctagaacttcttcctgaagtggctcttagcttattttctaagcagagttcattctggtgaggcaagaagtagaatgtcatctttcactctaatgctttttataccatagatttgagacaactagcctgttattcagcccaatatccccccatggttttcccccaatctccctagcctctgctgcgagaagttctggagaagcagccagtgctaagccagaccgaggcccgcgacttagtagaacgctgcatgcgagtgctgtactaccgagatgcccgttcttacaaccgggtgagggatgtgctgggaacctaattggcgggctctggctacttgcaatccctgggtctctatgctttgaagaacagattgccttacttgtgtgactcctattttcacattggggaagacctccacctgacctttcatttaaggacttaaggcgggggcattattgaatgctctgctttcttccagtttcaaatcgccactgtcaccgaaaaaggtgttgaaatagagggaccattgtctacagagaccaactgggatattgcccacatgatcaggtgagtaatagggaaaaaattggtgacagacttgggaggtctttggcttacactaagctgggcttttctgggaggctcacccaggaaaattttctgggtggaaagttttggttggacagtacagctatttttaggaattgatccctttatgcttcacaattttattattctgtcttccttttttagtggctttgaatgaaatacagatgcattatccagaactgaagttgccctacttttaactttgaacttggctagttcnaagatagactcttcttttgtnaagtaaataaa

SEQ ID NO: 20567 - DNA, 419 bp, Homo sapiens
  misc_feature 1, 405, 406, 407, 408, 409, 410, 411, 412, 413, 414, 415,416, 417, 418, 419: n = A,T,C or G
nactatagggctaattggagctccacgcggtggcggccgaggtactaccctctgcttttgcaaggactctactgtgtcatcttaagtgagacatgtgcatatgtatactagtaaaattctctgctttcctagcattggacaaaaacaaaaatcaacaaaagaattgcctcagtgtcttaaactgggatccctactagttgactaggcacttagttactgaaggatatgtgtggaattcaagttcttttcaacctataagaaatatcggccaggtgcagtggctcacgcctgtaatcccagcactttgggaggccgaggcaggaggatcacaaggtcaggatttcaagaccagcctggccaacatagtgaaatcctgtctctactaaaaatacaaaaaaattagcnnnnnnnnnnnnnnn

SEQ ID NO: 20568 - DNA, 995 bp, Homo sapiens
  misc_feature 1, 2: n = A,T,C or G
nncgagaaggtgactttctttctcggtatttcctggtttccagaatccttagcgcgaggcggaaaaaatatttctcccagcttgtgttgatgccgcgattttgactgagacttcttcccacgatttctgtttttgcttctccaaggaaaatggcagctcccgagcagccgcttgcgatatcaaggggatgcacgagctcctcctcgctttccccgcctcggggcgaccgaacccttctggtcaggcacctgccggctgagcttactgctgaggagaaagaggacttgctgaagtacttcggggctcagtctgtgcgggtcctgtcagataaggggcgactgaaacatacagcttttgccacattccctaatgaaaaagcagctataaaggcattgacaagactccatcaactgaaacttttaggtcatactttagtcgttgaatttgcaaaagagcaagatcgagttcactccccatgtcccacttcaggttctgaaaaaaaaaaaaggtctgatgaccctgtcgaagatgataaagaaaaaaaagaacttggttatttaacagtagaaaatggaattgcaccaaaccatgggctgacttttcctttaaattcatgcctcaagtatatgtacccaccaccttccagcacaatcctagcaaacatggtaaatgcctgggaaagcgtgcctaagttctatgtacaggtccttcatcttatgaataaaatgaaattttgcccacaccttgtgggccaaattactgcgcgacctcccatgtatgaagactatatgccattgcatgcacctcttccacccacatctcctcagccacctgaggaacctcctttgccagacgaggatgaggaattatctagtgaagaatcagaatatgaaagcactgatgatgaggaccgacagaggtttccattaaaggatgtagtgaggaattctgccagtaattcatcttgagtcctgagagagaacatagcctttgag

SEQ ID NO: 20569 - DNA, 2135 bp, Homo sapiens
agctaattttgtatttttagtagagatgttgtttttccatgttggtcatgctggtctcgaacttctgacctcagtttatccgcccacagcagcctccctaagtgctgggattacagatgtgagccaccatgcctggtcctgtttccgtgttattttaagaccatcttggtcatggtttactaaatgctttgtccatctgaatcactgttgcatagttgatgttgatacctgtgagcagggccttctgctcagggcaaccttgagtatttgttgacagtgggagtggttttgtagaacaaacaatggcttatttggagagctccacacaatagattatcctctcctgtgggagccagaaagagatgagctcacagataatgggtttcttccttcctggtagttacgaataaataatagtgtgacagactcaccctctagtggttgttggtagtactgaaacaggaagaattgtctcctggtttgatttttcttactttcaattgctttctctgttcctagtggctgggcttcccaaatgtgatgttggtgaataggcttcattttgaaagagctggaggtattgtctttagaaattggaggatggaatcttacctcttaacacatttgttgagtagcagacatgaccttggaatgactgtgaaaattacttttcaagtttatacctcatcagtaccaaagccagatcctcctgtgatgtagcaggaagccctttattagtttttctctatcaatccatcttttataatttccaaaataggataaggagaagcttaaatatgaaatgtatttaaaggtcttatcctaccagttgtttcctgtgtgtaaatgcctaatttcctgtttggttaaggaactgttctcagacttctgtggcattgagtcagttgctttggttaattctgttctctgagagtttatcctgatctctacctagacaagttaataactgtcagatatcattcaaataaatgataagtagtaaggatttggttctttctttttgattagcctttcctgaatgcttgttactttctaagcctgcagacttcaaagaaaaaaatgtagttttaattaaattgcaggtgtttttaaaattattaccttttatttttactaacccattgaggaaaattgatcagtatattattcatgcaaaggagagataagatgagcacactgaaactccagttaatcctcctttgcagatgagggtaatgggaatgtccaggaagctagccataatgacttgatgtattctcttggttcttccaaaacttctcaggagctatgaagacatgattggtgaggaggtgccatcggatcaatactactgggctcctttggcccagcatgagcgaggaagtttagcaagcttggatagcctgcgcaaaggagggcctccacctcctaattggagacagccagagctgccagaggtgatcgccatgcttggattccgcttggatgctgtcaagtccaatgcagctgcatacctgcaacacttatgctaccgcaatgacaaggtgaagactgacgtgcggaagctcaagggcatcccagtactggtgggattgttagaccatcccaaaaaggaagtgcaccttggagcctgtggagctcccaagaatatctcttttggacgtgaccaggataacaagattgccataaaaaactgtgatggtgtgcctgcccttgtgcgattgcttcgaaaggctcgtgatatggaccttactgaagttattaccggaaccctgtggaatctttcatcccatgactcaatcaaaatggagattgtggaccatgcactgcatgccttgacagatgaagtgatcattcctcattctggttgggagcgggaacctaatgaagactgtaagccacgccatattgagtgggaatcggtgctcaccaacacagctggctgccttaggtaacagtagggactttgagaatatgaagatgaatttttgaggactgacttaaatttcctaaaaaaaaaaaaaattaaaattctttagcctattctttagcctccattcctatctgtatggcatactgtaactccaacctttctatcttggtggctattctctcatgtataccacatgtaccta

SEQ ID NO: 20570 - DNA, 246 bp, Homo sapiens
  misc_feature 1, 2, 3, 4, 5, 6, 7, 8, 9, 10, 11, 12, 13, 14, 15, 16, 17,18, 19, 20, 21, 22, 23, 24, 25, 232, 233, 234, 235, 236,237, 238, 239, 240, 241, 242, 243, 244, 245, 246: n = A,T,C or G
nnnnnnnnnnnnnnnnnnnnnnnnncccctaaccagttctaacgcaggtcaattagtttttcagaagtctctctcttctcatgttttttcctgctttgaaactcaggggttctcttttacttaatagatcaagatcccccactaatttgacatttaatcaagactctctacaagttgactatctcttactggctgtgggacttctgcggaaggcaaactgagttaggttaannnnnnnnnnnnnnn

SEQ ID NO: 20571 - DNA, 485 bp, Homo sapiens
  misc_feature 485: n = A,T,C or G
aggtacattgctggcctttgcccaaattatgccaccccatttggtatgacctgacaccattgtgatcagtctgatgacctggcagcatcccatctgcctacccagttcactcttgctccatttcagggcctcttacagcaactcctcacatatcttcttgtcactgtctcatgccttctcagtctcagctaacatcagcccattcattgatacagcaagacaatttgagaaccactatgtgctctgccagagtgaataacaaaacgcaatacttgccctcaaggagcttagactctaatgagaaagacagacaataaagaataaacagtcatcctggccaacatggcaaaacctcgtatctactaaaaatgcaaaaattagctgggcgtggtggtgcatgcctataatcccagctacttgggagactgaggctggagaatcgcttgaacccaagaggccggagttgcagtgagccgagatcacan

SEQ ID NO: 20572 - DNA, 2151 bp, Homo sapiens
  misc_feature 2136, 2137, 2138, 2139, 2140, 2141, 2142, 2143, 2144, 2145,2146, 2147, 2148, 2149, 2150, 2151: n = A,T,C or G
ctgcattaatttaaatattataatccatatccagtcaaatatgttaggaaaacctgataaagactctaaaaaatgctgcacaaggaaatttatcaaaatttgtgaaaagacatgtgttctcggaggaagtgctggccaaagtgagggaaaaagtgaaggatgtgcctgcccttgtggccaaatttgatgagatctatgggacactgcacatcactggccaggtcaccactgattctttggatgctgtgctctgccacacccccagggacaggaaatctcacacgttgctattaaacaagaggatggtcagccgtcgcaccttccagccactcagccagtccctgttggctgagtaaccctggtttcagtccacctatggatctgaggggcctgcttctagtgagttattacctttcctaagaagccaggtatcgcacttcagcagacagtgtgctgacacttggtcttctcctgaaattcccaaattcactgaatggtaccatgccgatctctgagaagttatgttgcaccactgtgaaggtctagatgcaagcttggctccctcagaaaggcgcttcccttttgcatggctgaggatccttgaaggaacctggtcagtctccggttcagcttccgacaccagagtggaacccagtaagcaccatcaggaatgaatttcactacaagtgtggataactctgattttcaaaggagtagttacttgcaaattacatccttgctgaattcaggaggtatgaaaccctattttaccatgttagaaaacagcccaggattttctcattgctctgccatcatatatgtctatgacttgagcccttatttttccatctgcaaaacaataatgcctatgtgtctttgcatatagatttgaaatcttcattcaaggtttagtaggatcatattttctcaaaaataagagaaataaggttcataagcaaacttgctgggattgtggttgttttgttttctcagcagcacaaacaaaaccagaatttagcctttaggactgctgagtaagccaaatttaaatgactactgctttgttcatgggtaagccatgtgcttttcaaaataagtgccactaaaaaccacataatgctttggtttctatgtggataataaatatttagtcctatagtttatcttatttgttaatgatttttctctcttgaatgcctcatattaaaaaaaaatgtgccatgagagcagttcaaagctgcttcatacttatggtctcaaatatagtatgtgttgaattttaccatgtctggtcaccagtgagcagaagatacacagtgaccccacctcacttgctccttttgtttcagaaagcccagagggttgctcagacctcaggagctgtctgccaagattgctgcagactcttcattgccacctccaaaactaagactgttcacttggttgttgttctaaggcaaggattatagagtcagaaattgtagactaggagaagtcttctgagtctcctaattaattccttcatctttcaggttaaggaaacgatccatgcaagagaggcccaatctcaactgtagactgtgtcccagtaagagagtcacagcttcaggtgtttgctgaatccaggtctgagatcacaatcccacctgaggacaggatccgcatatgagagtcgcacattggtataattgatttgtggtagagctgagattagaatccagattcctagtctagtatccttcccactgtaccacattatctcttttcagaggggaaaaaggagcagctcttaagaaacagaatactaagggcccccattactgtgtggccctgggcatcctcagtttcctcatttggtaaatggggataatggtaccgacctcttaggcttggtgtgaggatgaaatgagatagggaatataaagcaagcagatagtggctggcacatagtacatgcaatatgtttgaaactagttaaggaattataaaaacaaatgagttcttccttctgctcaaaaatattgaatttcttgtccttgtgctctgtgaaacattgaacagccccatttagagaaacaaattctctgccctcatagaatcctaattgtttctgtatgtgtctggtgttttgcacannnnnnnnnnnnnnnn

SEQ ID NO: 20573 - DNA, 464 bp, Homo sapiens
  misc_feature 1, 2, 3, 4, 5, 6, 7, 8, 457, 458, 459, 460, 461, 462, 463,464: n = A,T,C or G
nnnnnnnncaggtacttttcttcttgaagtgagtttagatcacgtttcagcaaacgtcctctggagctccttcctctggggaaggagcagcggagggctgtcatcaccactgcactcttccaaccttctcttctgctcattcaccagttccatcctcatctgaccatattactccaggaacttcccttttcccttgtaaattctgttccatttttggccaaaccatggtttgcctctgctgcattagtttgaagtcattttttttccagacattgtggcggtagttcccagatgtccgaaaagatgaagttatcagtgcacgagcagccagggcttttctttatgttgattcaccttaggacacagcccaacaatgcctgcaattgtcattagcccgtgaagaggttcgcttaggctgccacagcacagagtcccagctgcgccgtttctccccccnnnnnnnn

SEQ ID NO: 20574 - DNA, 1588 bp, Homo sapiens
  misc_feature 1, 2, 3, 4, 5, 6, 7, 62, 63, 64, 65: n = A,T,C or G
nnnnnnnccccctaggggtgggaggaagcaaaagacctgcccgggcggccggccgcccgggnnnnactttttttttttttttttttacattttaaaaaattatctttatttaggtttctgattcagcacatgtatcaaagactaatcaacataaaggagtaaataagacattaattgaaagtcttacatctctctaaactctgaccaagaatgtcaagattgccactattaccagaactccaacctagtcaagttgtagacaagctatcatgaacaacatacagtgtgcacagatatgcagaggcaaaaggcatgctagcgcttggctctcctcttttccttgttgacatctttctgttggacagtccactttcgctttccaggctaagttccaaatcaagtccaaagaaggctcagggtcaacctgaccagatactcttctggaggaatgcattcttaaactgttgtgcctgcaactttgtttttgccaggatgaagttcagaccgagatgtacaatacaatctagatgacggtgcagactaagtcaagaactaaagttgtgcagtaacccgagttaaggcatgaatgcagacacacacatgcacacacacagcacccatgctatcaagacacaggattttttcagttgcctcatgagaggcaacctgggcttggcagttaatcagaactgctgagcattccagaaaatgccccccacgactttatgctaacagctgtgtgtatgttttaatcaaaaaattaaagaagaaaaaaaaaccctaaaaaacaaagaaaaaaacaaacaaaaaatcaccaaaaacctagaaaccccttaatctcttacaatggctcttgagcatggaactcatgtagcagcatcaatggctggctctttaacaatttggaaataaaaggttgttttactatgtatttctttggtagtcatcactacaaagttttcagtgttggttacctataagacaagtactagacagaagatcaagttacacagaaatatttcttctgtactgataagatacaaatattgagctctcaaagcacaagttactatgctttttcttgccttattgggcattctctaaaagcaaggctttgtgcaggaaaagttcatgtctacctaacaaagggtgatacatgttctattttcctacaagtgaacaattaacaaaaattcacattatcaattatttctggttgaatctgttagaagccaattacaaagggacagtagcacttggtgtcaaagccactttctggtcacacattcattccatggttgctagtcagtatctcaggagctcagaatttaaaactcctttcagtcaacgaaggagtaagttcaattaaaggcttccactgtctgccaaatttctagaattctgtctagagtgctagcatgcttgatgagagaaagcagttcagagcccaaagaggtgtcaggtattaggtaagttaatttggttttgtataaaaggcatggtaatctggcaacagagtaccgccctccgcaccatgctagccaagggtctctgtctgcaagacaggaaaatgaagctaccggacgcg

SEQ ID NO: 20575 - DNA, 1018 bp, Homo sapiens
gcgtccgtaggttaggcggccagggacccgcgccggtttccgcgggcgacctgcaaatcctgcccggggcccggcaggcgctgcgtcccggcgcgttggcagttggcgacccccctcgaatcccccctctgctgcgggctccccgtggcctttgggaggctcgctgttatactttctgctgagtgccctgggcctgacggtctgtgtgctggccgtggcctttgccgcccaccactattcgcagctcacacagtttacctgtgagaccacactcgactcttgccagtgcaaactgccctcctcggagccgctcagcaggacctttgtttaccgggatgtgacggactgtaccagcgtcactggcactttcaaactgttcttactcatccagatgattcttaatttggtctgcggccttgtgtgcttgttggcctgctttgtgatgtggaaacataggtaccaggtcttctatgtgggtgtcaggatatgctccctcacggcttccgaaggcccccagcaaaagatctaacattcttgctcaaagttgcgagagaaagtagcacatggagtagctgggttggggcggcggcctcttctcttcagctcccttagcttggctccgtaagtggatcacttgccaaatgctttagatgattgcctctcaataattgaaaggtggtggtagttgtattgctgcactgtcggtgttaagagaaattactctcacaagagcagaggcctgaagattctttcttctgaagggatgatgagcctggactctctggactcctagattatgaactcctgcagtggaccatgtcctattttttggaggcgttggggggaattgtcttacgcagcacccaagcacactgctatgcaatggaccacagataggaagcaagcactgcatttggctcactgagtttgtagcccctgccttttatagcaaacaagttgataataattgtgagagtgaaggcagatgaaacacacagtactcagagtgagcggacgc

SEQ ID NO: 20576 - DNA, 964 bp, Homo sapiens
  misc_feature 962, 963, 964: n = A,T,C or G
gcaaaagagagtgagaatgcaagacatggggaaagagacttaagtgctcctttgctttgccgccggccgaggtacagatttgaatggctttgacttttggcagctgcacagtgctaggactggaccatgaaatatctctgggctctgacaattacatttgggttaatctaagcctgatcccatgtgttcctggaagagaagccccatgacattcaaagtccttgacaatctgacaccagcttttctaaccctataaggcccttccatccagcaaacttcctgcagaattattctctatccctcacatgttcatacccatgctcgacgcatttgctctctctgcctagaatcttactcttgtctgcctttctgcctggttaaatcccacatacgccaagatccaacactgctaaacccctttccttgagttgggatcatcttgttatgcagggccgggatacctgcaagggaatggaattaaaaaggttaagagattgagcagttgaaccttttcttgggaggtttgaggacaagccatagtgaaaggatttacctacagagagcacctcattattagatttgtggaaagtactgagtggatggttgactcaagtaaggagggaatgggaagtccacagggcagttggaactgaagccaacatgactctttcatatcaggtatggacattcttgctaacacacagcggttcctcctcttattttaagcaacaaaaataatttatcagaatggttaatttgcaaacagtaaaaatgtctggatttctaagaggtaaatgattatgctgtgttccaaataatactaaaatgcacttgtattgccagtaagggaggtatgtaaaagaaaggaagagattagaccgggtctggataaaaagcttatcttaaaccaaaactacatgtcatcaaattttgcacctaagtacctcgggcgcgaccacgcnnn

SEQ ID NO: 20577 - DNA, 460 bp, Homo sapiens
  misc_feature 1, 2, 3, 4, 5, 6: n = A,T,C or G
nnnnnnggggggttttgggctggaactgcagcgcttagagagctcggtggaagctgctaaaggcggaggcggggctctggcgagttctccttccaccttcccccacccttctctgccaaccgttgtttcagcccctagctggattccagccattgctgcagctgctccacagcccttttcaggacccaaacaaccgcagccgctgttcccaggatggtgatccgtgtatatattgcatcttcctctggctctacagcgattaagaagaaacaacaagatgtgcttggtttcctagaagccaacaaaataggatttgaagaaaaagatattgcagccaatgaagagaatcggaagtggatgagagaaaatgtacctgcccggcggccgctcgattccaatgctgacctttgcccagagttgacaaaagagctaagagtctgagtttggggaatgaagggct

SEQ ID NO: 20578 - DNA, 658 bp, Homo sapiens
cagagtgaagccactggtgagaggtggctgtcaggaactggcagctaacacggtcgcctcccagtttcatggacactggtagaaaatacaaaattcctcgattagggacaagggaccactgattattcaaaacaatagcaatagccagagcatcagcattttccaccaccctcccaagccccagttcccataggggagtcagaggcacctgcatgagccattggactactacaagaaaggagcgcaggactctaccctttcacaacgcacagcaagaatgcctgccctctgctctggaagaaggtactaacctcttaccttccaaggtggtagaacatgcttgaaaagatagtaagtgaaaaggggtagccagtgctttactcacaagactgcttgaacatgagactcaaggagggacctcagcaggcctggggtgttcagcaactattcctggccggggcatcttgcaaaggagttgctgtgacagtaagctcttccactttgagaccgtcacctcagccacggctcccacctgggctcaggaatggtcaggcaacacgtggggcccaggatggcggtggatgactaaactgccgaagaccgcgccgctgcgactacgaagtacggagtacggagtacaggtctgcggacgcgtggg

SEQ ID NO: 20579 - DNA, 1431 bp, Homo sapiens
  misc_feature 1431: n = A,T,C or G
aggtctgataattaggatattctgaagtaagagctaaattttggttttgtttttcctgttgctgattttggtgacacatctctgttgatatcagtaaatatcaattgataagtaaaaaatatgcaagtcttaacttggatgtctttcatcttgcatgtgctcacctccctcccctctcacccagtcgtttgggttgtttgcctccccttactgtcatatcttcatagtgtggaactaaaacgtagaaatgagggaagtatagtggacagatgtttcccccaccccttcttttacctaggcaagagattaggggagtcttttttgattaaagagagtaggtccaaaataaagactctgaaacactaaaatctggggatccccaacaaaagaactggctcagtacctagtgatccgacggagacacctctgttagacagctcctgcccacacacacagcttccagtcttgctcttctatatgaacaggcagttaacgatgatcataaggaccaacctgagcagcagaaccaaagggactgaggaaacagacagtgctggtacaagtatgcaagttttctgtaaacagattactttcaaacagttgggagccccagggagataatagaaggtatcctactcaacagcagtatatagaatgctgtagaagaggaatattgtaagaacaagaactatctcttgaaaactaaaaatatgataactgaaatataaatttaaataggattggaagctaaagctaggaaattaccctagaatgttttttgagaaatggaaaatacgaagaccaaaaaaataaaataaaactatgctgtgaaagagaaagattagcatttgagaaggcggaagttggtcctgctcagatgcggttttcagatgccttattctaaaaatagtgatagaaaacaaatttctacaaagcaaaattacaataaatttattaaactcttgcaacaaagctgttttcttatgtcttcctatgttttcctgctgtcattcaatgtgatgctgaagttcttcctccttaaaaatgtaatatttttccctttgcacaggtaatttagaggtttaatttatttggtcatcatgatagctattcctgatagctgtcctgttacttagacataaaaatagtgagtaagcccaattacatatttgtagggttgttgaactcttaaaaagaaatcacttctttaatttttctactttttaaaatgggaacgcagaataataatgaaatttgttctaaaccaaaaacctacctggtttaccagttattgcagaatcttgccgttgagattagcaagcagtctgtcgtaatggcttattctgtgcaaactctttcctcaagattgttgaaagatggcttttaattttaactgttgttgttttgcagacaaagctctgatggcaccan

SEQ ID NO: 20580 - DNA, 1360 bp, Homo sapiens
  misc_feature 1, 2, 3, 4: n = A,T,C or G
nnnngtgagaagcgtgtcgtgtgccgagctctttgcccaatgccgggattggccctcctcgagccagaatagcgcggccccatcccccagttcgtgccccggggccgacctgtccaaaccttgtgctgacaaggcgctttcgattgtctcacaggaggaaccctctcaccattggtctggggaaatccggatgtggaaagccgaccttgccggaagctttctcccacattcactacactgataggtttttcttcattgcgaattctaacatgctgacaagttgtgatttatgcggaaggcttttctggcatatgttacacttgaaaggtttttctccagtatgaattctgtggtgtcgaataaggtctgaggtcaaactgaaagcttttccacactcgttacattgatggcttttggagtgactatggattctctgatggtgggtgaggagtaaggcctgactaaaggtttttccacactccttgcactcacagggctcctcctgactgtgaattctctgatgtcgattaaggtgagagctgcgcctaaaattttttccacaatggatacatagataaggtttctctccagtatgaattctgagatgttccaaaaggcctgcattctggctaaagactttgccacactcattgcactgataaggcttctcaccaagatggattttctgatgtctgacgaggtgtgaactcctctgaaaggctttcccacactcatgacactgatgacctttctctctagagaggactttcttatgtcctgtaagactggaactctgacacacatcagactcgcagagtttctttcccgtgtgtgtactcgcatgttcaatcaggtccaagtgctggatgaatctctgctcacgttctgagcatttatactcaatcttctctttgggcttggcctgatgcctttccaagttagagccctcattatgagcctccatgggttcagatattttcccagatgactctactcttccacaagagtctgttactacaataagcttcccattctcaatccttgtctcctcacccttctctttctcaggctttgtaacttcacactcatgccgaacctgctgttcctgtactcctttcagaggggccatctcctccacaagtattttttgtttctttggctggtctgggtccaatgctgttgccatccccagcttcagactgttctccttgttttggagaactttctttggactgtatcttcagagacactcctggtcaaggggcctcagaggacccaaacgctctgaaacagcgtcttagctcatcgccgagtgtcagctctagctcttcggagcgctttcttctccccccgcgtacct

SEQ ID NO: 20581 - DNA, 1953 bp, Homo sapiens
  misc_feature 1, 2, 3, 4, 5, 6, 7, 8, 9, 10, 11, 12, 13, 14, 15, 16, 17,18, 19, 20, 21, 22, 23, 1953: n = A,T,C or G
nnnnnnnnnnnnnnnnnnnnnnnggccagcttttctaagcaaatagattgtctgaattagtcacagaataattttgtgaaaattcatgtttaagtagcaactaccctttctttttttatatatttttaaggtattagtttatcttcttctaactggtgcagtcacttaatgttttcattaatcttcgacctggagagtgaaatactgatatttctagaaaaaaattctactcctctgattatttgaaatgctgaggaaaatgtccctcccatagtaaaacttgtaaataaggaactatatcatattcagtagctgtgttctgttccatcttttttttttttttgagatggagttttgcttgttgcccaggctggagtgcagcggcacgatcttggttcactgcaacctccgcctcccaggttcaagcgattctcttgcctcagcctcccgagtagctggggactacaggtgtgcgacaccatgcctggctaatttttttgtatttttagtagagatggggtttcaccatgttggccaggctggtctcaaactcctgacctcaaaggatccacccgccttggcctcccaaagtgctgggatcacaggcgtgagccaccatgcccggcccatcttttttttttttttttttttaaagatgttaataaactttatacctttctggagactttgttctaaaatgtacataaatgctcatctagttaacatatttacttagaatgtgggaggaggagtcacattattatccctgaatctcaagtacagcagaagtgaattcctgggatagtaggatagactaacatgtaaaaaggccaggtgatgcataggttctcatttcactgccctcagccttcctctccttctgagctgtgccttctcacatgttcagtcaactccagggaatattgtctccatcttctggatagaactagttgcaggatccgttacaagaattcagagttttggcatctcccctttgtatgttgtaggagaaggtttggcattgaaaatgtgctgttgttccaaagaaaaattagcaaaggacttgagatttagaaaagtctcctttgtaatgtgcatcattaccagttatctaaagaaaaacatgtaaaagccaacaaaacccttgaaaatattttgcatatggatgtctgtttcacgtttcaactgaagatgtatagagcacctctgatgatgaggaagataccatgctaggcagtactttcaagaacgtgagttcttatttctgcaggccttttgtgcccccttttaaatgttagcatttattaggtacaaactagtggggaaggtttttttaaaaagttttgcagtcttgtaatttacctttttaaaaaatttattttatttttctgagatggagtcttgctctgttgcccaggctggagtgcagtggtgccatctcagctaactgcaacttccacttcccaggttcaagcgattctcctgccttagcctcccaagtagctgggactacaggcgcatgccagcatgcctggctaatttttgtatttttagtagagcgggggttttgccatgttggccaggctggtcttgaactcctgacctcaggtgatccgcctgccctggcctcccaaagtgctgggattacaggcatgagccactgcgcccagccttgtaatttacctttgatggtgacctgaaatgcagtatgatcctatatgtggcacgtagtaatgttcagtgtttgctgaattaattctgggcagcactaagaaatcctctttcccagtcatattctataacacatttccatttgcaaaaaaactggagtttttggtcccgtatgacattgctgcctttttgatgatttaaaatggcggggggtgaacttgtcctgaatcggatcccggctttgaacagctcccgggaaaacttcctaaaaaattttggaan

SEQ ID NO: 20582 - DNA, 571 bp, Homo sapiens
acatatcatcattttctgactggggtcaggacctggtcctagtccacaagggtggcaggaggagggtggaggctaagaacacagaaaacacacaaaagaaaggaaagctgccttggcagaaggatgaggtggtgagcttgccgagggatggtgggaagggggctccctgttggggccgagccaggagtcccaagtcagctctcctgccttacttagctcctggcagagggtgagtggggacctacgaggttcaaaatcaaatggcatttggccagcctggctttactaacaggttcccagagtgcctctgttggctgagctctcctgggctcactccatttcattgaagagtccaaatgattcattttcctacccacaacttttcattattcttctggaaacccatttctgttgagtcccccgcgtacgtgtcaaaaaacttaaatgcatatttgtataggagactgccaaatgaaattatactctggtctagagagtgaagcaaactctgagccagcgacagaatggatgaacacatatccttaagaactaagtaatgaacagagaatgt

SEQ ID NO: 20583 - DNA, 960 bp, Homo sapiens
  misc_feature 1, 2, 949, 950, 951, 952, 953, 954, 955, 956, 957, 958, 959,960: n = A,T,C or G
nnatggtaaagggtgggctaaggaacagaccctgggattacgcgtcggccttaagggctctgagaggagtctaccttgccttcttatgggaagggagaccctaaaaaactttctcctctttgtcctcctttttctcccccactctgaggtttccccaagagaaccagattggcagggagaagcattgtggggcaattgttcctccttgacaatgtagcaataaatagatgctgccaagggcagaaaatggggaggttagctcagagcagagtagtctctagagaaaggaagaatcctcaacggcaccctggggtgctagctcctttttagaatgtcagcagagctgagattaatatctgggcttttcctgaactattctggttattgagcccttcctgttagacctaccgcctcccacctcttctgtgtctgctgtgtatttggtgacacttcataaggactagtcccttctggggtatcagagccttagggtgcccccatccccttccccagtcaactgtggcacctgtaacctcccggaacatgaaggactatgctctgaggctatactctgtgcccatgagagcagagactggaagggcaagaccaggtgctaaggaggggagagggggcatcctgtctctctccagaccatcactgcactttaaccagggtcttaggtacaaaatcctacttttcagagccttccagctctggaacctcaaacatcctcatgctctctcccagctccttttgcattaacagacaagttccgcacaacacacagggggggcggctaaaatccctggggcagactagggaccagctttgtaaaggggcatgagggggatataagcagcgggcgcatccacccggggaaccccggatcggagcatccgggggatggaaccacggacaccgaaactagcgtgaccactgcggcacgcannnnnnnnnnnn

SEQ ID NO: 20584 - DNA, 1430 bp, Homo sapiens
  misc_feature 1, 2, 1429, 1430: n = A,T,C or G
nnatgctattctgtccctaggtgtttggttcaccattataatgaatttagtgagcataggtgatccatgtaactgcctagaaacaacactgtagtaaataatgctttgaaattgaacctttgtgccctatcacccaacgctccaaagtcataattgcattgactttccccaccagatgctgaaaatgtccttgtgatgtgcacgtaaagtacttgtagttccacttatagcctctgtctggcaatgccacagccctgtcagcatgaatttgtaatgtcttgagctctattatgaatgtgaagccttccccttatcctccctgtaacttgatccatttctaattatgtagctctttgtcagggagtgttccctatccaatcaatcttgcatgtaacgcaagttcccagttggagctccagcctgacatcaaaaaaggcagttaccattaaaccatctccctggtgcttatgctcttaattgccacctctaacagcaccaaatcaaaatctctccactttcagctgtcttttggaggacgtacgtaataaggttttaatttagtaaaccaatcctatgcatggtttcagcactagccaaacctcaccaactcctagttctagaaaaacaggcacttggcagccttgtgatgtcatacagagaagtcacagggcagtacctgagggtctgtaggttgcacactttggtaccagataacttttttttttctttataagaaagcctgagtactccacactgcacaataactcctcccagggttttaactttgttttattttcaaaaccaggtccaatgagctttctgaacagctggtgtagctacagagaaaccagcttccttcagagagcagtgcttttggcggggaggaggaaatcccttcatacttgaacgttttctaattgcttatttattgtattctggggtatggcgtaagtacagagaagccatcacctcagatggcagcttttaaaagattttttttttttctctcaacaccatgattcctttaacaacatgtttccagcattcccaggtaggccaaggtgtcctacagaaaaaccttgggttagacctacagggggtctggctggtgttaacagaagggagggcagagctggtgcggctggccatggagaaagctgacttggctggtgtggtacagagaagccagcttgtttacatgcttattccatgactgcttgccctaagcagaaagtgcctttcaggatctatttttggaggtttattacgtatgtctggttctcaattccaacagtttaatgaagatctaaataaaatgctaggttctaccttaaaaaaaaaaaaaaaaaaaaaaaaaaaaaaaatataagaacgggggtgcacgcttcctgagtgatgtggtgtgcatcttctattttatattcttcann

SEQ ID NO: 20585 - DNA, 491 bp, Homo sapiens
  misc_feature 1, 2, 3, 4, 5, 6, 7, 8, 9, 10, 11, 12, 13, 14, 15, 16, 17,18, 19, 20, 21, 22, 23, 24, 25, 26, 27, 28: n = A,T,C or G
nnnnnnnnnnnnnnnnnnnnnnnnnnnnggtttaggatggttctaacctgatgggttgtgtttacagtggggtttcccccaaaggttatcttcctgctttcctctgtaaatagggcagttgctgcaacagattaaatacactcgggccacctgtgggttagtgggtcaagaatttttgacagaaaggctataggctgccggtggcccccgtgtgtttgggtgagcacccctagagctatccctttattcacattgacgaagaggtggaatggctgttctagggaaggtagaactaaggcagttatgagcaggtgttttaattcctctacttgttggacctcccgtggtgtccaaagaagaggatcaggtctctcttgagtaagtttcaggcatagaggctttgtttttaaagcataaagtcaatccataagcgacaatatccagtcaacccccagaatttcctaagcccttattttgtttcaggcaaaggt

SEQ ID NO: 20586 - DNA, 1108 bp, Homo sapiens
  misc_feature 1, 2, 3, 4, 5, 6, 7, 8, 9, 10, 11, 12, 13, 14, 15, 16, 17,18, 19, 20, 21, 22, 23, 24, 25: n = A,T,C or G
nnnnnnnnnnnnnnnnnnnnnnnnngtgggagaatttcctgttttgtcagcggcgaacacaagtttgttagcccaagggtgacggtgcccatgtactcctcggccttacaccgcgccattggtgcggaaccccttttaaggacatgttgcgggtcacagagttttattgcattcatcgggggaaagggagatggttggaatgaaaaagaccatcagtcttctgacaggaagatgttatatgggggctccaacccctaactgggtactcctcttgctaccacctttggagcagaagatgaaggggagagggagcttctccctatggcctcatggcttcttgtgagacagatcagtccagccagatacagagcaaagcagctttgcatcaccacaggccagttgctgatgcccagctttatgtctaaaaaaaaaaaaagtggaagcctcaagggggatggaggatagcaagaagaatgggtgccttggccccagaggcattgtagggagaggaagacaatgtatctcatcagggttctcaacattatgagattatcacacatcaactatctttggaggggctgagtgattgagttatggctctgactcctctctgggggtggagagtgaagatgacaaagaaggccatctgtcccctaggagacacagttgcagtataagacaggacagaagagaacagaaaaacaaatccaactggaaaaaggggtgggagaaggaagtgtgctaggtacacacatccagggagtaggggaagttcccacacttgaggcctccatcctcttgaaatgaccagaattgatccaagtagagatattcctttcttctggaaataaaccttggggatggctaggcaggatgaaaggaaactttacatggagaatgaatcctacaccctggcccatcattccagcctccaaaactggccacacacccactgaagggttccagtcccaggagaggtgtgaggttctggtgaagagcagcaatagtcaaacatcttcccccaggcttgaatgcttttggccatctctgggttgctgtgcccagatgtagagatgggtggagatggaattgaggtaagggaagagat

SEQ ID NO: 20587 - DNA, 1084 bp, Homo sapiens
  misc_feature 1, 2, 1083, 1084: n = A,T,C or G
nnagggcgaattggagctccacgcgctgacggccgctctacacggggagagtcactcctgccttcaccatgaagtccagcggcctcttccccttcctggtgctgcttgccctgggaactctggcaccttgggctgtggaaggctctggaaagtccttcaaagctggagtctgtcctcctaagaaatctgcccagtgccttagatacaagaaacctgagtgccagagtgactggcagtgtccagggaagaagagatgttgtcctgacacttgtggcatcaaatgcctggatcctgttgacaccccaaacccaacaaggaggaagcctgggaagtgcccagtgacttatggccaatgtttgatgcttaacccccccaatttctgtgagatggatggccagtgcaagcgtgacttgaagtgttgcatgggcatgtgtgggaaatcctgcgtttcccctgtgaaagcttgattcctgccatatggaggaggctctggagtcctgctctgtgtggtccaggtcctttccaccctgagacttggctccaccactgatatcctcctttggggaaaggcttggcacacagcaggctttcaagaagtgccagttgatcaatgaataaataaacgagcctatttctctttgcaaaaaaaaaaaaaaaaagagcccccgcgcagagggcgtccgaggagtgtggcggaaggacctcgtggagggatttactgatgcaagagatccggaaggttcatcaaggcttttaagaaagttgggtctccctctggaaagggtggagtgcatagcacgtgatgctgacctggaaatagtcgggggggcagatctgaagcgctgggtggactggatccacacacaaggttgtgtcagcaaggcggaatcgaagagcgtgaagaaatgcgggggtaaggaccgggacaggcggccacaacaaggatccgggtccggtcaggaaccttccgtgggggggtggaagggtcaaccaccgggccgaaaaaaatgcttcggggccggcactagcggagggggacaaaccagggataccaggaacggcaccctatacaccggaactacnn

SEQ ID NO: 20588 - DNA, 348 bp, Homo sapiens
acgcgggggacgcgcgtctgtggagaagcggcttggtcgggggtggtctcgtggggtcctgcctgtttagtcgctttcagggttcttgagccccttcacgaccgtcaccatggaagtgtcaccattgcagcctgtaaatgaaaatatgcaagtcaacaaaataaagaaaaatgaagatgctaagaaaagactgtctgttgaaagaatctatcaaaagaaaacacaattggagcatattttgctccgcccagacacctacattggttctgtggaattagtgacccaggtaaaatcaagctcatcaaaggcagttaacctagtagttgaaatggatactcttctttctgt

SEQ ID NO: 20589 - DNA, 1798 bp, Homo sapiens
ctatagggaatttggccctcgaggccaagaattcggcacgaggccggcataaccctgggtcctgcttgtgctcagctccagctcactggctggccaccgagacttctggacaggaaactgcaccatcctcttctcccagcaagggggctccagagactgcccacccaggaagtctggtggcctggggatttggacagtgccttggtaatgaccagggctccaggaagagatgtccttgtggctgggggcccctgtgcctgacattcctcctgactctgcggtggagctgtggaagccaggcgcacaggatgcaagcagccaggcccagggaggcagcagctgcatcctcagagaggaagccaggatgccccactctgctgggggtactgcaggggtggggctggaggctgcagagcccacagccctgctcaccagggcagagcccccttcagaacccacagagatccgtccacaaaagcggaaaaaggggccagcccccaaaatgctggggaacgagctatgcagcgtgtgtggggacaaggcctcgggcttccactacaatgttctgagctgcgagggctgcaagggattcttccgccgcagcgtcatcaagggagcgcactacatctgccacagtggcggccactgccccatggacacctacatgcgtcgcaagtgccaggagtgtcggcttcgcaaatgccgtcaggctggcatgcgggaggagtgtgtcctgtcagaagaacagatccgcctgaagaaactgaagcggcaagaggaggaacaggctcatgccacatccttgccccccagggcttcctcacccccccaaatcctgccccagctcagcccggaacaactgggcatgatcgagaagctcgtcgctgcccagcaacagtgtaaccggcgctccttttctgaccggcttcgagtcacgccttggcccatggcaccagatccccatagccgggaggcccgtcagcagcgctttgcccacttcactgagctggccatcgtctctgtgcaggagatagttgactttgctaaacagctacccggcttcctgcagctcagccgggaggaccagattgccctgctgaagacctctgcgatcgaggtgatgcttctggagacatctcggaggtacaaccctgggagtgagagtatcaccttcctcaaggatttcagttataaccgggaagactttgccaaagcagggctgcaagtggaattcatcaaccccatcttcgagttctccagggccatgaatgagctgcaactcaatgatgccgagtttgccttgctcattgctatcagcatcttctctgcagaccggcccaacgtgcaggaccagctccaggtagagaggctgcagcacacatatgtggaagccctgcatgcctacgtctccatccaccatccccatgaccgactgatgttcccacggatgctaatgaaactggtgagcctccggaccctgagcagcgtccactcagagcaagtgtttgcactgcgtctgcaggacaaaaagctcccaccgctgctctctgagatctgggatgtgcacgaatgactgttctgtccccatattttctgttttcttggccggatggctgaggcctggtggctgcctcctagaagtggaacagactgagaagggcaaacattcctgggagctgggcaaggagatcctcccgtggcattaaaagagagtcaaagggtaaaaaaaaaaaaaaaaaagatctttaatctggaagagattaattaagcggccgcaagcttattccctttagtaggg

SEQ ID NO: 20590 - DNA, 826 bp, Homo sapiens
gtggcggccgaggtactgatcatggaactctcggggaggaaagatgttttccttctacccatcttatgttcattggctggggctcctggaacagaagacagatttacaaaagagaaaggcacacaaatttatgtaatataagttttacatgacatgggagcctttataaggaaatgacccaaggaaatggttaaacctgagtggttttgtgttaggtttgatgagcaatgaaaagctatggagaactatgataggaggagtgtgagctaaacgcaatgaactgggggaaacttagcaaggtctgttcagatttctctctgtatccttctttggaggtcagcatgtttcctccccccgtagatacggagggcacttctcacatgagggtcttaccacctgctttgggtgagggtcagaaagtccttcctaggtttcgtgacctgcctcaggagagaagggttggggaaggtcagagagatgttcctgcacaagctgcttctcaaattctttcagcttcaaatattcagtgtgcccaggtgccacattttggggtagcatgtcctgaaccttgtcaaaactatatggatgttttaatatagttttaaaataaaatgaagtcaaaagttggggggaagtagtctctaaaaattgaaagcagccgagcactgtgactcacagctgtaaccccagcatttcgtgaggccaaggtgggaggatcgcttgaagccaagagttcgataccagccttggaaacagccagaccccatctctacaaaaaaagaaaaaaaaaccctgaaagcaaaaaaaaaaaaaaaaaaaaaaaagt

SEQ ID NO: 20591 - DNA, 881 bp, Homo sapiens
  misc_feature 1, 2, 3, 4, 5, 6, 7, 8, 9, 10, 11, 12, 13, 14, 15, 16, 17,18, 19, 20, 21, 22, 23, 24, 25, 881: n = A,T,C or G
nnnnnnnnnnnnnnnnnnnnnnnnngggtttttagtagagacagggtttcaccatgttggtcaggctggtcttgacctcctgacctcatgatccaccggcttcggcctcctgaagtgctaggattacaggtgtgagccactgcgcccagccctgagaaatagttcttctaattgtcatccagttttcatctgagtcctgttgttctttggatatgtgcccttccagagcacagcaggggttgttcaagtcttccagaaaagcagctcttgtttctcctcatgtggtgggagtggagtcagagcgtggctcaggccccacattctcagctgtttggatctggggactcgaagtttctggtggttacttctgaaagtcttttccaggataattattcttgctcggtttctctgccatctctgacaggctgttttccctgcttcccccgctgccctgaaggggccagaggaacagggcaggaccccagggctgcggatgggttaggcagctctgttcccgaatccaaagcagttcttggtgactgtcctccaagacttgccctggaccctgctccgggtgggattctgagaccgcctgctccacgtggcagatgaaatctaggtctcttctgtgagaggctggcggggaggatgttttcctggaaaggaccgcaggacagaccgctgatgaaatttctcttgtgacctccctggaggaagagcacttctgatttctgcaaactttttccattcccccgatctcacaaatggggaaactgaggctaagcgactgagttcagggccatctgaatctcagggatggacagtcaggatggacaacctataggcctttcctcctctgagaatctctctgctccccgcgn

SEQ ID NO: 20592 - DNA, 1586 bp, Homo sapiens
cggaagtcttctagaattaattaacgcgggggtcctgggcgtacgtcaagatggcggcgtctgtattaaacaccgtgctgaggcggcttcctatgctatctctcttccgaggttctcacagagttcaggttcccctccagactctttgcaccaaagctccctctgaggaagattctttgtcctcagttcccatttctccttataaggatgagccctggaaatatctggaatcagaagaataccaggagcgatatggttctcgccccgtctgggctgactaccgccgcaaccacaagggtggtgtacccccacagcggactcggaagacatgtattcgtcggaataaagttgttgggaatccctgccccatctgtcgagatcacaagttgcatgttgactttaggaacgtgaagctcttggagcaatttgtctgcgcccacacgggtatcatcttctatgctccatacacaggagtctgtgtgaagcagcacaagcggttgacccaggccatccagaaagccagggatcatggtctcctcatttaccacatcccccaggttgaaccacgggaccttgacttcagtacctctcatggggctgtgagtgctactccgccagcccccaccctggtctcaggtgacccctggtacccatggtacaactggaaacagccaccggagagagaactgtctcgccttcgccggctttaccagggtcatctccaagaagagagtggccccccacctgagtcaatgcccaagatgccccctagaacaccagcggaagcctcctccactgggcagacaggccctcagagtgctctgtaggagctgtagactgggaagagaggccaggcgtggtggctcactcctgtaatcccagcactttgggaagccaaggtgggctgatcacttgatcccaggagtttgagaccagcctgggcaccatggtgaaacctcgtctttaccaaaaaatacaaaaattagctgggtgtggtggtgcacacctgtagtctcaactattggggaggctaaggtaggatcacttgatcccaggaggcggaggttgcagtgagttgcagtcacacccctgcactccagcctgggtgacagctagaccctgtctcaaaaaaaaaaaaaaagactgggaagagagctagagggactaggagataatgtgtatgtaggtttatgtgatgggatatcaccctgaagagttgtgtcttttgtggccagtgacaaatccaggaaatgaatgttgctgatagggataaatcttgaggctgagggcgggtggtacagatgtgtatgggaaaccccaacccctatatattgtaaatagatgggctgggctaaacattgttgccgtttcatacttctaccaactcagcttttacacaataaagctctactgtctctggttaaaaaaaaaaaaaaaactcgagactagttctctcctcgtgcccgatcgatatcaagcttatcgataccgtcgacctcgagggggggcccggtacccaattcgccctaatagggagtcgtattacaaatcaacttgcccgtcgtttacaaccgtcgggacttgga

SEQ ID NO: 20593 - DNA, 582 bp, Homo sapiens
  misc_feature 581, 582: n = A,T,C or G
attggagctcaccgcggtggcggccgaggtacccatgtcaatggagtaatgctcccaggagagttatggctgctctgctatgtcatgcaggttgttagggaagtaggggaaagctagaagttacaggccttacccagctcccatgcaacccaaaaggccagtctcactcccaccgtgccccaccctgacagcaccaagtttgtttccaggcagtgagtgagcagggctgagaacttgtcccaggctaccagcctgccagctgagaaagaaagcatggcttttgcatctttttgcctgttgagtctgcgcactggatttatgccctccctcgagttttggccgggagacttcacgtttggttcaaggtggttacaaagtttagctggaggtttccttttccctttggtctttccccagttcctctggcagtcctcccacaggactcctgtgagacaagtcagatctggcttccccagggacccagatggctcacagggcttttcctactgtttcctctacccctgtatttcgctcagctctctaaattgtctcagatccagttaaggtcatatccttctccnn

SEQ ID NO: 20594 - DNA, 570 bp, Homo sapiens
  misc_feature 1: n = A,T,C or G
ncctcatctttctttgataatgggtgaagccaaggataggcaggaaccccaagttccctctctcctgggattgtcacaaaattccccctctccccatcgcatctattttttgtttgttttcttttcttcccaaagagggaaaaataccatgggctttagaggaatcatcgctcactgtgggaaccttgccccctccccaagccaccccactgtgcccataaacgtgctgcctgtaaccaattgttcctgttgaataacaatgcgagctgaggggctttttctgcctgagctgcaaatagattaggctgctcccttttatgtgtgcaaagacattacccagaagcccccaggatgccattatcagccgccaacagatggagcctatctgcgcgctgtcaatcatcccccacctgtggatcgcgcagcccagccaaaaaattaattgcttagaaatataaaatcggtggactcagatcggaaaggattaggagaaaaaaggttaagcgaggggaagaagccgtgctgtgccagagaaccttatcaacgtcggcctatctaagagtctgacgt

SEQ ID NO: 20595 - DNA, 408 bp, Homo sapiens
  misc_feature 401, 402, 403, 404, 405, 406, 407, 408: n = A,T,C or G
acctcagaatgtaactgtatgtggaggtctttaaagcaatgattaagttaaaataaggctattagagtggggccctaactctaaatgactggatttatatgaaggagctagaagaaggacagacacaccagggtcctgtgtgcacagagggacaaccatgtgaagaggcagcaagaggccaactgcaagccgaagagagaggtctcaggggagaccaaccctgccagcactttgatctcaggcttccagcccccagaccagtgataaaataaatttctgctgtttaagccaccctgtctgtggcattttgttctagcggccctagcaaactaatacactcatatatgttgaaaaacttctgtatggggctttcagagctaaaagacagctgggttgcatannnnnnnn

SEQ ID NO: 20596 - DNA, 3556 bp, Homo sapiens
  misc_feature 3554, 3555, 3556: n = A,T,C or G
cttctggagtcgacccacgcgtccgggggtagctgatgtttgcacccgaggaggctttgctaagaaacatccccttagtcataccacacccaagtataattgatctaggagtttatctaaaatagtagctcctaagagacttggaaagtgtgctaatttcttcgaaatttctttagaataattcacattcttccccatatcgcttatggagccgtcctaactgctgaccttttcaagatggcggtccgcgggcgacactctcgggctcgcgcacctcccaagatggcggcgcccgaggcctggcgcgcccggagttgctggttctgtgaggtagcggcggcaacgaccatggaggccacgtcccgggaggcggcgccagcgaagagctcggcctcgggccccaacgctccccccgccctgttcgagctgtgcgggcgggcggtgagcgcccatatgggggttctggagagcggggtgtgggccctcccaggcccaatacttcaaagcatcctacctctgctcaatatatattacttggagaggattgaggaaactgccctcaagaaaggcctctcaactcaggccatctggcgccgactctgggatgaactgatgaagacaaggccttccagtttggaaagtgtgacatgttggcgagccaagtttatggaggcctttttttcccatgttctacgtgggaccattgatgtgtcttctgacaggcgtctttgtgatcagcggttctcacctcttctgcacagctcccgccatgtccgacagctcaccatctgtaacatgctgcagggtgcaaccgagctggtggctgagcccaaccgcagggttctggagaccctggccagctccctgcacactctcaagttccgccacctgctgttctctgatgtggctgctcagcagtcacttcggcagctgttgcatcagctcattcaccatggggctgtcagtcaagtgtcgctatactcctggcctgtgcctgagtcagcccttttcatccttattctcaccatgagtgctggcttctggcaaccagggcctggtggcccaccctgccgcctctgtggagaggcctcccgaggccgggccccatcccgagatgaagggtccctcttattgggctcacgtcggccccgccgggatgctgctgagcgatgtgctgcagccctgatggccagccggcgtaagagtgaagccaagcagatgcccagagctgcacctgccactcgggtaacacgccggagcacacaggagagcctgacagcaggcggaacagaccttaagagggagctgcaccccccagccacctcccatgaggctcctggcaccaagcggtcaccttctgctccagcagccacctcctctgcctcttcttctacatcctcatacaaacgggcaccagctagctcagccccacagcctaagcccctaaagcgtttcaagcgagctgcagggaagaagggtgctcgcacccgtcaggggcctggtgcagagtctgaagacctgtatgacttcgtttttattgtggctggcgagaaggaggatggcgaagagatggagattggggaagtggcttgtggagctttggatggatcagatcccagctgcctggggcttccagcactggaagcttcacaaagattccgcagcatctccaccttggagctattcacagttccactctccacagaggcagccctgacactatgccacctgctgagctcctgggtgtcactggagagcctcacactctcctacaatggcctgggctctaacatcttccgcctgctagacagcctgcgggccctgtcaggccaggctggatgtcgcctccgtgccctgcatctcagtgacctgttctcaccactgcccatcctggagctgacacgtgctatcgtgcgagcactgcccctgctacgggtcctctctattcgtgttgaccacccaagccagcgggacaaccctggtgtgccagggaatgcagggccccctagccacataataggcgatgaggagataccagaaaactgcctggagcagttggagatgggatttccacggggagcccagccagccccactgctgtgctccgttctgaaggcctcgggttctctgcagcagctgtccctggatagtgccacctttgcctctccccaggattttgggcttgttttgcaaacactcaaagagtacaacctagccctgaaaagactgagcttccatgacatgaatctcgctgactgtcagagcgaggtgctctttttgctacagaatctgactctgcaagagattaccttctccttctgccgtctgtttgagaagcgcccagcccaatttctgcctgagatggttgctgctatgaagggcaactccacactgaagggcctccggctgccagggaaccgcctggggaatgctggcctgctggccttggcagatgttttctcagaggattcatcctcctctctctgtcagctggacatcagttccaactgcatcaagccagatgggcttctggagttcgccaagcggctggagcgctggggccgtggagcctttggtcacctgcgcctcttccaaaactggctggaccaggatgcagtcacagccagggaagccatccggcggctccgggctacctgccatgtggttagcgactcatgggactcatcccaggccttcgcagattatgttagcaccatgtgatggggcccgtacctcacagtctcatgctcggtaccatcagcttgcaggggctgaagcatgggctgcccagaaccccaaccaccagttctatctttctctttctgtcaccttttttctcttttttccttcttcccttgcactgaggtcctggaggccttgatgaggcccagcaaacaggcattctcacagctgggtttatagtctttgggccccttactcagtatcctgggaaccctgggccaggaggttacagtggtcatcataattgctgaagagatcccctcccctgcccctgggttcctgccttccctcctcaagcaggcacccaggctttagagaagtatagggggcttcttccctgctgggcttaccacactgctctcaggcctcaaaccctttcatacctttattcttttttttaaccaaaaaagtttttcttataaaataaattttgggcaaacatcaaaaaaaaaaccacaacaccaccaccaacacaactccccaccacacccaaaaaattggcgggcgccggcagccacgagaagactaaacaccaaggtaggtgaggcccggagacccagaaagataaaacacaagggccaacagggcccaaaacaaacgtcgcatcgaacgagggatggtctacccaaaaaacggcgggaacgaggtgctgccaaccaagggatcgggcctctaggtacaacgggccaggccttaacaccgcgcagcaggaggggaagacaccaccacccacacgcggcactcagactagcgaatagcacagacgacacagcgatcaacatcacccagtgcaagtagagcaagactccgcnnn

SEQ ID NO: 20597 - DNA, 316 bp, Homo sapiens
  misc_feature 294, 295, 296, 297, 298, 299, 300, 301, 302, 303, 304, 305,306, 307, 308, 309, 310, 311, 312, 313, 314, 315, 316: n = A,T,C or G
acgcgggcatcccttcaaccaatagcataccttgagatgcagtcgatttcatacctcctgggtcccaatcctcaatctgggcagttgtgaagccggatagtgactgagatcactgggtagaccttgtccaccttggcattcttgtctgccaaggtccatggcccatggggatggggacaatttgagtgggaccctgcccaattggcttattccccagagccaggagcatcttactgcttaagaggtcacaaaggtttttcagacctgatgaaaatgataaacgcttttcccccnnnnnnnnnnnnnnnnnnnnnnn

SEQ ID NO: 20598 - DNA, 299 bp, Homo sapiens
aggtacgcggggatgcgcagtcgtgagtcctcttgtccttgagcgtcaaccttctttccctgaagtggctggggttcctgtttccttctttgattgacaacttgtgttaaccctcgcacatctctgggccaatttttgcttgaaaatggcagctcccgagcagccgcttgcgatatcaaggggatgcacgagctcctcctcgctttccccgcctcggggcgaccgaacccttctggtcaggcacctgccggctgagcttactgctgaggagaaagaggacttgccgaagtacctgcccg

SEQ ID NO: 20599 - DNA, 594 bp, Homo sapiens
  misc_feature 1: n = A,T,C or G
nctacaccccggcggcggccgcccgggttggtaccctctgtcacggcttccctttgctggaaaagggaatttcccaaccccgggtgaggcaatgccccgccctgctccgtgggctgcacctgctgtctgtcaagccccaatgagatgaaccctgtacgcgggggcctgggatctcaaaatggcggccccgtgcggaaacagcgtctgggagcagtcatgttgcctcctgaacaaagccgctgaagatgaagaatgggcaaaatcgccccatacggaacagcgcagcctcgggagcccgttacctggctcgcgaacacgaagcgggagagttcgccaatatggatgtgacagcggttcccattaagcggtgataggatttttgggacctgataatcaagctaggggtcagcaggggggtttatgggttgagtctgggattggtattggggcagggttccttggggttcagtgacgaggtctatgagttcagtgatggttagtgatgagtgttgggaacatgtgggggtcattagcagggaggcctgtgtgatctgtgggtcagggatggagtgtctgcgccaagtgatggggtgt

SEQ ID NO: 20600 - DNA, 2644 bp, Homo sapiens
  misc_feature 1, 2643, 2644: n = A,T,C or G
nagacagagttttgctcttgttgcccaggctggagtgcaatgacacaatctcagctcactgcaaccaccacctcccaggttcaagtgattctcctgccttggcctcctgcgtagctgggattacaggcatgagccaccgtgcctggcctttttcttttttaaacagggtcttgctctgtcacccagactagaggtgcagtggcacagtcatggctcactgcagcctcaatctcctgggctcaagtggtcctcaagggcctccagagtagcccaccaccatgcctggctttttttttttttttttttttgtaagtagagacacatttcactgtgttggccaggctggtgtcgaactcctgggctcaagccattgcccacctcaaagtgctgggattacaagtgtgagccaccacacccaaccaggttatttgaacatttttaagtactgtattttctctattgtaatattgactgtcatctctgtgcaggttttttagtggttgctctaggttgaaacgctttgaattcttaggtatctaagagtgagcattttctttttttgactgctatactctcaccagttgccagcttctcatataaatattgtaaatgctctcgtttaggtaactcagcttctggagttgagggaacttcaaaatcagaagagctctgggaatctgcatttgtgctaagatttagcaaacttttttcctcgggtatatgtgtctcactgcttagagtagttggttctccagtactaggaactattgtcacatctttatctctgcttttcaaatcagagtaagtatcctttgggcaaattacattttgttccatgagagaggcaggaatattctctttgattgttggtctgtagtcagctttgtccaaggaagtaatatccccactgtttctctcttgggaagataacaaaacagtatcagattggctgtcccagccttgacttccttgttctgttatgtgtgttgactgggaagaattctgggaggagatgtgagttgattctccatcagagtcactgaaaagctttggtgactgagatccccctgccactgtggaggaagggaagttttccaaactctcatctgtgatttcatcatttcttttaaagaatacttcccactggggtacatccccatcagccttttgcaggtgaagtacagagcccagatctccttgcagtgaagctgggattcctacttcttcttcactttcactgttggattcttcacaatctacaaagtttgtgaaacgagagctctgcatacactctgctctgcagcatcctggggtttgtctcagtttttcaggctgcttttctgatactgcagtcattgaaaatacctcagggtgaaaagtttccgggtatggaactttgtgccttaaaggtattggcagaggatcatcaaagagatagtcatcttcctcctctgagtctcggtgaactgttctagctctcttcagttttcccagtggtttatactttggctccgtactttgggaagaccggcataaaggctttaagatttcgacaactttatccatagttgtgccaactggaatgacatttggatatgcgttcacaggacagaggtagctcaagaaatctttaatctcactgtaggaggagtgaaaagaaaaacaagctctgtatgaactctctccagtcctcacaattacatttgtttttctgctcctttctccaaaccacatggtggatggcttaatgctgattatgtggagtggaattctatttctggaagtaattccacagggtaatttgctccactgaaaattattcctctgccttgggatgccggcatgcatggatctgagtgttgcggtcttgtttgtgagatgatgaaggatctcaggcatgttccttaaacatgtcttagcttattcaacattgaacctggacccctaattcttcacttaaggttggtgaacagatattcatagccataagccgctttgcagttcagccacacaacatggtacgggctccgagtgatccagcttcggaccagctctaagactccacttaaacactcctcccgacttggaatttggtaaaatcttcgatcacagaacgtagtatccaaatatacactttggatgtctttgactctgcccccggagtgcagaagctccattctagcagcttctccttgcgccaatctgaagtctcctgtgtacaggacagttccattattgccctgaaataaaaacctctcctgatgcttcatccactaaagatatctgggtaggagtctcgatttcaatagatataattcgtttcttccaaaatctgtatttcgggctcgttaacaacaactccttagtcacaggtgaacagtatagataaaccttcaagctgcactccaaccttcttttcaaggtaggggctcttaatcctttcatgtgatctttgtggcagtgggacaggaagtaggcgcgggccctcaggttctccctatcgaagcggtctatggagatagttggatactcggccatctgcccctcgaaagaactcatagcgccgccgatcccagagtccgggaccccaaaaccgcagctgaagccaaggccagccctgaccgcgccgccacttccgggaann

SEQ ID NO: 20601 - DNA, 331 bp, Homo sapiens
  misc_feature 1, 331: n = A,T,C or G
nctattttggaggctgaggtgggatgattgcttgagtctgggaggcagaagttgcagtaagccgagatcatgccactgcacaagctaggtgacagaatgagactctgtctcaaaaataattaaaaagcctctgccccaaactcgttaaaagattttataaccacaactgctgtttctgtgtagatgcatctgcatgcccaggagcagtaaatgcaataaaatcatttggttatactttgaacacaaaataaacggttgaggcttttactttcgaaaaaaaaaaaaaaaaaaaggttccttggccgctctaaactagtggatcccccgggcn

SEQ ID NO: 20602 - DNA, 1298 bp, Homo sapiens
  misc_feature 1, 1295, 1296, 1297, 1298: n = A,T,C or G
naggcgcacccggttccttccccgctctcctcctgccgttcggtcgttcttctctccctcttttctctttcctggtgtaatcgtcgtcgtttcgcttcctgcctctctggtccctccgtgttgcattaacttcgttcagccactcgcctactgcctttctctccttaccaatcgggttccctgagtccacttaccgctgttcttcaagtctccgtgtggttgttgccccgtttcatcacttgccatgacaccgacatttgtaccttgcgtcagatctcctcagtgtctttgcggtaatgggacttgatagagcagagggatcgggcactgaaggtgcagttctcaaaatcacacctgtaggctggctcctcgctgtgggtatccaggtgcttctggaggtcaataagattcttgcagctgtagtcacaacagtcacatttaaagggccggtcctcactgtgacgaaagcgcatgtggttgcggagggaggaaggcagcgggcaggtcatgtcacacagagggcacttatagtgattcacatggttgcgcatgtggtcccgcaatagccgctctgtggcaaatctcttggaacagtgagaacactggaagtgctgctgatccaatgaggtctggcgacggatgtgatctaagaacttggtattgttggcaaacatgcccccacaggtggggcaggctaccactttctcctgggtatggctgcggaggtgctctcgaagtttactgcggtccttgaaggtgcaggtacagcctttccagccacacagcaccaccgggttgtccttgccgactgtcttcgtattcacagcacagactgtgtgcttccacatgccgataaaaccactcaggattgtcgaaggaattctcaccagtgctcccacagacacaggaagtggtcagggatatcagggatgacgttccggctctgcaagtccaggatgcaggggccaaggtcagcctggctttgcaaggcctgcagcccccactgtttcagcttggtgtggtagcagtggaagtagacatggcggatgaggtcagcagaactgtccagagaacaaaagccccactcctgccacaagcaggagaattcttcctactgtagccacagattctcctttcggggaactttcccaggaggcggcatggccttcacccgtctgtcggctccaggtctcttcagctcttctcccacctcagaccatctccggagaggcgcttgagggacggtcaaggaaagccaatcgtcgttctcggatccgcggacgcgtgggtcgacnnnn

SEQ ID NO: 20603 - DNA, 561 bp, Homo sapiens
  misc_feature 1, 2, 3, 4, 5, 6, 7, 8, 9, 10, 11, 12, 13, 14, 15, 16, 17,18, 19, 20, 21, 22, 23, 24, 25, 26, 27, 28, 29, 30, 31: n = A,T,C or G
nnnnnnnnnnnnnnnnnnnnnnnnnnnnnnnccggaggtaatacaagatttatttagcaaaaatacatatagccattattgcaagacttaaatgagatgttaaatgttcaacccaattttctttcctggataagtttttctttcatatccctgtcagttttgaaaacataataccagaagaaggggggcccaattccacagagagctcccaagaatgagtttctgggagtgagtctgaagttgagataaacctttgctgatcttgcttacgttcaatgcatctgggcagcgtctttgatgagccctggcggttaggctggtggcactgaagcaggcctccagggtctcctgtttaagcaggattttaaggccaaccctgcggcttgcgcctgctgggtttctggagatgtgtcatattcggctgggttgagggtccagggcagagtggccaggcatgagagaaaatactttgggtcaacaccggccccctccttcctcctgcggagtctcctgtccaggatcccttttccccagtcctgccgtctttctttgcccccgcgt

SEQ ID NO: 20604 - DNA, 775 bp, Homo sapiens
acagctcttctcttgtctttctgagctcttaccagaattgccttccgtgtctttttttttggagatggagtctcactctgtcacccaggctggagtgcagtggcgcaatctcagctcactgcaacctctgcctccctggttcaagcgattctcctgcctcagcctcccgaggggctgggactacgggtgcacgccaccatgcctggctaattttttgtattttagtagcgacagggtttcactgtgttgcccaggctggccttgaactcctgagctcgggcaatctgcccgcctcattctcccaacatgctaggattataggcatgagccaccacgccctgcggtgtccatatttctaacagcagtcacttcagagccatctaggtttcttctaacatgcacctcaaaactctctggcctctactacctagttctgaaaccatttctacattttaaggtatttgtcacagtagcactatacttatcaataccaaaatctgtattaggaaggaagaaaagaagagaaactaagacagaaagctttttaaaacaatagtatacctcactttggctaccactcagtagtatttttccttcccctgatcagaatttatttaatgagtggtctaaggccggggcacagtggctcacacctgtaatttcagcacttagagaggctgacacaggaggattgcttgaggctaggagtttgagaccagactgggcaacatagcaagattctgtctctaccaaaaaaaaaaaaaaaaaaaaaagt

SEQ ID NO: 20605 - DNA, 1631 bp, Homo sapiens
ccacgcgtccgtttttttttttttttacacaatataaatgctttattgctagcacagaggtttctttttaagtaaattaaaagaaataaatcttcattttcacattttttgttgcagtccaaaggtaactagttggttagtggctatgtccacttggacacatgctacaggagggcagcattcacatggaagcactcagaaatacggcatctgtcagggctcacggcactgggctgctgaatgcactgtcgtttgtaaataacagcaagtggagactttaaaacatcatggatagataagagttataaatagaaaactggtacggttaagaagcagaagggcaagatggcagaagtagagcagaagaagaagcggaccttccgcaagttcacctaccgcggcgtggacctcgaccagctgctggacatgtcctacgagcagctgatgcagctgtacagtgcgcgccagcggcggcggctgaaccggggcctgcggcggaagcagcactccctgctgaagcgcctgcgcaaggccaagaaggaggcgccgcccatggagaagccggaagtggtgaagacgcacctgcgggacatgatcatcctacccgagatggtgggcagcatggtgggcgtctacaacggcaagaccttcaaccaggtggagatcaagcccgagatgatcggccactacctgggcgagttctccatcacctacaagcccgtaaagcatggccggcccggcatcggggccacccactcctcccgcttcatccctctcaagtaatggctcagctaataaaggcgcacatgactccagtcctttgcgcagcttgttcttcctggcgtcccgagctctgggaggggcctgggcctgcttcaggttcgtggtgtgaggaggttcaggttggacgttcgggggtgtgtggtagtgttgtgtggatggtctcttggtgtcgaagactgacagctgtgcgggccctgccccaactcggctgcccctgctcctgtctgcagggacagctgtggagctgggtgcccaagcccaggtgtgtagctccgtcccttttggccccctcagcgttcttgacctcggggcagctgcctggcctcactctgtcttctgggtacctgacgaagagggggccactcctgggctaagtgcagcccctcaagccctcacctggcctgggctctcctttctggcttccctcatctcctgtggagggttcccgcaggaagtgaagcagcagcaggaacctttgggccacctgagcccctcccttctatcctcacccctgcttggcttcttagaagctcctgactctcctcctgacaccacgctgctggcatctcctctcccagcaggctccatggctgcagccagccccatccgcccagcctggggctttgtgtccgggacagagccgtgtcccgtggttaggctgcaccatccgtggcctggccagctctgtctcctttgcacagaatgcttgaaagaacaggacaaagtggctgtgcctgtgggtggggggcaccgtccagccctccatgggctctctgatggccgtacgtgggttggagaacatggtgagaactaaccccgttcaatgctggagtcacctcagcccagaa

SEQ ID NO: 20606 - DNA, 498 bp, Homo sapiens
  misc_feature 498: n = A,T,C or G
acaaatagagctggaatgatgatgatcacaatgaagatgacaacagtggtggcaatgacacggctgccacttacttggagtggcctcggagtttaatatcaaaggctggcctgggtttgagctggttgagggagaagtgagtgtattgcatacatgagaaaacctgagcaaaggaaagatgagactcaaatggcagcactaagaccattttgcactggagtatcagatatattttgaaaagaagactgtagagtgactttttgaaagacatgggggattagcaggtaaagagaagcttgaagtggtatttagagatgctacatttagtgacttcagaaggtataaactgaagcagcaatgtagattaatattcaagatatggggataaaagggtgactaaagtgggatccaaagcaaatgggtgccagaaaaacaatggaaagaagaactgatggaagctatgatctaatttacatttaagggaatgaggaaaacagn

SEQ ID NO: 20607 - DNA, 1520 bp, Homo sapiens
  misc_feature 1, 2, 3, 1520: n = A,T,C or G
nnnacctgctctcctctcgtatctcctctgtgttatgggcgcgggctgcgccatcgtgggcagccagcgctgcccagaggtgtgactgctggtcgcccacgtgggtgtctaagcgtggagagcgggcccagtggtggtggtggaagaacgatgggcgtccagcgcgtacggcttttcggctgatggcacttcaaaccagggctggcaggaaggtataagttcacccaccagggggaaaacaggttcagacgtgccagccagggacataccaggatgtagcgtgagccaatcacaattattctggtaaatcttttaacccccattccaagggacaatagcacttggtgtcaaagccactttcgggtcacacattcaatccagggttgctagtcagtatctcaggagctcagaatttaaaactcctttcagtcaacgaaggagtaagttcaattaaaggcttccactgtctgccaaatttctagaattctgtctagagtgctagcatgcttgatgagagaaagcagttcagagcccaaagaggtgtcaggtattaggtaagttaatttggttttgtataaaaggcatggtaatctggcaacagagtacttatcctattagcagcacagtggtagccaagggtctctgtctgcaagacaggaaaatgaagctactgaagcccctgttgctcccacctgcctgcaggatggctactgattttacaaaggccttctgggagccaatccagggctcacctgggagagtgggtaacagaatggcaggaaccatgttcagcccccatgagaagtgcccgactgagggaagtcagcttcccataggtgagggggctgttgccattatgggctcagaatctaaatcttactgatccctagtagtaagacaattgccaagaaattgtcctagcaggtactacccaagtgttacaggctctgcataggtcctcaaacactttaaaggacacgaaccatcaaattcaaaagagtagtgtttgttctatcagttctgaatgtccacagggagaggcaactagatttatgtggaaaaagtgctgtttgaaggagctgtgttttatttcgaagtgaaatgactttgggaaccagaacatttctgcagatgtctgaatatcaagaacctatctctaaaaggcatttatcaggaaatgttcgctcactccaagtgctttttaaaaattcaacatatggcaatgttttaatttttgtgctttcaagaggtaactaaatcgataggaagctgagggaagatcattccattatggactttcttgtttgggtgcaagacactatccacagcattgaaatctataatctcataaaagattcttataaacatataccatatttctcctataagaaaaactgagaactgtaccatgaaggcaaaatttgtttgcctactctcagaattccttggaatggcaatgtaccaggagggtgagtgaactgttggtgaaaattccgggtttgacacgaacgcgtgggtcn

SEQ ID NO: 20608 - DNA, 304 bp, Homo sapiens
acaaatttattaagctctaggttcatcagatgaccaggaaaacatagactatcaggacacagacaaagcagaactgcagaattatagaaaattcaaggtctcatggaggaaaagcagtatctacaataagaaagagaccccaaacagcactctagatttctttaagagggattatatttcctccttcctcccattctcccttcatttcttcctacctccctcttttcatcctcttctccttttatcttttcatcattcctttcttaagcattttacttagttactactatgttctaagcactgg

SEQ ID NO: 20609 - DNA, 512 bp, Homo sapiens
  misc_feature 512: n = A,T,C or G
acaaataaagtcttccaagggttcagaatagaaaatgatctcttccagcttggggacatttgggaaattgggatatcctttggggaaatgtagtaatcagtatattctgggaaaacatagtagagaatgaataaataaattccattgaatttggaatatgttgtccattctccctgtaactaatgctatcaagataaagtagaaataccacatttcagaaacagctggagtagacaggtcttcataggctagcttggaaacctaatagctattaataatgaaattgtaattatactctggattctaaacaatgaacacacagtgatctttttgacttgctgcttgtttataagttggggatggtctgaattcattgttgattcaaaagaaaacgaatagtgttttaaaccttttatttacaaagactataatttgtcaccttgctaccaacatatcttagatacaccaagaccttttacagaagcttaaacaagggtgtacctgcccgggcn

SEQ ID NO: 20610 - DNA, 499 bp, Homo sapiens
  misc_feature 498, 499: n = A,T,C or G
accacctgactcagctgggtgcatttgaccagttttgcccccatctgtaaatatccctcagtccccatggagctgtagaggtgagtgatgaagcagtgacagctctgggtaggaactcagcttaatttcaagttccagaccctctccatcctcaggttcttcttctgtaaaatgaagatccctttgcggtgaaacgttttgcagctctggaatctgagggtgtaggaggagctacagaagaggggtataggactcacctgaataaaggtggcatctgtgattactgtgggcgagggtgagagggaagaggatactgacgctaagccttgccttcttagtccaaattttggttgtgcattaaatatgtcttaattttttttataacttaacctcaccccaaatttgagcttctgtttcactaaatcacaatcacttctggggtcttccattcacctttgctagggtaatatctgagagctgttagattcatgtggcacnn

SEQ ID NO: 20611 - DNA, 695 bp, Homo sapiens
  misc_feature 589, 622, 654, 694, 695: n = A,T,C or G
acagaaggctaagtatcgctaatttctattcagagacacagggactctacccttgttcctggctttataaagctgctcagttctaatgtgcactgcacacaacagctgccagggccacaaacacccccaagcagacgttaggctctcaacccctaagatacagttttcctctcaatagctcataagactctgccctctgacgtgagaaaatagaattctgttgtgctttttaagtatgcctatggcatcttttaaaatataccatatatgatccagtatttctttgtgtttggagtgtgaatctgcaggtgaaagagtgtgttctacacgtgcccgatccatcctcattacacaaattcaccctctactttaaaacagggaatttgggcctttgacaggaaacaagccggacagtcatggggccaagctggaatcaaatgtaaatatttaatttcctcctgttaaaagcagagtggacccacagtccctcccaaagtaaaatgcacaataatgtgtcaagagccctggactttttgcttctcggacgttagcaaagatcaagcgcagaccactggctttggggtctganaccccaggagagtcccggtttcgtgctcatgtnttatgtgacccttgacccctcgttcaattctnacgtgcttcactctcctaagccatgcaaaagggacataann

SEQ ID NO: 20612 - DNA, 2990 bp, Homo sapiens
  misc_feature 1, 2, 3, 4, 5, 2986, 2987, 2988, 2989, 2990: n = A,T,C or G
nnnnngccaagggaattaatttgggaaacgccaggtttttcccagtcccgacgttgtaaaacgccggccagtgaattgtaaaacgactcactatagggcgaattgggtcccgcaccccccctcttgtccttgttttttcccttgacagtactttattaattttcatccatattttacttgactaaaaatacaatgtatgaaaatttatctttaatagcattttccataagctactataacaatttattgatacatctgggattcagccaggtcttatagtatttaaatttataacccctgccatgcttagcattaagtaaatcagtatgcaagcagtatttaaggcaaagctttaagaatactttaaatttcatttgtaaatacatagatgcaagactgtttccataggaagtcacaaatcctcaaacagaaatatgtgtgttctcaatgttaccctgatacagaaatcaaacttggaagaaatatttttacattagaaaaaggactcagtataaggtgaaaacaaaattcccagtgggctagacatgaacaaaagtattcattccccaaaaggcacatttctttataacagttttttcaaatctacctccctatttaatgaaagcatattcattaaatatgaaactatgcatacattaaaaaccaggatttgtttttaatgtgctttagcagcagtagattctaaaactgtgtcttcttgtcctctcattagtttgaataatcacactccctagagatcagagcattgagtctgaaatgtcaaaatgctagagaaaagagggagtaatttttaactacccagaaagaagatgcacaaatacatcttttcctacgtaggtcacggcatatgttggcttttataatttgggatttctcctaattgatgacccaccctattgggcagtgaggcatagcaaagtgttcctcagttatcacaggaaacttcaataaaatcttacatattgctatgggtattcacaaagaggaaaatgaagttgacttagaggataagactgattaaaagacactacaatgcatattagactgaattgaagaagagaatggatttgtcttatttttcaaaatttgttttcactttgcacataaacccttcaaaatgtagataacaaatgaaaaataaagtggaacccactcaataaggtgagattctgtaagcagagatgaagcttgatgttcttaatgaatagtgtcagtgtagaaagaacatgagtggtaataaaaaattacagcttacaaaagggcctagaaaaatgaggcaggccagacgagtggaaatagaacacaacagtttaaagtgctttgagaccctcagttaaacagtacacgtgaatacaaaataatgttaaggccattcatggagaagaaatacttaagcaagacatacctggcttgcttcatagagaagaggtaagagatggattttcaattcggcgtgcagcagcagggaatatggctacaacaacgctggctagtattagggcaacacacctcaaagctaactcaccataaacctaacatcttgattcacatctgcttggagtgaaaaagtttatgatcagtcttttcaggaaggtttattttatgggggatttttttgtgctttagtaccccaaaatcacatatgttcgcatacatcatatacacacacattgcatacacatttccccttgactgattcgcatctttgtagataaacactaaattttgataaagattatttacacttatttaggctattactccaatttaaaaatcagtgaaagttttcaatgtttagtctcctaatatataatgcttaaatttgcaacaggaacaatacattatcaaaagcattaacctgtatttagctttcaaatatacctgtctatattaggcagtgatatcttaagaaatcattttctcccttatattttctaaagtgctttaaaaactcatttaatctacacatttttcagaggtaggtcggaattatcctcttgttgcaaatgaggaaacaggcacagtgagcattggtgacttgtttcaggttacacaaaaaaatccatgatgaaagcagggtaaaagttcagatttagtggctaacatggcaccacacatacaggtgtgcaaataaattatagagcactgcctgggtagcatttggtgtagaaaacctattttgattattttgtatgaataaagtgctgagactggattaggaatacagaatgggcctccagtggtatctaatccacctccctcccttaggaagggtcagaataatcaagtgaatacagagtccttattaggactaaatcttatgtcaactgactcccccccccgccccccaaccactggcattcatactggcttaccaaaagaatcatgcttaaggttcatttaatataaaaatgtaagacatctgaatcaggtaaaaaaaattataaatctgattgatatatttagagctaagagactccaggaaaaaaaaaatgtgtagagaaaattaaaaacaaatttaattcaaagaatatggtctattaacattttgtctgtaaaatatttcattgtagctgtatttgtgcttagaagatcttctagatttaaaaacagaaaatggcataaatcatattctcatagccacactccttcccttcctctgctcagctaaggagagggctttcttttgagacagggtctcattttgtcgcccaggctggagtgcagtggtacgatcacagctcactgcagcctctatctcctgggctcaagtgatcctcccacctcagcctcccaagtacctgtgactacaggtacacaccacctcacccggctttttcttttttctttttttttttccgagagagacgggaggtcaccatgttgcccaggtggattgtgaaactcctgggtccaggtgacccaccgcacctgtggctcccaaagtaagaggtcttgtgggaannnnn

SEQ ID NO: 20613 - DNA, 477 bp, Homo sapiens
  misc_feature 475, 476, 477: n = A,T,C or G
tctcgaacttttgacctcaggtcatccacccgtctcagcctcccaaagttctgggagtacaggcgtgagccaccatgcccagcctgaatcccccttctcaaaagtaacttccattcactttgtccctggcagtctgctggtgaccatgatttctaaggctcactcatgggaccaaaggcaagaagaaagggaggagggtggtaaccagataaactttgcaacccctttgataggactttttgggtgagaatttttatgaaaagtaatatatacttctactatagatctgcctctagtttcaacctctagttttagcactgattttttccccttaatttccagaagcatgatataatatctttttcaaagaaagtgggaagaatgtccacaggtgttaggagaagacaattatgtaggaaaaatattttctcaaattaaaatttaaaacaaaagtttgcagggaatggagtggggnnn

SEQ ID NO: 20614 - DNA, 966 bp, Homo sapiens
  misc_feature 1, 2, 3, 4, 5, 6, 947, 948, 949, 950, 951, 952, 953, 954,955, 956, 957, 958, 959, 960, 961, 962, 963, 964, 965, 966: n = A,T,C or G
nnnnnngtaaaatctcctatttatccattttttctcttttttactgtttctcttcctgttttcttcttctttgtcaatgctaatcttgaatttataaccgctacaatgcccgtcatactctgcctaagagcccctgttctaccaagccgtgctaccagtgacccaagtcctccaatatatttactccgaaccaataaatttaatagtcctttttatccctatattacacatcgataaaaatgacttaaatgaggaggccagatttattaggatcctctgaaaatataccagttagggataaatgggaacctgaacataagcggcactgaacgtaggggatggagaagggacatggatttgggagttattttataagggagcaaagaatgtactgagtaaaagggaaggaaatgtcaagtcttccagtttctcgtgtgaatgacataccctgggggtgtcatcaaccaaagattagaaatatgggaagatgaaatggtttttaggaaagataatgattttaattttagaactgtcaatctgaggtgaatccttcaaaaagtcaaatgatagttccaagagtgaccatgaatatctgacaaataagagttatctttagcaaggagcagtctcatggaaataataaaagctgaaacaaatagtagtgattgaggagtaaatgagaggtgaagcagtggagataatacaggttctgtttggaggagacttggcataaaggtgaaacaataggatggatgagatagcactcagcaatgaaaatgtaacagaattgatgcaacacaggtgaatctcaacatcatgccagtgaaagaagtatagtccctataatcacctatagtcccaattacctcaggaggctgaggcaggagaactgcctgagaccaggagtttaagaccagtctgggcaacacagcaagaccccattctcnnnnnnnnnnnnnnnnnnnn

SEQ ID NO: 20615 - DNA, 693 bp, Homo sapiens
  misc_feature 678, 679, 680, 681, 682, 683, 684, 685, 686, 687, 688, 689,690, 691, 692, 693: n = A,T,C or G
cgcgtccgctagtctcgaactcctgacctcaggtgatccacttgccttggcctcccaaagtgctgggattacaagcatgagccactgcgcctggcagcaattgaaatttgtgtccataatttagttcagggcaacacctccccgccccatattctttggcagaggtttgaaccccatattctttgacagaggtttgaacctaatgaaagagggaaggaatttagttttgatgttagagacttttttcttaccagggacacttgaatcaatatgttaaaatttgaagagaggagtgagtactctctctagtatcttttctttttggggggcaggtggtgggactgcattgatttaaccattgtgaaatctaggttccattttgaaaaagaagagcatatgtagaccttcatgtactttgcatatacacagtgtacttcgttggtgtctcagtctttaaggattaactaggaagaattttctttctgcatagaaactttataaaataactgacattgttacataattcaggcataatatttacattatactctttcttgaatggctgacgttgcataccaagggtgatcttgtaaactctccatcaatttccttggctcttcacttttagaacctattttcctgacattaacaaccttgggtggtagattactggtatannnnnnnnnnnnnnnn

SEQ ID NO: 20616 - DNA, 1496 bp, Homo sapiens
  misc_feature 1, 1487, 1488, 1489, 1490, 1491, 1492, 1493, 1494, 1495,1496: n = A,T,C or G
nagtgtttgggcttattcccatataaaaaggagaaaggagggttgggggtgggcaagggttgattttgtttcttctagagcttttttcttcttttgtttttgtttgttttgttttgtttgcatgcaaaaggtatttagttatgtcagtaactgagacttacttaaccattttacaactctttccccaaataaagtacttaaaactctccctgcattagtaggtagccagtttgtattgtgtttataggtttttataaagtcagctactaacctggtactatgtagattgtctaactgtatagatagatagcattaacatttgtgagaaatttcaacaaagaggttaaaccaatacgtttggaattgctggataaaagacccagagcagttaatcttacaattggtgttttccccaaagtatagacatgactgcccgtaaatactgctggggagtctaggactaattccagaaataaaaatacttctggtctacaaatgtgactgcgctgtctctgttaacaccaacatatcctaggatttcctgaaacattttcattcatgatctccagacagatttgtgatactgtggtcataactagctacatagttatgcatttctgcaaagggaaagaatgtcagtaactagctacataccattctgttaaattattaatgatatttattaatgtttcatcatgcctatttcgctgttctgggcactttaagattaaacctggtattaagtgcagcatactcaactagatgtagacttcacttcatagaattttaaatctgatggcaactatatgcaatacgcatttatttttgtgtgtgtttgtaggaaaatttgtagatgtaacaagcaaaacaaagatttttctgaatttccaactctaccataacagaatttcaggcattttccaagaaatggcatgatagcagctgggttgcatgttgtacttagaacactgttgatggagtatatctgttgtgagcctggtttctgtgtatgtgtccaattcagtgataggagaagaaagcctgtaattacatttgcataaagtggttggctgctaaagagatgtaattccattattccaaacttttaattcatattttaaaatataaaaactagtatatatatcaaggaatattttaggaaatcttgtagttacctgtaagtgtctaactgtgtattcaatcagtaaccaatatggaaattgcagagtttcttcatcagaagatatgagtttaaattttatatttggcatgcacagcaatatattaaatgctgtgcttaactagaaagtattgtgcagtgtgatggccttttaacctccacaatatacattttatttttattccctagacttgcacatgaagtgcatatgttcatatttacccgtttggagatgggtaagatacaaccagcatagctccctctccatggccatctttgaatttcatgcaactttcccttttcctgnnnnnnnnnn

SEQ ID NO: 20617 - DNA, 650 bp, Homo sapiens
  misc_feature 1, 650: n = A,T,C or G
nacctcagacctcagatgactcaggccaccatagttctcaccagcattataggcctctttgagtctctgccacagcttctgttcaacaacttcctctccactttgctgtggggtcacttcaacctccccatgacagagctgttgtctctcagctgagccaggttctgtgttttccatcagagatgcaggaacatctgagtgcctttcacaccacacaggagctaacaggcgcccaaactgggccctcttttcctgactactctattttgctctctttcctcttctgggcctacccaattgtactgctgactcaccttaactagcgatttccttctggaatcccaaatgggaaacagaagagaagcccctcaggccttagccttcaatcagtctgaaacaccttccttccctgggatttactcctgggatcaagagaacttttcattacctagttttcctaactccactccccttcttctgcctgccatgcactagaacaggaagaggttcagacattctacttcctcaatggcctacccttgctccatcctgggacagcaagctcagtggtctagtcatcacaggggaaaaaatatgtcttcttatactataaaataaactgtgatctagtttaccagggataaccttcn

SEQ ID NO: 20618 - DNA, 1987 bp, Homo sapiens
  misc_feature 1, 1644: n = A,T,C or G
nacgaggtgcacaatgatccgaggaatggtgaagcaccgagcttatgagcaggcattaaacttgtacactgagttactaaacaacagactccatgctgatgtatacacatttaatgcattgattgaagcaacagtatgtgcgataaatgagaggtttgaggaaaaatggagtaaaatactggagctgctaagacacatggttgcacagaaggtgaaaccaaatcttcagacttttaataccattctgaaatgtctccgaagatttcatgtgtttgcaagatcgccagccttacaggttttacgtgaaatgaaagccattggaataggtgaggatgcgcccttgagttctctgaggacagagactgtgccagccagaggtttcagggctacataagcaaagagctttaaattattcttgtgcttacataatatgttggaaattttctttccatgtttggcacatttacttacatgtacttattatagtgggagtgcctttatcatcttagtgttcattagtattttaggtactttgtttatggatctgttgaatctgaggagaagtgattgctttgagttagctagttttaaattcatgacactttcccaacataattaggtatttgaacctaagtgtgtgctagtgtattgtatatttttcattaattactttattgaaagttgctttgggaatcaattcacttcaatatattttactgttctcagtgaagaatgtgactaataagtatttggactttcaaaaagtgatacagtctttgtgatagttttttacctttacattaatgagttggaaaataactttgttcaaaggaatagaaatgcatattttgcttaaatattaacaatatgtttttaattcagtgtgtctcagtaaactatgttttggattgctgtgtttttacctcattgtttattttttctgtctacctggtaatttgagaaccctcgcttgcaacatatcaccatattattcgcctgtttgatcaacctggagaccctttaaagagatcatccttcatcatttatgatataatgaatgaattaatgggaaagagattttctccaaaggacccggatgatgataagttttttcagtcagccatgagcatatgctcatctctcagagatctagaacttgcctaccaagtacatggccttttaaaaaccggagacaactggaaattcattggacctgatcaacatcgtaatttctattattccaagttcttcgatttgatttgtctaatggaacaaattgatgttaccttgaagtggtatgaggacctgataccttcagcctactttccccactcccaaacaatgatacatcttctccaagcattggatgtggccaatcggctagaagtgattcctaaaatttggaaagatagtaaagaatatggtcatactttccgcagtgacctgagagaagagatcctgatgctcatggcaagggacaagcacccaccagagcttcaggtggcatttgctgactgtgctgctgatatcaaatctgcgtatgaaagccaacccatcagacagactgctcaggattggccagccacctctctcaactgtatagctatcctctttttaagggctgggagaactcaggaagctggnaaaatgtgggggcttttcaggaagcataataagatctaagaagtgagttggtgaatgagcttatgacaggtgcaaggtgtctacagccttcccggcatgagtaataagcggcaagtgcttcaggtaacatttgtggggcgtaccccaagaatatgggtggatttggacacccgacaaggagcccagatattatggttgcacggcagaattggagcggaacacaagtagcacgagacagtaatgttatatgggcagccacaggggacccgaaaaaacatatttcaaaaacaataagttgtggggaccaagtttagtagtacacacagaaataggagagcacaca

SEQ ID NO: 20619 - DNA, 706 bp, Homo sapiens
ttagcgtgggcccgggcgaagtacatttacagaaaggccactgcagctgcatcatagttctataactcttcaaagtccccaggcaccctaagtagatagcttgaagcttcacctttacaaagtccaatccattgcatcaaaagcctacattatcccatttcctgtggcctagagattacaaatcacctgaagtaataccaaaacccagtgagtaaagacggaagtaaatctagtgagtttccaaccacccaccgcccccgagatcttaaaggaagcagtaacaagcaactagaactcacatgagaatttataggccaagagattttaatgtaagcattcttataattaaatacctcttacaaaaaatgccatttaatcagacaaggggaaaaaagtagcatcaaaagagatgctgacaaggagacaatgaaatcaaatggatcccctaacacatgcacagtccaacagttcttatttaattgtatcacttcactaaaacaatagtaatattataacttatgattcacaaccacacaattttcaaaagtctgagacaaaattagcgtgattttatttaatgtatcactacttttaggtaaatcttaacctgcaatattatgagaaatttacaaaatcatacatttcccagaactttcattcaaaatgaaatgtaaaatcacagaaaaaacacataagcggacacgtg

SEQ ID NO: 20620 - DNA, 412 bp, Homo sapiens
  misc_feature 411, 412: n = A,T,C or G
acttttagtagagacggggtttcaccgtgttagccaggatggtctcagtcccctgaccttgtgatccacccacctaggcctcccaaagtgctgggattacagacgtgagtcaccgcgcgcagcccgcttttgtggtttcaaaagttctcacttgctaatgtcatgttagagatacaaatttaaagtatgctaaatcagtggagagaacagatgtttaatctatagacacttatacatgcactaagaaagttgactactatactgaagtcccttataagaagggagttgttaaggataaggaatgtggattgggctctttcagagactccatacaggtatatttaattagcaaaggagtcaaaaaaacaccagttgttatcaacagcactttgcacatgttgggatatgatnn

SEQ ID NO: 20621 - DNA, 381 bp, Homo sapiens
  misc_feature 1: n = A,T,C or G
natcttccaataaagtttctgtcatgccagaatgggatcacgagtctctttctttcaaacccaagagtctaacaccacataaattacccagagagctaccaaaaaattcagttacatcattctattttgtgggcttctgggtgtaaagccagtgtcacttttcaaataggctgatatcctgtaggcttgagaaaaggcaaggtctcgttagtgtttatattcactaaagtatcttgctcaagccctggacaccgtagattctaggacactattgactctaggtgtctggtgaaacagtaggcactaaaaattagagaaatcacagttaaatttattttgagccaagtttaaggccttaactcttaacaacacaaactcagt

SEQ ID NO: 20622 - DNA, 587 bp, Homo sapiens
  misc_feature 582, 583, 584, 585, 586, 587: n = A,T,C or G
cagggctgggtcgaaaggagttcaggcaggaaaggtgggagtgcaggtaccaacggctcccttcagttttgcccaagggccgtgccttggccctgcgcgaatgcacaaagcagtgtttgatagagaaacccttttgagtaccagccagttttgagatatacctggtttgctttaatgttattaaattgttttggtgagttttgcaaatggacaattgaactttgttctgccaaattcttttttattgcatttaaacttcagggttttttatttccggcttattatgaatggattagtcattttgtgaatataactcttcattgagtttagggagaaataggacgttagatccgaagatgctatttgtttaatcaccagaatggacaaaattatacttcatttactatcagggaggcatggggagaatagaggcctaggggtgcgtcttgtggctcttactggttttgtgtatctgctttttttttttttttgagagggcttcccattatgttgcccgtgctggaccccaactcctgatttactggctctagagatcttctcgcctcagtctcccaaggaccnnnnnn

SEQ ID NO: 20623 - DNA, 715 bp, Homo sapiens
  misc_feature 1, 702, 703, 704, 705, 706, 707, 708, 709, 710, 711, 712,713, 714, 715: n = A,T,C or G
nctggtacgcctgcaggtaccggtccggaattcccgggtcgactactactaccaaattcgcggccgcgtcgacccattttcataatctattgccgccatttggaaatatctgttctcattagcaactatggcacttgcagcctaaatggtcatgaagtcactatccggaccatttttaggatgtccctgttggatgcaagtagtttaaagccatatgattcgtttttattagctgtgctgttcttaaccagggataataaaggctttgcaagtcaagtctgcatggcaaaaaaggtgtccacaagtgtgaatggctcatttttaatgactagccaacagccacttgtaaaagatgtaattgaaattgttcagagattaggttccgtctgctttgtcctccttctcaaaggttttcatggatccaagctattcttaagcattgtttaatactagaaatagcctttatggactaataataagaaagaaaaaggcaaattttaaaagatattccaaattcaaagaaaataagtttggcagcctgacttttgattatctgtaaaaatcagggccaatagtttgaacgggagagtaaatatgaaggttttctaaacagttttttctggaagagagggttggaggtgagaagttctccttttttcagcagcagtgcctacaaaaaacataaatggtgtttctgtgaannnnnnnnnnnnnn

SEQ ID NO: 20624 - DNA, 914 bp, Homo sapiens
  misc_feature 914: n = A,T,C or G
actgaaacatcaaaacaccagaatgaacatcaggagggaaacatgaaagtagccactccaagtaaggctccagaacatactcaaatgaaggaaccagggctttactgcgtgacctagatcaacaacagagctgttctccttctttcagctaatcaggagcatttagttgggattgggaaagaggcaaaatatacatagaggtagaaaatgaagatttatatggataacttcacagctgttttcctgtgaaccacatttctagcaataaactaatccaattgggagggaaaacaatatgtgaagaagagaaattttcattacttcctgaaattcagcagttgtctaatacagcgcttcctagcagtttttaagagtgaggtttcccttttataagaaaaaaacagatctttagaagtcaattgtacaacaagattttctagcttgctgcaataaaatcttcatgctctggaatccaaagcataacttccttatgacacctgttattataactcagaaatgcaaaataccagaattcccctaattcaattctttccacagaaaagacatgattttaagaaagcaaactgtgatcctttatttaagtcttcaattaggaagatttaaaaaaataaagactgcttttatgactgcctaagttagaattacttaatccctgcccttctaaaatgtaaaacaaaacaagattgttttaagaaaaaagaacatcacaggaatccagcacagcaggacttgctgaactcatgagattgttctttaacaagtaataccctggtaggagactacattccaaagttctcctaagctggttgtaaaaccatcaagaagcacaatggctatcattaagagctccacaaatgacgaccaggatacaaaaagataaatacccggacgcn

SEQ ID NO: 20625 - DNA, 777 bp, Homo sapiens
acttgtgttgtttgaatggtattttgaaagcaattgcatagttactattgattcctcaaaatgcataatggggatgcttctgaccgacttgccttttagcaagttgaaggtaggtatgcacgacagggctctgacttcaccagaactaataagttagattgcaatagtaggagacagatataaataatgaaggaagctagagttatgacggctttctggaaaaatgttggaattgaaagaaaatgtggaaagagagttgagtggaagaaagactaatagagtaggagtattagttttatgagaatgtgagtaaatctaatattggataaatgaatctaaggctactaatactacatttttgcaacttacatttttgagtatttgggtagtaaatcactctgataaaaacttttagagtgttcacctctcagtcacatattttgtgttttatactacatatacttgttttttagtccaaaatattggttgatttctgtataccctactttgtaaaaggcataaactagcatttaaaattaatcaattaattgcatgttattttttttttttaaagcattttcctggtgatatatggctttgaaattttaaaagttggctgggcgtggtggctcacgcctgtaatcctggcacttgggaggccaaggtaggaggattgcttgagcccaggagttcaagaccagcctgggcaatgcagagagaccctgtctcattgaaaaataaaaaataaaaataaaatagaaatttaaaaagttgatt

SEQ ID NO: 20626 - DNA, 794 bp, Homo sapiens
  misc_feature 794: n = A,T,C or G
acgcggggcaagcaggtgttccatgagctgagccagcagacccatggcatcacccggctgggcccctactctctggacaaagacagcctctaccttaacggatggactccgtgttggtcactgtcaaggcattgttctcctccaatttggaccccagtctggtggagcaagtctttctagataagaccctgaatgcctcattccattggctgggctccacctaccagttggtggacatccatgtgacagaaatggagtcatcagtttatcaaccaacaagcagctccagcaccccgcacttctacctgaatttcaccatcaccaacctaccatattcccaggacaaagcccagccaggcaccaccaattaccagaggaacaaaaggaagtattgaggatgcggcgagaagggggtggtatgtccactctgttgccatgcagaaactgactcatgcatactgggtatgccacagggtgactttttataacaatccacacagacaggttcttattcccatttaatacacaagcacagagaggttcagtagctgacccaaggtcacacagctgagtcataccctagaagagcatgtcctttgatatacatacccgggcaagtggttgtcatgacaagaagcaaaatagacggacaagtgtgctcagtggctgaaaattctctgatgctactggggccaggattctgacctaagaaacattgtcctgtctttcagctcaaccaactcttgcgaacagcagcatcaagagttatttctctgactgtcaagtttcaacan

SEQ ID NO: 20627 - DNA, 2949 bp, Homo sapiens
  misc_feature 1, 2, 3, 4, 5, 6, 2948, 2949: n = A,T,C or G
nnnnnnaccaccgaaacgcgggcgaattctcccgtgcctgctcccaaaaaatagccgcgttttcccctttaaggtgacccacatattccaaggttgaaacagccaccattcgctgtgattgaattagtaggaccaagatattcggtcctgttgaggaaacaaccgtccatccagtaggtcttttaccattgtgttaaagggaaaacttccattaagctggcaaagcctgtggtaactttcgtgtccatagttggtacaaactgaactcagagccaccgggcttagagtaagggttgctttagaatagaggaaggacagagtcgccagttcactgcacgaaatttatttggaaaaaagtgttccattgctcatgttttataaggtccctgcaggcctaaaattataaaattctatatattaaactgcttgctctcctccttcccatttaatgtaatacttatctttacatacagtcatacttttgcaaagttttctgagccatttttctcccagtccaatcattctttatttcacttatatcactcttgtgaagaaaagtaacatgtagccacaatgcagataatatcaaggtatcaatgtattcactgaattcttcctttcactcactcttcacttcagaacgtatatatttcttccttccaaattaaccagtatacataagggctaaaactatggatttcagaaccagtatgccaagttttggtgcaatttccagtttgaccactgtgactttgggcaagtttctgcttctatttttttcaacgaaacaacccagtgaaaaaaatgtttccctttaaaaatctaggcaattagtaacactaccaccaccacaatgacaaaaatacttctggttttagcttttgatctttggtgatctaacttgagatgctctttaatcttggggaataacatttagaagattaaagctgtagtccaataatgaaaacccttggactcttgagaaaacacatgctaacttgtatttataagatgtgaaactcattacccatttacttcagataagtgctcaacatcttacagattgatcttgtcactaatttcctattctcagagctagatttatgtaatttgttttcatgtaagtttaggcttacttgaaagtattctactcttcgcactaatactgaataagtaagatttgtgactaaaaaacttaagaatcaccatttgaccttttataaggtctgatgaaggtaaaggttagaggataaaagcttttatttaacagattccttctcagacaaattatggcaagcactggagcataaattccttcgtggtattccttcgtggtctcctagatactgctggtagttcaataaatacccttggaggccaaatcaggactgttttacaaaatgtgctgggcatattagtggtacataagatgattttagctagttcacagatgtacatttgtttcaatagttgaatattgaacatttaaaaatatatataaaaaaaaataactagaacatcacactcttgatttcatggacataactgccaagaaaagtgagggtagcatatttacagtaattcaccacaaagcccactcacaggtatgaagaccagggatgctcaccagtacccagaggaccagatgattgatgggttctaccacgagcatctaatagcgactgctgcagaactggtgtggaaaaggtttctattttataaaagaaagtatccagaaggctaaaggcagttgtggaatttatttcttcccagtgctctgattgtcaaaatttgaataaagctcagtgaaaggaggacagtaattaatgacttgatagccaaacatcgtaatgatgatttagtgatatactagactggatgaaagagaggtcactgtcttttcactatggattcatcataaacagtatcattcttctcaggaagaaacttatttttagaactatattttaataaatttctcacattctaatatttaatttttattttttaaattttattacctgctaggtatgatgtgtaaaatgattttccatttatagtaatggtatagtttcctttttataaaaggtttataaagtttatgtaaaaagtcaacttaaaaataccaagttaattcagtcagttcaaaaagttttgaataattaaacttggaaagtcactgcaataaagccaaagcaagttaatggtcataattataagacttagctttttaaaataaaactctcaactgtgtctacccttttaattttttttctttcttccccctaactttacagttaaccgacagcgagaccaagtcaaacgtacgtacatcaatcttaaattgtttcattaagagctatgtgaattctgtcagtgcattatgaggaacaatgtctaagaggatattctatgtttgtttcacaggttactactctgttgtatatccaggctggcccatatatccacgtaacagatacacttctctctttctcattgttaattcagtaattctaatactgtctgttataattaccattttggtacagcacaagtaccctaatttagttcttttggactaatacaattcaggaaagaaaaaacccaaaaaccaacctcattcacatatggctttttttttaaccaataacaattaggtgtacttctattttaaaacatttcagaaaaaaatatatgttatagcaatactcttactcaaaagaagaaatttcctaactctatcagataaactcatctttagtataaataagcattatttgcaggttgccacaggtggacttttagtaagtaacctaacccatgtttcagcttctaaatctgcaaaatgagcaaggtacagtagcacatttttaggtgattcttagtaactccagtagccttcattagttaaaaacattattattttttgcatgctgcttcgactcaann

SEQ ID NO: 20628 - DNA, 1461 bp, Homo sapiens
caagtgatccacctgcctcagcctcccaaagttctgggattacagatgtgagccactgctcccagctgcttgaactgatcagtttctataaagctatgtaagtaaacatatatccaaagagtcatagaacctcggagttaaattagaacttaactcactgaactttttcaacccctcatgctatactgaaacagtctccacaatatctgataaagttgttttcttaacttctagtgatgaagccactatcttgcagagtaaaatataattgtttaactctaaatcagaggatgacactctaaactgcacatcagaatcatttgataaacattttaaaaataagagtttaatgattttcaaaggtatgactttttttcatcaccttggaagatgtctcttcagtgtgtagatacaggcaacagttaaagatactgtatttacttcttggatgatgtcttaatccagccagactacagcataatcaagctgcatcatattagggcatatccacccacccatccattcatttaacaagtaattactgagcatcttctatgtgttaagacaccatgttagatgctggagctacaactgtaagcaagagtggcatagtctctgccttcataaaatgtctatcaagagaagaaaataactgcttcattatcacaaaattatgcacaatggtggagattaaagaggggctttgggaatacctcataggatgcagaagcatctacttgtctgaaaggttatcaacaataagactctcttccctataggaatacactgagaaaatatagaccaactcttttttcattagataatgaaaagaaactcctcatttgtctgccatcatgaaagaatatcctggtctaagtgcactttgtagaaggctagaatgtatcaccttgtactaaaggtttatttaacatttctaaaaccaagtccttctaaaatgcaacattaggtactgccctgaatcactaaaatagacaaatgattgtaatttatactattttcagtgctcctggtaatcctcatgaatgttagtactatgtatttataccaggaagacacagaactctctgagggatgtagaggaacagaactcccactgcatgctgtcccctgccatctgtccatgccctcccccgaatgcctggaacccaacgtgtgcatgtttgccccacactaaacatccctggatcagtgatgcattctgttttctttagggcccgttgactccattagcacttgtccacactgcccacctctgccatcatccctcccttctatcctgctctcttcagctaaattgttcttctccttgcattttataagctggaacataaataaaaatttccaagggaatccaaacaactgtcatcatatataaagtaaaaagactctttgcccaaaacaaagttcacatgcacagaatttgtggaaaacggacgcgtg

SEQ ID NO: 20629 - DNA, 514 bp, Homo sapiens
  misc_feature 507, 508, 509, 510, 511, 512, 513, 514: n = A,T,C or G
tccaccgcggtggcggccgaggcacttagatttgcttagatacctgtaaaagtgagattggtatgggataaaacgttcttgtgctgcttgcaaaagtctttggaatattctttgggatattttggtgcttaggaagtgcttttcaggttatattaatatatgcttagtcttcatgctttcaagtcctgtgggacgttaatgttagtcttttaagttgagtcctttttggttatattaagaggtagttctgatgtttcaaaggccatccagaaataggaatgcctgaacaggaatttccaattaagtcggtcagaatcctgaacagaggatatgatgaatatattacggtataactattagtggtatctgtcagatgactttaattttaggaatagcatgatcactgtgtataatcttatacagaagagaactgaataatagtttatgttcctgaaacggtcataggcctttgagtaaaatgcagtatatagatttacttgttaatannnnnnnn

SEQ ID NO: 20630 - DNA, 550 bp, Homo sapiens
  misc_feature 456, 544, 545, 546, 547, 548, 549, 550: n = A,T,C or G
actacccaaacctaaatttagaaacaggattagaaaaatatcattcctattcttcttggctataaatttacccatacaaagttaaatttaattatacattcttaatagtcttggatagacagggcttcacagataaattgtaatttaagcaagaattattttttcctgtttaaccctaaacacaataatgtggtctttactagctcatctcaattgaatatcatgccttagtatttgggctttatataatttagtgtgtatattaatttctgctcctgagctcttataaatgaaactgctgggagctgtgcacaaggcttaaactaaagaaacctcttaaagacagtgtggatatcactgaaagtattttgggggaaaactaaattttaatgtaaaagagaacaacttttagaaagaagagaaccataaaaataaaatgcagcactcctttgactntgtctaattccttgtgtctttctgggtggaattctgtaatcaatgtgttttaaaaatacatcagcacctttttgcttctccctataannnnnnn

SEQ ID NO: 20631 - DNA, 774 bp, Homo sapiens
  misc_feature 772, 773, 774: n = A,T,C or G
acagcaagataagtgacctactgagggacagagttcaaaataaaataggtttcagtcactcaatgaagtgtttgctgggagatctcgcctggtcctgtggtcctttagtgaaatatggggaaaccagcaggggacgtaggtcagatagtttataatggtgagttataggttgtatattataaggagcatttctcagcactgaagaaatttcactagattccagctcacctttccaaactattaaaagcaaaacgggactgtttttcaaaaattggaaagtaaacctggcttcttgtaagaaatttggaaaatattgagaagttttagacccagtccctttaaccttaaggagctcacatgcaataagatggaaggggcaggggagatcaggacagaaaactaccgatatggccgtgagagcatggaagcttagatcagtgaattcttcttgaatttacctttttataaatctttaaaaacaaatttgactttaaaaaagcacaaatataaatcggaaatgctaattagcacgttaagttagatgaaacatatcagtggaatcaaagctcacgcgtcaaatgatgtattttaatattttaaaaatcacagtttaagctggacatagtggctcacacctgtaatcccagcactttgggaggccaaggtaggtagatcacttgagctcaggagttcaagaccagcctggacaacatggtgaaaccctgtctgtacaaaaaatacaaaaattagctgggtatggtggcggacgcgnnn

SEQ ID NO: 20632 - DNA, 3808 bp, Homo sapiens
  misc_feature 3785, 3786, 3787, 3788, 3789, 3790, 3791, 3792, 3793, 3794,3795, 3796, 3797, 3798, 3799, 3800, 3801, 3802, 3803, 3804,3805, 3806, 3807, 3808: n = A,T,C or G
cgacccacgcgtccggggcccgtctggggcgccggcgggtgcgtttggatctggtccgagcgcgggaaacggcgggtccccgagcccagggttacaaaataaatgccatttgaacagtgccatctgtcatggaaaaacgtgagacgtttgtacaagccgtgtctaaggagctggttggagagtttttgcaatttgttcaacttgataaagaggcctctgatcctttcagcctaaatgaattactagatgaattatcaaggaaacagaaagaagaattatggcaaaggctgaagaatttattgacagatgtgttgttagaaagcccagtggatgggtggcaggtagtggaagcccagggtgaagacaatatggaaaccgaacatggctcaaaaatgagaaaaagcatagaaataatttatgcaattacatctgtgattcttgcttctgtgtctgtaataaatgaaagtgagaactacgaagccctactggaatgtgttattatattaaatggtattttatatgcattacctgagtctgaacgaaaactacagagttctattcaggatttgtgtgttacctggtgggagaaaggcctgccatgccaagggaatgacacagtgaaagacagccttttgtcatgtcactacgtgaggacgtctggagactatgaccaggttgcatgacgtatagtcggctttgagcgtatccatcaagctttatattgctttgattatgatttggaggaaagtggagaaattaaagatatgttacttgagtgcttcataaatattaattatatcaagaaagaagagggaagaagatttcttagttgtctcttcaactggaatatcaacttcatcaaaatgatccacgggaccattaaaaaccagttacagggattacaaaagtctttgatggtatacattgcagaaatttatttcagagcttggaaaaaggcttcagggaaaatactggaggcgattgaaaatgattgcatccaggacttcatgttccacgggatacaccttccgaggaggtctccagtgcattccaaagtgcgggaggttctgagttactttcaccatcaaaagaaagttcggcagggagtggaagagatgctttatagattatataagcccatcctttggagaggattaaaggccagaaactctgaagttcgatcaaatgctgcattgttgtttgttgaagcatttcctattagggatccaaaccttcatgctattgaaatggatagtgaaatccagaaacagtttgaagagctctatagccttttagaagatccttacccgatggtccgttccacagggatccttggtgtttgtaaaataacttctaagtactgggaaatgatgcccccgaccattcttattgacctcctgaagaaggtgactggggaactggcatttgacacgagctcagctgatgttcgttgttctgtctttaagtgtctgccaatgattttggacaacaaactgagccacccattgttagagcagctccttccagctctcagatacagtctccacgacaattcggagaaagtgagggtagcttttgtggacatgctgttgaagatcaaagctgtgagggctgctaagttttggaaaatatgtcccatggagcacattctggttcgtctggaaactgattctcgacctgtgtctcggcgcctggtgagcctcatctttaattctttcctgcctgtgaatcagccggaggaggtctggtgcgagcgctgtgtcaccctggtgcagatgaaccacgccgctgccaggaggttctatcagtacgcccacgaacacaccgcctgcaccaacatagcaaagctgattcacgttattcgtcattgcttaaatgcctgtatccagagggcagtgagagagcctccagaggacgaggaggaagaggacggaagggagaaggagaatgtgactgttctggacaaaacactgtcagtaaacgatgttgcatgcatggcaggtttactagaaatcattgtgattctctggaaaagtattgacagaagtatggaaaataataaagaggccaaactttacacgattaacaagtttgcctctgtgcttccagagtatctgaaagtatttaaggatgatcgctgcaagatccctttattcatgctaatgtcctttatgccggcctctgctgtccccccattcagctgtggtgtgatttccacgctgagaagccgggaggagggcgctgtggacaagagctactgcactttgttggattgcctctgctcctgggggcaggtggggcacattctggagcttgttgacaactggctgcccacagagcatgcccaggccaagagcaacacagcttctaaaggtagggtgcagatccatgacacacgcccagtcaaacctgaattggcattggtctacattgagtatctgctgactcatccaaagaaccgcgagtgcttgctctctgctcctcggaagaaacttaaccatcttttgaaagcccttgaaacgtcaaaggcagatctggagtcacttctgcagacaccgggtgggaagcctcgtggcttcagtgaagcagctgccccgcgagcctttggtctccactgtcgcctgagcatccatcttcagcacaagttctgctcagaaggaaaggtgtatttgtccatgttggaagacactggcttttggttagaaagcaaaattttatcttttattcaagatcaagaagaagactacctgaagcttcatagggtcatttatcagcaaattatccagacctacctgactgtgtgtaaagatgttgttatggtaggccttggtgaccatcagtttcagatgcaactcttacagcggagtcttggaatcatgcaaacagtgaagggatttttttatgtttcattacttcttgacattctgaaagagataactggaagttccttgattcagaaaacagattcagatgaagaagttgcaatgctgttggacacagtccagaaagtatttcagaaaatgttggaatgtattgcacggagcttcaggaagcagccggaagaaggcctgcgggtttctgacgtagaagagcttacccctccagagcatctttctgatcttccaccattttcaaggtgtttaataggaataataataaagtcttcgaatgtggtcaggtcatttttggatgaattaaaggcatgtgtggcttctaatgatattgaaggcattgtgtgcctcacggctgctgtgcatattatcctggttattaatgcaggtaaacataaaagctcaaaagtgagggaggttgcagccactgttcacagaaaactaaagacattcatggaaattactttggaagaggatagcattgaaagatttctctatgaatcatcatcaagaactctgggagaacttttgaattcataaccaagccaacatctccagacatgtaaaaatagggaaaagtgattcaaattgaaatgcctgtgtattttcctattgtttttaatgttaataacccatataatagggaaagggtgggatttttttgtgggaatgtgggaaggtgggggttatggaggagataactcaaaacttcttcaattttgcctagtgcctgcgtaaataatatatttaatataaaggactccaggtatgaatggtgtagaaatccatgattccaagaaaaaacacttttctagcaaacctggttgtttttaaaatgacttttatatatgtaatattgcttggaaactatgagtaataaagcaatgacaacannnnnnnnnnnnnnnnnnnnnnnn

SEQ ID NO: 20633 - DNA, 1096 bp, Homo sapiens
  misc_feature 1, 2, 3, 1096: n = A,T,C or G
nnnacaacgtgggcaagcatctgtgcatatgaaatgctgtttttctaaaagatttctcacattggcaaactgagagattttcttctggaacacaggaaagattatattaatgcttatagccataccatgtctgaatatgggaggatgacagacacagaacgagaccagatagaccaggatgcccagatattcatgaggacctgttcagaagcaattcagcaactacgaacagaagctcacaaggagatacattcccagcaagtgaaggagcacaggaccgctgttttggatttcattgaagattacttgaaaagagtatgtaaactttactcagaacagagagccatccgagttaaaagagtggtggataagaaaagattatctaagctggaaccagaaccaaatacaaagacaagagaatccacatcttctgagaaagtttcacagagtccttcaaaagactctgaagaaaaccctgccactgaagaacgtccagaaaaaattttggctgaaacacaacctgaattgggaacgtggggagatggcaaaggcgaagatgagttatccccagaagaaatacaaatgtttgaacaggaaaatcagcgactaattggtgaaatgaacagcttgtttgatgaagtgaggcaaatcgaagggagagtggttgagatttccagactccaagagatattcaccggaaaaggttttgcaacaggaagctgagattgacagcattcaccagttagtcgtgggggcaactgaaaatatcaaggagggcaacgaagacataagagaaggccattaaaaaccaacgctggcttccgcgtgtggatcctcttcttcctcgtgatgtgctcgcttctcctggctcttcctcgactggttcgacagtaccgggcaggggggccgcgaagattctggcacccaccggtggcgatggattcacgggggcagggtgacaacatatacagcgcggggaggggtgaagagtccacgaggccagggggcatacaagaagagacagagggtcactcacaagaagggatatacggagggacgccgataaagaaacaaattttttcgggcacagacacan

SEQ ID NO: 20634 - DNA, 517 bp, Homo sapiens
  misc_feature 512, 513, 514, 515, 516, 517: n = A,T,C or G
ccgggcaggtacactgcataaagccagagttaaaacttcactgccagcctctgaacagaaggctgttctatccacactatcacaagacctggtggagttgaggcaactgctgaattaccatacagggaagaatgaattcaagaaaattcccatgcaagataggctcttaaaaaataaatttacacaagaaaatcagcactgtaaaggtaattgataagcccaatagaagggaaacctatacaaagaaatagaaataactaagcaatctgaaatggactttaaataatgatgtttacaattctctaagaggaaaaggagcattagcatcagtgaaacaaaagtagggctatagaaaaaacaatacttatgaaaaaaccaattggaaatttttagatggaaaagcgtgaaataaaaaattcaacacatggtctaaagaataaactgcacacagctggagggaaaattaattaattttacgaaaaaacaattaatcttacagaatggtaagagannnnnn

SEQ ID NO: 20635 - DNA, 4455 bp, Homo sapiens
ctgaacttatttgttaaagagttgtggcctattacctccaaataagatgccaataaattaattcatgaatactaaataaaattaaagatgctaatggactcttgtgtgaaatagtttagaattcacttaataaatttttagacttaaatctctatctggaaaatctgaacatatcaaagagactacagctggctccttcaaacgctgtagcactaacacctaaaaaaaaaaaaaaaaaccaccaaaaaaacaaaaaacacgaggaggttctgggattaggagaacactctttaatgataaagcctgtccaagtactaaggacaattagagtaggcaggtgacctgtacaaagtattagtgataacacaacattcagcttcctaagagttaaaacgtgctgcttacatgaagggagatgatactgagctaagaagtcctggtatagagaagcagagagaccaacctacttcatattatttataaaatagagaatattctcagctaacatgctgggagaaaaaattcttccaaaaaggcagaattacaatcaatgccaagatttacaaattccatcatgtttaaatataaggacaaaaataaacatttcttatttaaaaaaaacccacaaatttccccaactatagcttatctgttagcacttctttatcagtctgactattctttaaaggccttaaaacatgaatttgggataaaaacaaataaaagtgcccaagttttaagaagccatatgttaacttaggatgttatctatatattttttagaccaatcaatgttttttaagaggtgtagatactggtaacttttctctttaaataaatgtttatatatttcaccaacaacactggcctgtggcacacagcatgtttaataaaaacacattgctattaaaaaaaagtatatgtaaacagaaaaaaaaaaaccctctagtttcaacagaaaaacttacatccagagattcttttcccattatttcttaggacagccacagaactatttcaacctgtacccttaatccagcagatacatcttaataaaagaactctaattgctaagtactgaaataaaacattacttacaataatttcctagttatccacaactttcttcttgtagcaattgtgaacttaagatgacttgtttttataagctcctcagtgtcaatatatctcaacaatacatttattacttgtacaatatattacttcacacataataacataaaacatcatttcactaaagaaaaatacacattcaatatagccaagttctagttttaaaaagaagcacctgatgagttttcttctgaattcatttctccagaagaccagtccttaaagacttctggagtctagctatgttggcatctaatgccgcaaggccatttctgaagtcttgttcatcacgagaagtgaacgttgaaaacgaagagatgctccagtcagacatcaagtcagaagtgaaaacactaccatcacagacagtattgcctttcacttgaaggctgttgctaagacaacctgatgggccatgacatgcagtttgttcctctggctccttggtggcagcagggatcttaccaattgcttcctttattttcttgaggagctgtgtgtccttcatatcagatgctctggaaagtttttcaggtgcatcttctgcttcctttgttgaagaggaacagattacaggtgtacacagtttattttcttttccagagacagcaagtccgctgttgctgactagctgtgttgtagctgctcttatttgtggctgaggggatagtctcttagaaagtggtgatttcttttcaggagtgcttctagcaaaaggaatgtaaattgtattatccaaattatgctcatcttctattaaagccatagtttcactcccttcatcagaatcctgttttgaaagggcagaaataattccaggtgcagatgcttcctccatgcccctagtgttactattttgagggcctctggaggacagaacattttcataggttttgtctggctctatggtttcctcatttttaattgtagaaagtggctctgaatgtgtaaaactgtaatttgtttctaacttatttagatagctcattatggaagtgtgagcaggagctgggtcatgttgaagttgtttatcatgaatgttcaagagtgatttggtaaggttattcccaggcttgcagcgagcactgtccacactaagatcggagagaagctttgccatgctagtctgtaaagttctggttaattctcttagtcgagtcacctcagcatcacgctgacgtaatgttatccccaatatctggttttccttttcagcagtttctaacttaaactgggagcttttcacattgactagggcttcctccaattcaatttttattcttgttatctcaatatcatattgctgtttattttcaagtatagtttgatctttgtctttaaatatactactaaattttttgttttcatctttctgattttcaatcacttttaacagctcttcatttttactctgcagtaattcctggctctttagtgactcctccaattgattttgcagtgacatattcaatgactgaagagaaaacaattcaaggttgcaatccacagcaccagatggtttttgagttttctgttgttctctgagttgctggttcaaaattctcaactgccttcgtaactgagcattctcacttcttaatggttgcatggccagtgctatctcaacttgaatatctgtgtttccacttactgttggaagtacagatatacatgcctccatttctgtaatcaacctctgaatttctgaatcctcttgttctgctaccagggccttgagctctcccaacaaatattttataattctaactttttcagctgtcttgttcacattttttgccttctgtacatccttcactgtttttgtatctcgcacatgtatgtttaaatcctttctttcacttgtggcctctctaatttgctctctggcacatttttcttcattagtggccaagaaagctggttgtgactgagtagggcttcggtgtgtctgactgtccagatgcgtttcttttccatgagatcgaaaaagagacaaatatgtttgaatacattttagtaggcctgtttccttatgaattccttgttgtggcagaattccattaacaaggcccagttgctgcaatgttggaatagctgatatgtcagttttgggcaggctacatggaactccaggactggtattaaatgaattccgtagaacatcagtacaggttgcagaaactgttttaccttgtgatgcaaactgactgttgccatcagtttgaacttcagaatgaacctttggagggcagggtggccgctgaagtgaccagactggggtggaggtacataagccataactagaatgaggagttgcctgagattcagaatgagagggagcatggcatggtacagcaggaattccattagggatgttctttgaagtcaagtcattcatcagtgacatctgagtctgcacgtgctcacagagggcttggtatattatgggtgaatacattctataatgatcttgcaatgaccagttttgctctaggtctgatgtgtctctttcacttctagcagaagcttcattaggtatctgtttcttattatctgaagatgctaatgtggaagaagaaaaaagttcttgaaatatgatttttcaaaaacttttaccgtaagattttaagagaagaaagggctctcagaagtagtccaatccatcacagacttcatagaagggccttaccactatcacccctactaaagaaaatcatctcaaattctttctgaaagtaattagtgtttaagtttccccagtcaaaaatcatctatactaattctttacaattcccattttttatgctacttgccatttgtaaaatctctccttcattttaacacttcttttaagggagttatattatccctaaagtccagtcaaactccttcaccttgttccttgtcagttcatgttctcaagggaaaatgcaataggaaagagaatagtttgtacaattctgatgctttgggtcctcaaaaaacaaaacaaaacaaaaccaaccaaacaaacaaaatcttggcctggcatttaaagtttccaaagcttgaccacaagctacttttccaactatcgccccatcactcccaactccaatttttcatttcaggcaggccaatttagttacccaacaagcttttctcaccttccaataacattgttcatgaaccattcctaccaatccaattctacccactcaccaaggctcatctgagttttcttcttccatgaagccttttccaatccaatcattccagtctagtgactactcttcaccaccctagagcacatattgtctatagaaatcatatgccccgcgt

SEQ ID NO: 20636 - DNA, 383 bp, Homo sapiens
  misc_feature 1, 378, 379, 380, 381, 382, 383: n = A,T,C or G
ncgtccgattttcttggtatattttccccaactcttttcttagtcctccttttttcattatattttaggtatgtctcttgtaaacagcagatggctggatttttttcttttactttaagaagtctgtcttttaactgactacattatttatatgaaatagaattctagtatattttgactcagttttcccaacttatttcgtattttctttttactgcatccactttttaactggcatcaacccccttcttttgggttggttgtgttttacgcacctcctcctcttttcctcactcccactggtttgcaagttatacatttgatttcttttctttcagtgccatgctctgataaaataaggacatttattacagaaannnnnn

SEQ ID NO: 20637 - DNA, 811 bp, Homo sapiens
  misc_feature 1: n = A,T,C or G
nagctgtttcctgtgagaaaaagaacggccagaatcatggcgcttcggtcttccttgtgataaaaaaaagcacaattcgcccttgcgtggtcgcggccgaggtacacaagtcacaattatacagtttaatgagtaaacactgatcacacccatataaaccactgcccaggccaataagtaaaatcttacaagcaaccccaaaaaaactctaggcctctacctttagaatgcgtttgcagtatttaagactattgtagttccaaaattactaaaagtaatgaatcattaatgtatgtgtattacatgttagaaattttatttattttttgaagcatgcatgtttatcattcttaatatactttctcctgtttaatctcttataaaccttaaactgtagtgactcttaggagagtgaaattcatgaatataaaggtagtccataaaacgtgatttgtagattttaaatctgaaaaacattctcatatgcaccataaattttgtcactgttctatttgatttgcttatctctacggtgaatgaattgtttctctgaagaggatggggaagctttcccatttaacaggataaaactgagggaaatgagaaatataataagaaagagagattaaaatcttctgaaattggttaattgattgcctgacagttataacagaaatgctttaaatctgaaactcatcagttctaggctatgtttttcttttctacttaattagaaaaaaataaaacataaatgcattcttgtttagttcgaactgtggggaaatgcataggaagttgtaggcaataaagt

SEQ ID NO: 20638 - DNA, 596 bp, Homo sapiens
  misc_feature 594, 595, 596: n = A,T,C or G
tcgacccacgcgtccgctctacctaccaggttcaagcgattcttctgcctcccgagtagatggaattataggcacacgccaccatgcccagctagtttttgtactttcagtagaaacggggtttcgccatgttggtctctggctggtctggtactcctgacctcgggtcatctgcccccctcgtcttcccaaagtgctgggattacaggagtgagccatcgtgcccggcctttcacatgtttctttaggtatatgaagctggcttacaagaaagctattatggttgggttttggccagaagttttaaaaatgacttacaccaattcagtgtgtcagggacagaggttttactgaagaccagttgtaggttaattgaagatgtatatgctccctagcaggttcttcagactcaagcaattttgtacgcatttatgtgttcagtggattggctgcttatgtttcgcaagtgttagtgcaaagataaccctcctaaaatgcaagaatgatggatttggatctgagttttagctccattttcattgtaatttgaatttcaggcgccaagcccatctctgtgtgcttgcatccaactgnnn

SEQ ID NO: 20639 - DNA, 1216 bp, Homo sapiens
  misc_feature 1, 2, 3, 4, 1214, 1215, 1216: n = A,T,C or G
nnnngccgtccttcaggggcgcggccggccttcccttcccgcccaggcccgtttttttttaaggtcctctccccggtggtcagccgatttccccccacccccccgggttcccctttcccgccgctccggtgctagccccggcccccccccgcccctaacttttttgtatttttagtagagacggttcaccatgttaccaggatgtctcgatctccggacctcatgatccgtccgcctcgcctccagctaatttttttgtttttcatagagacaaggtctccctatgttgcccagtctggtcttgaactcctgggctcaacaatcctcccacctcagcctcccaaatgttggaattacaggtgtgagccactacacccactctctaatacctttcagaaaatgtccagggagaacctagtttagatttcatgtccagatcttaaatgatcatggtagccgatgttatgggtagcataatttgctgagtctaggtcatgtacccactgatgtcgtcatggtggcaagtcagtgttggccctgtcctaaccacagggaaggggttctctacagaaaagtagagtttagatctgagaaggtagttgagaatgagtgccgtatagtgaataatagtagatttttaccccattttacccctttgtctttggttgtatatatattcacataccattctaattatacatatagtttcaaaatgcctctgcttctccaacacactatactttatatatattttcaaaacgttctacctccttcttccaagataaatatctgtgttttgtgtcctccatggccacccctaagagaggtgcaaggaggatttcattcctgggaattacctactttaatagcctgggtatttactgaaggactgaagaattacaggcacctatttccaggcttggcatttttaagcagtatttaaaacctcagttgacatttgatgattctgtggcataataaccacatccagagatcttgtctaaacctggaccttgactcttgatcctcatcttgtggtttctatttcttgccaataatctattctggcttttccccatctcccaaaataatgctttcactttgctgtctgctttgaacaatgtgaaagacttgaaggggaaaatgaagctaaataatgtggcatttcccccaagattataacctactggatgcatttttataagggatatgannn

SEQ ID NO: 20640 - DNA, 452 bp, Homo sapiens
  misc_feature 1, 2, 3, 4, 5, 6, 7, 8, 9, 10, 11, 12, 13, 14: n = A,T,C or G
nnnnnnnnnnnnnngctccctgccactttgcctttgtgcaagagctgctgattttgcagctcttactttgcagggcaggtgaaccctcctctgaaatgtcacctgggtcatgggtaagggtggatgttgggttaaaattcaagcacctgctcaagatctgtcaaaactgtcctccagccccactctactgcactcactctgaaagctgttcatgggaagcccccaagccctacttcacagggatgtgccactgtcgagtcagagctggacctaggtctgcggcctctgtcccagccaagcagggaccccttaggttttgacttctgggctcggatgcagccaggaggagatactgttcagccctgccctgtgagaagaagagattggggaggcctggcagccgagactgtgctactgcactccagcctgggcgatagagggagactccatct

SEQ ID NO: 20641 - DNA, 990 bp, Homo sapiens
  misc_feature 1, 2, 3, 4, 5, 982, 983, 984, 985, 986, 987, 988, 989, 990: n = A,T,C or G
nnnnnaacgtgcgcaggtcagcgatgggctgaacgttccttaaaatcgctatttttgttgcatcagggacgaaattctctaaagcaaaaacatttttaaaaaaattcaaagatgcagaagaaacgataaatgccccatatatataaaagtgaaaccaatactgtaccaatgaggaagagagttttgtaaaagcaagcaggctggctgtcattaaaagttatcttaaataacttgtcgcagcccactcccaccagtcctgaaaatagttcattcaagtggtaaaataagacaaggcagaggacgatgtctctaacttccctgatgtgagatctaaagccccattcctaactcttggttttagaattgaggaaagtggaataaatgcatttggaaaggatctgttttcttcccaggtttcctgcctgggttgaaaataaggtttcaggggatggaagcaactttgaggaacataaagaggtattggggttcatcaattcatctttgtttcaagatggttcccccccaccctccacaatgcaagttaattaggagataatttagctaccttgtgaattagttttaagataagtatctttttaagctttgtcactttaattgccccactgattgataagaagtagttatttctaattgacacttttttgatgtccattggaagcatttatctggaactttttgggggtggaaggaaagttaattaattttatcaagtctacccccaaaaggactctgcctaattttgttgaagaagacaaaggaagtgaaggaaaccaaataaaaaatcaatctcatgggattttaattattaagggacactttggtttaaattagagggcatctactaatataatacgtcaaaacgttctatttatggcctcaaatctctaatttattgagatgcattttataggtattcattttcctatggatacactcaacggccctttatatgcttccacannnnnnnnn

SEQ ID NO: 20642 - DNA, 1007 bp, Homo sapiens
  misc_feature 1, 2, 3, 4, 223: n = A,T,C or G
nnnngaaattttagaacatttaaaatttcccgcataacttatttcattttatttactttggaagttcaaaaaaataggactcagttgagatgtataaaaatagcctgttacaaacctcccctgtgtagcagataaggttttttaacaaaggggtaaagcctaggggattttttttttggttttttttctttcccttctttccttcttttcttttttttttttnaaccacaggtgccataatgaagtggtaaaaatggaaaaggaatgaggaaaaaagaaatgcagtaaaaataatatgtcagagaaagttttaaaatatgtattactcctgtctgtgggggaaacacctctttggatatgttcttgacagattgagttatttctgtctattgggtatgtataaagacatatttatggatttataaatcttttgaagagggctgttatttacccagttgactaaaatggactcaaactgtgtaaataactatttaggacatgtactacaggccaaatgctggcacagcttacacatccatgcctgccagaaaaggcaaacagggaaaacatggaaaagccactgtgcacagttaatccgaaggctgcacaaagaccaagctctgcagttctcagggatgaaaaaaaggtttagaagggtgacggttggcatggaagtgtgcataagttgttgcagcaacactttcaggcatcattctgcatttagcaggaataaattcaactgccaaagaaaacccacaaggaaggacaaataagactgaaggtggggctcccaacagcttctgttatcaagcacagaaaggtggggtaggggaaaccagcacagaaagtttctatttgatgacagtggaagttattcactgtagttttttagtagagagatgaggaaagagggtctgatgagaagaaccttatttaagtaattgggaaactggaagtttaggtctgacactccactgggacctcaacaaatcactcagcttctttgt

SEQ ID NO: 20643 - DNA, 1060 bp, Homo sapiens
acttagctgggaatctgcatctttagagttcaaaactgtgcagtttttcctctgattacgattattatgttgaactccaaagggtcatttacattcctttataacactggagctctggtgtatcgaattgtgttatgagataagccactagcagggacttgaacattccattttctttagattttgttgtatcagcatgtgaatatgctgaatacaacttgtatcctaaagcatacgagctataacattttcacgttggactcaaatttcttcatcatctgtattggatgaattttgtatactgttttgttggtggatttctaacataagattgccagctcctgctagctttttaaaaagatcctcaggttgctgtagctggatgatcacatgtcatttaagtttccgatccttaaaatggagtgcgggctacctaagtttgcaggctgtctttttatgatcctgtgtttatggaattgccctgaagccatggaatgtgaggatgggtttcattgtagcagtgtgggtttgttggtttttgccagtatattttataacaagaaataggagacttgttggataattcaaggctatattttggccagttgataaagattatatatttgtgagtaacatcttttaagttgttatatcctaaagttgaaatactctgctgtgtgttactttctcattatgtttgggctcttttcttcactgtcaatatttggattacctgaagatgatatcccaattctctgtaaacacattttagatgtttctttaagagataagaattaggtcaaactttttaacatctaaataacaatgactttgattctcaagagttaggggaggataaattgttataagcttggacaaaattctaattggatttgaaaagcagaagaaacttactattgcttggattatggagccctgtttgggagtctaacacagaacagagaaggacagaattgtgaaacactttgctatgaattcattgattcagtagttatagtaatacttcctagaagccactgaagaagatacaaagtggggg

SEQ ID NO: 20644 - DNA, 560 bp, Homo sapiens
  misc_feature 553, 554, 555, 556, 557, 558, 559, 560: n = A,T,C or G
acctggaaggccccactgttacttcttcatacaggcaaaagctaatcaactatttcaccttgcagctaagtaggacagagtgacttggagaagtgcagatgaactcccgtggctttttcagcagcagggaagtaaacagaagctgcatgattgccttcttaatctctttgtgtctcaaaacctttataaaaggggacactttgctgagttgctgagttattggcagtttgttggcaaagacaaaagtgcaatggcaacagaatacttcgattcattgaagcagtatgagaaaaactgcgaaggcgaggacaacatgagttgcttagctgatctttatgaaaccttggggcgatttctcaaggatctaggccttctcagtcaggtaagctcagcagatcaatggcaagccagagacaggtgggatttttgtgttcactcttctctttttccaagatgttaatgtggttttcatttgttgtgctataatccttaatatttaatcagatgacagatcttgcaacatttcactcactttaactggcctttcaccccnnnnnnnn

SEQ ID NO: 20645 - DNA, 529 bp, Homo sapiens
  misc_feature 527, 528, 529: n = A,T,C or G
acgtgtctgtggtcccgactactggggaggccaaggtgggagaattgcttacgaccaggagtttgagtccagcctgggcaacatagcaacaccccatatcttatttaaaaaaaagcactctatgtttgttttgggcctctttgagaacatttactatgaaattttatttatctttgtttcctttcagttcttcttttgtttattgtgattatctttcatataacaatgtgcttaaatagctggtggttcttgataggtcactcaacagtgagcaaactgtatggatcctgtgtttgtgagcagtgtttattggctgtgatagagggtggggacctagatgcttttaggggatcctcctgttatccatttctgaagtgttttctcctaggctggtcactttttccaggaggagaaatcctttcatctcttgccatctacatgacagtaggctgtggttggggtcatagtactactactatttggggagctttgggagccaaggtggggagggaagctagtggtgacannn

SEQ ID NO: 20646 - DNA, 525 bp, Homo sapiens
  misc_feature 525: n = A,T,C or G
actggaagaatgagataatttatttggcaaaattcatatgtatatgttatgccaaacacttggctaatatctggatgagatgggcaatttacagactatgtaatcaactagggttctatctgtagttgtgttatgagaaacaatggttcattaattcacggaaatgtgaattaaaaatgtcattaagcgaaagactctgttagcttgaattcctattgggatatgcaagacacataacatttatgcatatttgtgatgttctaatccatttttagggaataggatattatataaagcaccctagtttaaacaaatacatgattacggttgtcaatagagatagatataaatagtgacctgtgtaattattttgctaatgctgaaattttttttcagacaagtggatccaaaatctaccaatgatcttgcattacattaaggggaaaagtatctccttaatggggaatctttactttttttttttccaaattgggcctatacacatgatcttatggatagataatn

SEQ ID NO: 20647 - DNA, 420 bp, Homo sapiens
  misc_feature 1, 2, 3, 4, 5, 6, 7, 8, 418, 419, 420: n = A,T,C or G
nnnnnnnnaggatgaacacatagatgaaatgcataatatgaacatgagccagtacttaaagagctcgtggtgtgtgccaggagtgtgttttccatgcattcttcctgagaagtaggtttgattatacagtatctattttacagatagaggttgaggttcttttctttctaaggtgttattagacagctatagacatggacaccaaaactggccgagccttcggcattgtaaaggcttggcttaccttccatcaccctcagcagttctgctggaagggaaaaatggaaacagggcccttaattttttctcattattggattaattggaagcactaggcatggtgtgctgcctggtggatagtagaggctcagtaaatgtttattgaatataaatctgaatcggacctaggcatctaagnnn

SEQ ID NO: 20648 - DNA, 344 bp, Homo sapiens
actaggattgcaggcatgagtcactacactcgcccagaaatttgtttttagagtaactaccatgccattaacaaacctgacaaaattaacaatttcttatcttcaagaactcaattcatattcaaatttttatcatctcaaagctggtttgttcaaacaggagtccaaagtccccatactgcatgtcattactgagaccatactgggactaaggcagggaggaatgagccctaagtgagtctgtaacaagcgagaaagaagctcattcaactaaaagaattaaattggaggtctggcccaagaaagtggaaaaataaacaaagaaaactaaaactattcaggaa

SEQ ID NO: 20649 - DNA, 627 bp, Homo sapiens
  misc_feature 621, 622, 623, 624, 625, 626, 627: n = A,T,C or G
ccacgcgtccgctttcttatttggaaagaaaacaacactcaccacggcattcacaatgctggggaccttatgaatgggaatggagaggctgcactaatgtaagtggggtcaacatccctgctggagggcagatgcaagtggggtcaacatccctgctggagggcagatgcaattttggcaaactaatgacttttggaagccattttctagactgcatttttctcttctttgttagaatgcttttctcaaggggaaaaagaaagcggaggtgtaaatggtttttggccgttcaaaaagcccgtctgggagactctctgctgaccacagcactgtctctccccagggcccactcccacagtgtcactgagtccagagtcgggactccaacaagccctccgcattccagcatgactgtggtaaaaacaaaaaaaatctattttattctagtccatcacattttctatatttgctaaagaaatctcgatcactccataaatgatcggttaaaattaaaaatataggctgggtacagcagcttatgccctgtaatcccaatgctttgggacactgaggctggaagatcacttgaagccaggagttcgagaccagcctgggcaacannnnnnn

SEQ ID NO: 20650 - DNA, 606 bp, Homo sapiens
  misc_feature 1, 2, 3, 94, 96, 98, 99, 100, 101, 104, 105, 106, 107, 108,109, 110, 111, 113, 114, 115, 116, 117, 118, 605, 606: n = A,T,C or G
nnnaaataattcaagccctgccttcaaaaagaaatttttttttagtattatttagcaaaaacaataaaacccaaatttttttacccatcgaaanancnnnnaannnnnnnnannnnnnagtacctgcccgggcggccgcccgggcaggtactaaaaactagtaatgcaaaggcagcaatgttagcaaaatttaaagagttatacggggtgagttttacagaattagtaagaccatttaaaagtaataaatcaacgtgttgcgattggtgtattgctgcatttggacttacacccagtatagctgacagtataaaaacactattacaacaatattgtttatatttacacattcaaagtttagcatgttcatggggaatggttgtgttactattagtaagatataaatgtggaaaaaatagagaaacaattgaaaaattgctgtctaaactattatgtgtgtctccaatgtgtatgatgatagagcctccaaaattgcgtagtacctggccaggagccagcaaagagggagatggttgttggttctccagaaagggaacaccgatggcccatgcttctggccgtccttttacacacaggaaacagcnn

SEQ ID NO: 20651 - DNA, 3497 bp, Homo sapiens
acgcggggaagcgcgcggaagaaaaaccagcaagaaggcggcgggggaagatggcggtcctggggtagagtttgcaagctttctgactaggctagtcgagtaactattcgggtcatggcgtcaaactcaactaagtctttcctggcagatgccggctatggcgaacaggaactggatgccaactctgcccttatggaattggacaaaggcctaagatctggcaaacttggtgaacagtgtgaagcagttgttcgctttcccagactttttcagaagtatccattccctattcttatcaattctgcattcctaaagttagctgatgttttcagagttggaaataatttcctgaggctatgtgttcttaaagttacccaacaaagtgagaaacatttggagaagattctaaatgtggatgaatttgtgaagagaattttttctgtgattcatagtaatgatcctgtggcaagagccatcaccctccggatgttgggaagtctggcatcaataattcctgagaggaagaatgctcatcatagtattcgtcagagtttagattcacatgataatgtagaagttgaagctgctgtttttgctgctgcaaacttctctgcacagtcaaaggattttgctgtaggaatctgtaacaaaatcagtgaaatgattcaaggtttagcgacaccagtagacttgaagctaaaattgatacccattctacagcacatgcaccatgatgcaatcttggcttccagtgctcgtcagcttttacaacagctggtcacatcctatccgtccaccaaaatggtgattgtgtctttgcacactttcactctgcttgcagcgtcatctttggttgatacacctaagcagattcagcttctgttgcagtatttgaagaatgatcccaggaaggcagtaaagagacttgctattcaagatctgaaattacttgctaataaaacaccacatacttggagtagggagaatattcaggcactttgtgagtgtgccctccagactccttatgacagcttaaaactagggatgttgtctgtcctttccacactatcagggaccatcgccatcaaacattacttcagtatagttccaggaaatgtgagttcttctcccagatcttctgatttagtcaaattagcccaagagtgctgttaccataataacaggggcattgcagctcatggagttagagtcctaactaatataactgtttcttgtcaagaaaaggatcttttggcactggaacaagatgctgtctttggcctggaatccctactggtactttgtagtcaagatgatagtccaggtgctcaggccactttaaagattgctctaaactgtatggtgaagttggccaagggcaggccccatcttagccagtcagtagttgagaccttgttgactcaattgcacagtgctcaagacgctgcccggattttgatgtgccattgcctggcagccattgccatgcaactgccggtgctgggtgatgggatgcttggtgacctcatggagctgtacaaggtgattggacgatcagccacagacaagcaacaagaacttctggtgagtttggctactgtgatttttgttgcaagtcagaaggcattgtctgtggaaagtaaggcagtaattaagcagcagcttgaaagtgtctccaatggatggactgtataccgtattgccagacaggcttccagaatgggtaatcatgacatggccaaagagctttatcagagtttgctgactcaggttgcctcagaacatttctacttctggctaaatagtttgaaggagttttcacatgcagaacagtgtctcactgggttgcaagaggaaaattatagttcagcactttcttgcattgctgaatctttaaaattctatcacaaagggattgcttccttaacagcagctagtacaccactgaatcctttaagctttcagtgtgaatttgtaaaactcaggattgaccttttacaagccttctctcaacttatctgtacttgtaatagcctgaagacaagcccaccacctgcaattgccacaacaattgccatgaccttaggaaatgacctccagaggtgtggtcgcatctccaatcagatgaaacagtccatggaagaatttcgaagccttgcttctcgatatggagatctttaccaggcatcttttgatgctgactcagcaactttgaggaatgttgaactacagcagcagagctgtttactgatatctcatgcaatagaagccctgattttggatccagaatcagcaagtttccaggaatatggatctactggaacagcccatgctgatagtgaatatgaaagaagaatgatgtctgtatataatcatgtcttggaggaggtagaatcactcaatcggaaatatacccctgtttcttatatgcacacagcatgcctctgcaatgccatcattgctttgctgaaagttcccctttctttccagagatattttttccagaaactacagtctaccagcatcaagcttgctctgtcaccatcgccccggaatcctgcagagcccattgctgtccagaataaccagcagctggcgctaaaggtagagggagtggttcagcacggatctaaaccaggactcttccgcaaaattcagtctgtctgtctgaatgtttcttccacactgcagagtaaatctggacaagactacaagatacccattgacaacatgaccaatgagatggagcaaagggttgaacctcataatgattacttcagtactcaatttctgttgaactttgctatccttggaacacacaacattacagtggaatcttctgtgaaagatgccaatggtatagtatggaagactggtcccagaactaccatatttgtaaaatccctggaagacccttattcccagcaaattcgcttacaacagcagcaagcccagcagccattacagcagcagcagcaacgcaatgcctacacacggttttaaccatggaatgaatgcactgcagactctcaagagatcaatcaaattgccagaaacagtttggtttttcatatggaataagtattaaagttacagtgtagttcatttattcattgatttttgtaatgtaatattctggaaaaaattttgttttcttaaaaattttgtctgacagctgggcgtggttgctcacgcctgtaatcccagcactttgggaggctgaggtgggcggctcacgaggagatcaagaccatcctggctaacacagtgaaaccccgtctccactaaaaaatacaaaaaaattagccaagcatggtggcaggcgcctgtagtcccagctacttgggaggctgaggcaggagaatggtgtgaacctgggaggcggagcttgcagtgagccgagactgtgctccagcctgggcgacagagcgagactccgtctcaaaaaaataaataaatacattttgtctgaaaaataactggaaaaaaaaaaaaaa

SEQ ID NO: 20652 - DNA, 428 bp, Homo sapiens
  misc_feature 1, 427, 428: n = A,T,C or G
nggactcagggtcttactctgtcacccaggctggagtgcagtggtgcaatctcagtttaaacccccaagtctgtggtattttgttatagtccccctggaaattaatacaggattcatggtctgccaaagtctcattccctgctcagaccgacaatggatagtgggatcctttgtgatatgtgctctgtgagttagaagtagtaacttagagctgttgaggacaatacctttgcaccccatccactgaattttgttttcaaagatacagtctgaaactcccagagggtgagtgcctttccagtgtgtcagagccattagcggctgagcagaccgctgagcatgtagatttctaggtcagggccctctccccaaagaatcatactccctggttgaactgaacctaaatcaggtttaaaactagacagann

SEQ ID NO: 20653 - DNA, 1059 bp, Homo sapiens
aaagggaataagcttgcggccgcaggaattttttttttttttttttaatctcttcttccttccctgggttccaacgcctaagctgctttgatattctgggtggcataatgaagtggcccctcccccagatgttaccagtcaccaaccatgacccttccctgcaaggcagatgggacccttctgattctcttacggtgggggggtttgaggtgggggggcacacaaaaaccaacaaccagcaaaggggaaccactacagctctccctactcttcagacaaaattcagtctcagtaacctgtcctgtcaccccaccctgctctcagcccccacggccatgcttcttaaagaccctcggcctgtgaaggccacatttcagtgtccggcagacggcaggctttcagcacacgatggctgaatacttacgaatggggcatttatagcacttccttcagccttccacatgtacacatatacatcaggcaagattaagcttgcagggaacaagcccacgcatgtgggattttgtgttctgaaagcaatttccaaaatctccgctctcccaatgctctttcatgagattcattcctcaggcttgacacagaaagccaactgactggtgtgaggcaagtaggaaggtagacacgacaaaaagagaaaactagccgggcgcagtggctcacacctgtaatcccagcactttgggaggccaaggcatgtggatcacgaggtcaggagatcgagaccatcatggctaacatggtgaaaccatgtctctatgaaaaatacaaaaaattagccgggcatggtggcgggcgcctgtagtcccagttactcgggaggctgaggcaggagaatggcgtgaacttggaaggcagagcttgcagtgagccgagatcgcgccactgcactccagcatgggcgacagagcaagactctgtttcaaaaaaagaaaagagaagactgatgattgaagttttggtgaaagggtcacctgtctgcttctgggtcagcagaggtcttggttgctgacaactaggccctggttcactgctgttggt

SEQ ID NO: 20654 - DNA, 584 bp, Homo sapiens
  misc_feature 584: n = A,T,C or G
accaggactgtcctagtgcggggaataaaagtgaaatgatagtcctttctcctgaagaaatcagggtctagtggaaaggaaggtgggactcggaaggaagctgcccggtggagcttggccctgtgctaagcattcctatccacttaactgtgggtaatcgtcggaaactccctacagacctgggagtaagctattgtattgaaggggctgtatggagtcagggagagaagccaggctttagagtcagatggctctaatcgtgcatctcaccctctctgtgtccccaagctctccctctgtaagatggggacaatgacagcacccacctcccaggtctacagtgggactgacgtgagggtgcagggcagtgtgggaatggagcctgcacatggtgggtggtcaggtagcagccactgtgctgtcactcccatttgggaagtgagcaagtctcctaccaggcaatagtgaggaagcaacagattcaaatataggtttacctaacatagtcccaggaattctcacaaaacaattctgcctctgtccccaatataaaataattgttctcatgtgtcaagaatacgcan

SEQ ID NO: 20655 - DNA, 667 bp, Homo sapiens
  misc_feature 1, 2, 3, 4, 666, 667: n = A,T,C or G
nnnnaacactacaggtttcaaatgaatacttttcttatgttgccttcagaggttcaggacttctgcttttaaaacctgcagcctaccgtgggaaaccaaaaaagcattccctatttccaactgcagtatgtataaatacatatcactacaaaatgtatagaaagtgtgatgagatacatgaatggcatttttattggtcataacattttgatgaaaagcatttaaagttttaactttataaggcttttcaaaatgtgtttttctgagatacattgttatttattcatatccagaaaaattacaaggataatacagaatataataaataatttatctgagagcaggaagtatcctctcatgcttaatcagtttggggtttttaattataacacaggaaactcataacaggacctggtcagagagcatcccagatccattaaagattggattcattgacttggagaaaagtacatttctcagggatcagctagaatctggacttgcctaactcacatttcattttttttgttgttgttgttgtttttataatttcaacttttattttagatgtaggggtacatgtgcaggtgagttatatgggtatattttgtgatgctgaggtttggggtacaaatgatcctgtcacccaggtagtgagcatagagnn

SEQ ID NO: 20656 - DNA, 1465 bp, Homo sapiens
acttgtgtgggtgtcttaccttgcattagaatatcctaggcctttctaattcttcctcttgaattccctgtgtcactcatctgaggtcatctcttggatttaaatacatttggtctgaaattctcaaactgctgaataaaatgccatagtaagtccaactatatggtttcatgtagggtaaagtaaccattgtggaaggattacgataaaactgtgtgacaataaatagaataaaagatggcaaaacaatctgtaaattacaaagtgttataaaaatgcattgaatttctagtgttcttacactttcatatttctcattggcacatcaatcagaccttgccttcctaaagtgggaggaagaaaaaggctgcacctgtctgggctgagggtctgggcagaacactagcaaaacttttaataaatcttcatgtcaccaccccaaactcattagggcccaaacttatttcattatcttcactatccccatggttttcctctccattatttttcatgcccatcttcagcactttcatgtttctagtcttagaaaacccaaagttaaaaaggagagcaacttaagagtgttctataccgcttttctctccttcatctgtggccaaggctattttttctttcttctaattcttgcccatattcagttcttctctccatttccattactaaaaccttggactgaattccccttaactcatgcctggatgaccacagctagcctctctgaccactctctcttcagcctaacccaccctttatatactgccagaagaaccttccaataacagcaattgtcttcctaatgcaccatggcccatgcccactgcgtcaaattcaaattctcccaccagagggagaggcatttcaagccattcataatctggcccccttccaaagaccctacctgtcacagcccaccagcttcaggcaccaaaaatcccatcggcttgctcagccagtccctgaacctatgggagcctccatattaggattcccctcctgaccatggcggggtgcagatttggtcttgctctcttcaaagccagtgtcttgggagtaaccttccactcaaaacttaactacgcatctcatgacccacttggttctgatagatgcaggaggcagataaaggggagggtccctggagaatctctgacccacctctgcactgggagaacggggtggagccacgggaagttcgtgctgtgtgcagggaaaggagcctggcttctttagttcctgtgtggtgacctggtgttcaatctgtgcggtgggggcccattagcaggatcccctcttgctttgcagagagttttttttctttttgcccagtaaattccattcccctcacccttcaatgtgtctgtgttcctaatcattcccggtggtgtgacaaaaacctggttttagctgaaccaaggagcaaagctctacatcagttctacattgt

SEQ ID NO: 20657 - DNA, 1189 bp, Homo sapiens
  misc_feature 548, 1185, 1186, 1187, 1188, 1189: n = A,T,C or G
accatttgggattatggtttttaaaagcttgagaatattacttatttacttttgcagctttccatgcagctgtttttttttctctctgtttttgactttggagatcaagttactgatttttatctttacttttctctttattttgtgccttggtcttgaaaaagtaataaatatttcttactgaggccccctcctgctttgttctgccatctaaggtgattacaatgctcaagtctctttgttggttgcccttgactaatgcttttcagcagccccgggctcagctcctggttcccagtatggcacaatgaccaggcagatatctcgacacaactctactacttcttcgacatcttctggtggatacagacgaactccctctgtgactgctcaattttctgctcagcctcatgttaatggaggtccactttattctcaaaattcaagtaagcttgtgctttgcaggcatacagcaacagtggagctccttttgaaggaaattatttgaaacttgttattcttgccaagtgatagacaacaattgaaanccatgatgtttcatgtttatttttgttttaggatattagtccttgaatcataccattttaagagtaattgcttaccactttctcttccaaaatttagacttaccaagtatacttaactaaatttatcgagacgtgtctatattgagtatactaaaatttaactttaatatgcgattttattacataagtagaactagagaacaaaaacattgcagaaataaactgaatttattggcatgtttgagacagcgtagtaatggtaaaattaaagacacaaacattgtcaaagttttcctttaaattaatataatgaaattgctggctatcacttttaaggtcattaacgtgttcagaaatgagttcaaaaccgattaaaactgtttgtgatgcctgcttaattactctgtctttgaataattctaatggtgggaatttcttttgatttctttctgtttacctcaaattgcacatctcaacactaattgcagtcagtgtttaaaagctggtaagaaaagaaaatagttttagcatataatgttaggaagttagaatagtgtagggtagtcattaatatcactttccatattaagatgttcaatgcaaaaaggaaaaaaaacaaaattggaaatgaacctgnnnnn

SEQ ID NO: 20658 - DNA, 1272 bp, Homo sapiens
  misc_feature 1270, 1271, 1272: n = A,T,C or G
acatgttccttcccttactttggggagtctaggttgtgaatttgaaacaaaatcagattcttttcatcttccctttcccctcaaattcctgagaaaacctccaaccttctaaatttatagcaaatcaactataattatgtgtttccatttgaaattcaagctaaaataacatactttaaaaagtgtatcttaaaaatcatatttcgcttcaaaaaaacttgttaaaagtaatttgcatcagatcctggagtcgacttgaagaattctcctacatctgacacccagttaggccctttgagaaagagagaaaagagaattttttaatgcatgtttgattatggccatctcttttcttagaaggtagaagatagcaccatgccgattcgtcgaactgtgaattctacccgggaaactcctcccaaaagcaagcttgctgaaggggaggaagaaaagccaggtaaagtaaaatggtgacacagcttaaaacatcaaaagttatactgcaatttggagtgtcccataaattcctttgaacttaattgttttttttttttttttcatggctaagtgttttggggaaacatttagagagaatcagtagctattggtatgtcattgccagaccatgagggcaaagtaaggtttcatcttctctataaaggtttttggaaggtgaaaatgttatgttggaattaaaaacaaaaatgtttggggatgacaggaatggccagagagtagcattctggacataaagtgtcatggggatcaatgcagtgtgggagaatggaaaacgtgggcctttagaatagacagtggaaggttcatccagaaatcatctggaggccttcagagaagcaaatggtgatctgttgatctataacaggtattggtagagagaagattggccagtcagtggtgggagcataacaaatggaaagaaacatagacccatcaacatggagtactaatgctcctttatggcatgtataaccacctcttctccttttcccgtctttatttttcttctcatgatctttttggtttttttccttatcttttcccttttttcctttctctcttgccttttatctcaggtttttcagggataacacactgtgctgcctctgttgtggctgttagaatcaattatttgctgaccagcatgtattaggaatagagggccgggcacagtggctcacacctgtaatcccagcactttgggaggccaaggagggcagatcacctgaggtcaggagttcgagaccagccnnn

SEQ ID NO: 20659 - DNA, 501 bp, Homo sapiens
  misc_feature 501: n = A,T,C or G
acattttcatattctccacctttgttccttgccctttgccttcaaagatatgtagatgttccttaactccaaaaattataaaaacaaacaaaaaaactttaccactgttcattatcaaagttactattcatttatccattcaatatttagagtagctaacaagacaaaacaaaataattgctgctttcgtggcttatagtggggaagggtgataaacaccatgatgaaggagagaagagtgctattgtgggggcacaaattatggggatctgatccttttttttaagggaggcatcagggaaagtctctctgaggaagtaaggttgattctcaaaggacagatggcagagacccgggttaaggggtggattggcaccaggctgaagtctggtgctcacaagaaactaagtgacagcataggttggtatagtgtgtaagatcaccttattttcttcttcagggtaatttttgagaacctgggttatatttgcatcttactcn

SEQ ID NO: 20660 - DNA, 409 bp, Homo sapiens
actaagtctatcgccatgctgtgtcacgtgggcaggtcttcttggcattcatcttgaacatgacccaaatcctggctccatcttccctcttacttttcctttgccccatttttcttccttattttttatgtatgtttaccttgccctgtaggcgcatttgtaagctggctcaaatccttttgggaacaaggtgggttataaatgcacacgttcctacacaggatgttgttagtcatttcataaggtctcttgtggaggagattagccaatagcttcttttgtaaccttaggcacaccctccttccataagggtcaagtgagagtatgggtctatagggtctgtgaggggcccagcaactttgacaggctgagtattcttctatttccaacccggttagagtcacacagt

SEQ ID NO: 20661 - DNA, 561 bp, Homo sapiens
  misc_feature 507, 557, 558, 559, 560, 561: n = A,T,C or G
acatgattctacactgaatctgcatttcactcccatatctataccagaaggttatcagtggaagagaaattcagttatctgaatggacatgatcttctcaggagcagtcagtggttaattgggacaagaaaacacaagtcattatcattgagaaatctgaagcaaattgaggcaggttgtcacctttcaccaggaaacaaattagccctgtctttaaaaagacttctttctctctctgctgactggggattcctgtcaactgccaatgaaatagggagagtgtagattaatggcactgtaacagtggccatgaaacaaccataaagccgttttctaatttttatgaatatttttaattgattcgaccagtgtgtttgaatgacaaaatttgtgctaagcttcagctccggaaaatcagggtgccatcttccagctgaaatcagtaggtgcaccagtctgtttggggaaagttctgtgtataaagaaaaagccataaaataccgacanagtagctcttcctcttggctaatttaccttcatgaactccttgcaactannnnn

SEQ ID NO: 20662 - DNA, 586 bp, Homo sapiens
actaaccatatgaaaatagttgctaccttgttggacaggacagatatacaaagcatttccatttttacagaaaatgtgtatggataccatggaggtttgaaataaatgctgtgttcattcaaactatagtgaaatacagcatgtgaaaaagtaattacttattgactataataaatgcttcataaaatataatagatgctgattctggccaagattgacaaaatctaatgcagcctacatgtctcagtggttaatactaagactctgaataaaatacaagcaaataaacacctttgaggactttgaacagtaaataacagagggcgggtttaagggtaatcaaaacttgaagaaacatctatatggtagtggtgaatttattatatttttcttgcttatctcctaggctgtgacctaaagactatctcaatgggaaaatgtgtaacaggcaaatttagcaaaacctatggggaaccacatatttcttggctatagggcaaagagaaaggccctatactagcaggagaaaataggaagaaacctttttatcttttctttctctagcaaccatgtgccattgagctgt

SEQ ID NO: 20663 - DNA, 1244 bp, Homo sapiens
  misc_feature 1, 2, 3, 4, 5, 6, 7, 8, 9: n = A,T,C or G
nnnnnnnnnctcccagttttcatgcacagacagattggaattactgttataatggtataatggaagaatgaccacccagcatttgatgtgctttgttggttttgttgcttgagatttattgctacgattcatgatagcccaggcaaggtcacatcatgtatttttattttacactgtatagttcattcttctcaatcccactagatcagactctttgggatactaggattggcctatttgatggtgagctcactacatccatttagatgttgtgtccatgcaatcattttagttctcctagtttctacctatcacgttgtcattttcccttctttatcatcctgggtagctgagaccccacataaatatataccagaaaaatgttgtggtcttttctaaactctctgaggcatctgttgtcaatgtgatgttgttttttgtttccagtccaaaatatatcaaagtaaaatttaactccacttttgctaagtattcatcttgccttgagtactaagattccaaaaatgactttcccctctgaaaaacacaggatttccttgcgaaaacttgctgggccactgccaatcttcccagaaactcctttttccttatcgttgaggggaattggggaagtgatcactgacggttgaaattcagtagttttggtctcagcttaagctgagaccctgagtcttctgaggagtctactgctccccagtgggaaacacctgctgtcaaaattttcctgcttgcaaagagcacttttgaaattaatggcaggggatgaatatctggctagtgctgtgctcagctgagttattaatagggccttctgagtcctctctacacatcatctttggctgaattagctgtggtttcagcacctgagagtctagcaccactaaaggcagggaatacctttgccagtttctggcatattaacagctgagatcagataagtgaacagcgatagaggtagtgaggtttaggattcaggtctgccaccgggagcgcacctctgggctcaggtctctcatttgtaaaatgggacatttaggtcagatcagcattttcaaaagtgtgacatgttagtaaataagatgattttatgtggttgacagatgaatgtattacctttagtggttatatgtttattttcatggttacttttatttataataaattttgtgactagctaagaatcaattatctctttaaaatatatttaagtttaaaatgtgggc

SEQ ID NO: 20664 - DNA, 331 bp, Homo sapiens
acaaatagggtcacctactctcaaattctgcggttcaaattgtggttggagatgagatgttctatttctgcatctctcctggaccatcttagagcagtgcaaagtttactggatcttccagtgcattattggcccttggtgtgatgacgagagagcaggaaggaggtctccagctccttttctgagttcagatgttccctagcccaagaagactaatcatgcacctggtttcctgctctgaaaaataagaagtgattttggcagcctttgaatctggatggaaggtggttttttttttttttcagtaacaaaggtagttgtgtatgtatgt

SEQ ID NO: 20665 - DNA, 410 bp, Homo sapiens
  misc_feature 408, 409, 410: n = A,T,C or G
actttataaatttaatctataatgatgtattagcaatcatagggaacaccatgatggtcagtgttcagacttgatgaagactgaagcatgagagagggccagacagatattgtggagtccgtgcagctttctactaatttctatttaccaataaatatgcctgggataatataggagaattatagaaaggaacaaggaaactaatcaaggagaaagtagagggcggtttccaatgagagaatttcatctgcttctaatctaaaaaaaaaagacattgacatattcaatttgtagtgtcttatataacagttcttcagtaatgtaaagaactatttcaaggtcatatattagcatttggaggaatatcaaaattaatatattcaagataacagaattaaatcagtatannn

SEQ ID NO: 20666 - DNA, 353 bp, Homo sapiens
  misc_feature 352, 353: n = A,T,C or G
actatagttagagacttgtagttgattttttccaaattgatctgctatttcttggagctctttaatttaaaaacatttaataacttttttattaggcagctaatcagtttcactgaggtagaagagttggaaggcatggaaaagtataaaactttattttgaattagttggatttccatggttatttaaaaactaggcccacctattttctaaggcacttttcatttgtaatatcactgaaattgaaattccttctggtttgttagaactctgataggaaatggcagccagaagaataggaaaatttaccttcaggactttctgccagataatattgatgaatattttaggnn

SEQ ID NO: 20667 - DNA, 275 bp, Homo sapiens
cggccgcccgggcaggtgtacaagctagcttgagtcgacccacgcgtccgggtgcacctgtggcatgcctgagaggattaccttgatcacattatttaaggtaggaagcctgcccactatgagtagcatcattccctaagatgaagatgagatcttgtataaaaaggaaaaaggtgagacataagagagagtgggagtgagatcagatgaattagaaaaataaggagaaactggactgagcaaccagtattcgttgctgtgaaaattctttatgt

SEQ ID NO: 20668 - DNA, 860 bp, Homo sapiens
  misc_feature 1, 2, 3, 4, 5, 6, 859, 860: n = A,T,C or G
nnnnnncggtggcggccgaggtaccagtaaatgctgcctcatcacctacacccttggtttacttctcagataaactcaggaagtttaaatggcattctgagaatctgtagctgcaacatagtgagcccaggagtcccggtccagcagctagtattaaattctctgttgctagcttggacctctctcgatatctaggaattgtctgcagtgtggggtggcacagtaacaaccatttgtttctcaacaagaatctgataatgttgcttgaacctcctgaaccagtgctgcatgctctgcttcttcatatgtttgtccttagatttgaccaaaaacaataactgataatgtaatacagattccccagctccctgtgagctgggttgagcccaggaagtctgtacaagagagcatgtctactgggatttaaatagcccagaaacaggcagccggaatttcttacactcttgtgctctaaaaaaaaaaaaaaaaaggaagaaagaaatagctctttggtgccccctcagggatacccagcaagcaggtcccacataaataatgtgtaaatagtctgtgagatactggggtttctctcattctggaattggaattgataacttttgacagaaaaaaaaaagtaaaattctaatctcaaaaaattttgtgttgacatgggtttaccccatcttccctcaatttgtaagtagaaatatttcaccaatactttctgtacatcctaccagatatttctgtgggcaaaggatatgcaccatataacatgtgcctaagaattaacagcctattcttcaaattttatgcttagcattctcatgtatactgtgtgtatgttttttttagacann

SEQ ID NO: 20669 - DNA, 507 bp, Homo sapiens
  misc_feature 507: n = A,T,C or G
ggcacccccaaataagcctcagttcccatatttaaacttttttctcataggaaagctacaggaattttaagatatcacatggttacatttgcttttcttccagatggagctaaattgctatatgatacagggtttattttatatttctcatattaaagatgaaaaagtgaaaattgagtagttgactcaaaattatatgtatatatatatatatatgttaacagttgaatacaaacaagattacaagcagtgaaacattcaaatagttttggcaactccaaatattttgtgtttcacaaaaggagttaggttaacttttctaaatataactcattttatactattttaataaggagaaacttaaggatgagaaggcatgaggaaaagtatacattagtgaaagctatatactaaagcagaccttcaacaacagctcataactaataaatgctttgtattttgttttcaagcagttatgtaaatcaatttggtgatttcttacactgn

SEQ ID NO: 20670 - DNA, 605 bp, Homo sapiens
  misc_feature 604, 605: n = A,T,C or G
acatatcttttatatgctcatatgctcctgtagtcgttagttttaattcttaaaaatgtgataattgtaataaacttttattatatcttatgtaaaataattgtgtgtctgagagagactaaaactcatgccctacttctcatgatttctctttctcttttgtttccctttcacagacagaagaattatagcctcagtatttatgtatatttttgaaagagtgaagtggggactgagaaggtatatctacatgctatgccttttgatagcattctgtttcaaatctccttttctcatcattgactggaacacagttgaaaaaatattaaactgattttgtgacgatgaatttaggaattccagttagctaaggattagaaaaactgattttcagaggcatactctgatccagaatggggctttaatattgtattatactgaaatataaagcagaggtctactaaaatctagagtacttgagcaccataatactcatctcagtcagttgaagtattcaggatcaatgataaagtccattcaggactcctaaataataaacattttttaagaaagtaattatcagtaacctctgggtgcctgaccnn

SEQ ID NO: 20671 - DNA, 536 bp, Homo sapiens
  misc_feature 536: n = A,T,C or G
acttaattacctcaaaagaaaactgtcaacccaggaactaaagtttatccatttggacttacaagataaccttaataccccattgccactgtatccgatgctgtcagaggcccacctacatctccccctacactcagcatttcagtgcatactgatagaattgtgccatcacctgcaaatacctctttagggcacgccagaagtgtgcaggagataacatatctggctgaaactttcaatccctgacagaggggatttggcatacaaatacttcgactttctcacccactggtggggataaccctgaggaatgttcttcagggttccacaggactcctctgagggacttgtaacagttccccccaagagtaacctgttcagtgctgtgcctctcttggctttctttcatgcctctattctcaattccagctctactcctgagtttccttgctcactttccaggaacagtttgaattcaaattcttctctcaggctctgcttctgagggaaatcagtctaagacaatcccaaatcan

SEQ ID NO: 20672 - DNA, 587 bp, Homo sapiens
taggtacaatgggcctacgataatgacatagtagacgatagtgaaattgcatataaatatgcacaattggcagacactaatagtaatgcaagtgcctttctaaaaagtaattcacaggcaaaaattgtaaaggattgtgcaacaatgtgtagacattataaacgagcagaaaaaaaacaaatgagtatgagtcaatggataaaatatagatgtgatagggtagatgatggaggtgattggaagcaaattgttatgtttttaaggtatcaaggtgtagagtttatgtcatttttaactgcattaaaaagatttttgcaaggcatacctaaaaaaaattgcatattactatatggtgcagctaacacaggtaaatcattatttggtatgagtttaatgaaatttctgcaagggtctgtaatatgttttgtaaattctaaaagccatttttggttacaaccattagcagatgccaaaataggtatgttagatgatgctacagtgccctgttggaactatatagatgacaatttaagaaatgcattggatggaaatttagtttctatggatgtaaagcatagaccattggt

SEQ ID NO: 20673 - DNA, 2553 bp, Homo sapiens
ttttttattttttctgcttcaattgtttttattacaagcacattatcaaaacgaacacacaccttaaagctgaaacagcataagtcaactgctgccgcagtttcatggatgtacctggggtacatgctccctcattgcgaggcaggacgtaggcacatgactgtgcatttaggcatatatgtgaccaagaagaaggagagaaatggaaaacactggagaacagaaagtatcaggaacttttcatcaggcaatcccaaagcgctctgctcttttcctcttctttgcctctgtatcctctgtggttccagttccagctgaacttgtgacaatcccaaatcgctccttcctctttttcagtttctcatcatcttcagactttctggagattgaagagacattcaaaccaaatctttgagctctttccttcagcttatccaagttaaccataggtttgttatcagatgacagaccttttgttggaactgaagaaatcccaaacctagctgcccgagcagctttcttactctccaagctcacaggtacattgaatcgttcagccctcttctgcattctctcagtctgtggtatttcagatgtaattttcaccactttcttctctgctgccacatcaacagtttttttcagggggttcttcctctttgacagggagctcaatgggctttgtttcttcttccatgttcttcaagatatgcctggagaccaagggaataaagcaagatcttatccacagactccaggcatatcttgaagaacatgctgaagaggaggcaaatgaagaagatgtactgggagatgaaacagaggaagaagaaacaaagcccattgagctccctgtcaaagaggaagaaccccctgaaaaaactgttgatgtggcagcagagaagaaagtggtgaaaattacatctgaaataccacagactgagagaatgcagaagagggctgaacgattcaatgtacctgtgagcttggagagtaagaaagctgctcgggcagctaggtttgggatttcttcagttccaacaaaaggtctgtcatctgataacaaacctatggttaacttggataagctgaaggaaagagctcaaagatttggtttgaatgtctcttcaatctccagaaagtctgaagatgatgagaaactgaaaaagaggaaggagcgatttgggattgtcacaagttcagctggaactggaaccacagaggatacagaggcaaagaagaggaaaagagcagagcgctttgggattgcctgatgaagagttcctgatactttctgttctccagtgttttccatttctctccttcttcttggtcacatatatgcctaaatgcacagtcatgtgcctacgtcctgcctcgcaatgagggagcatgtaccccaggttcaagtgctggattgtgtcatgtgaccatcccaaaactcagagcaccctatggccgtctttgccctctgtcacataacttgaaaactgcctgatggcctttttgcagtggttccctccaggaagccttgatctcagttgaagaagttctttcctggcattccaatgcccctgtcagctccatactcctcagacacccttaacaaaggctgtcatgcacacaatgtgacaaatacacaaaataaatgataattacactaataatgatatgttcagaggggcactggccaggtccacacacatcataaggtgggagggggtgctaactcccactgggttgctgagctgtgccccccaagtcccttcactctgtgcctctttgggggtagggaggaacaggggaatgagacttcagctcacagatttatgttcataagagaaagacccctgccccccccccacccaccacacacacacaaaggtctttatttggtggtatttaaggagctgtattctaagtgtcccccatatttaatgccccagctctctagaatctgtagagggaagatacctgatgcttattgcccaatccctactctgccaagatcacgaggcatttgaccttggagggaggtatctgttcttcacttctctgttcctttccttccaccaaggaaatgtgagtggtgttgatggccgggtgtgtcttgtccttcaggattggggcagaaggaaggatgaagaacagggccagagaggcttggggttagcatagctgctatatgggtgaaggcaagctgaagagcctaacagccctgcccattcctctactgaaagatcttgtttcactttctcactataagaataggaataagatgttaaagctcaccaacatcaccttctcaagggtggtcacatacctttgccccttccaccaactggccaagggggagagtcatgctcttgggaagaatgagccatccagttttgctcaccagcttgggctttactttagttcagtactgtttttatcagacccgtaactgctggctctacttagagtgacagttttgctgaagattcttacccccacctctcctgacatcctctaagctcttgcctggagccaagaggcctggtggtgaagtaa

SEQ ID NO: 20674 - DNA, 2689 bp, Homo sapiens
  misc_feature 1, 2687, 2688, 2689: n = A,T,C or G
nagaatcttaaattataattatttcttcctgtcgcttacacccgaggtgggggagttggggtggggggaaggtaatctcccaagttacattaaaaggcttacatatgtttgataatagcatatgtaaactagaactctgaatgatatccattggtcataatacgtactatgtagcggtaatggtgacttttgtgattgcacaagtctagagatgccccaaatgacattgacttagacatctggttattctaaggctgaaactgaagttgaatagaaggttttagtcaaatactgagatgaaaactgaggcagtcctggcgggggggagtgagtgtgtgtgtatatatacacacatagacatcatgcttctaaacatttacagaaagaaagggtagattatctacaaaaaaataagaatcagactgatatgagatcttacaaacctaacccccttctctttcctaaactccagattctcatatttctgacttcctatttgatatttacacttcgatatttaccaggagtcttcaacattttgttcaaaacagtactcttggttttcttcctccaagactactccttactcatatcagcaaatagcagctcttttcaagtgctcagtgtaaaaacctacaattaatccttgatttctctttcagtcagcctatactaaatcaatttcatttaaaatatctcggctactactctgcatctccactgctaccatcggcctctccagtcacattctccaagagcactctatctcatttaaaagacaaaatctctgcagtggcctgtgatgctccttaatggcctacataatccagccctcaagcacctccgtgatctctgtaaaactttcccttggtcactgtgcttcagccacattaaccagcttgcatatttctcacattcaccaagcttgttcctgccttggggcctttgtacttaccatgttctgttctgagaatactctgcctcaagatatcctacaactatcttactgtattcagctctctgctcaagtattaactgatgaaacctgtcatccctactccactccatgttctgctttacttaacagcaattgcacatatggccccctgaataatatacatttagtcacttatttttacttatctgctaattaaaatgtagactttttctattctgtttactgctgtattcccagcatgttttatccgaatgtgcagtggtttcttttcttctcccttatcgtgggaagtgatgtgcacaaatacacataatggagcctgaatgtcatattgctttcatacctgtgtgaattttggtaagaaaggaaaagtagcgattgacaggtaatataattacattaagtcactctcatagttagctgtttattgctttcctgctcttattctcagtccccaggaccaaatgttgaccactaccttcccccacatataattaggttatttaccgaacgccatgcaggtggctgttaaaaggaagatatatacttaccttataaactcaacttttccctgttgtctttctgtctcacccctacctccatgctttaaattaacttttcaggcttaggccttatctctcagtagagccatataaggtatgtgtaaaagcaggaaaatgtttcctggggatgaagctttgaaaagcttttttttttttttcttttggcaataaaataaggtagattcagcacaatacctaataactaaaaaatctgtttttaattgggtggggcagacagcaagtgtgtcatcctggaagatactatttgggattttatgtaggtacataagagaaaaaagtgaacaaaagcaaggggctaccaggacgccgcagtatgcttaacatgtattttctaagtttgtattatgcctttatcttggtacttttatcttctgttctcacttgatctttttgaaatgtattttaaatcctaataaaaatatataaagtctggaattaataaaggattaaatgaaacttttgtatatctcactgaaattctcagaaaaaaggggggtgtggggagggggaattgcctggggtagtgagtgaaaattgtgaccaggttcttactaaggaatatggcaactgcataatcaaatgtcagtggttaccaaacttatgaatcacctggtgttgggtcataaattgtctatccttgcctctcgcccccagtgatttagatcagtggaactatgtggggtttaagaaatatacaatatatatttgtatatatttgtgtgtctcgaaagcttcagggttaaagtagttttaactgtttaggaaacactattgttttaggtatccagtctcaaagacgaaggcctttaaaacttacttaatttttcattacatttcttgcccagaaaattgtaaaatacccaacgataacaatggggaattgtctatcagcacttgactaaaaagctttactatccatgacagcagcctttgcattactcaattctgatggcatttaacgtcttgaaacccagaaataaatacctatagactcacagtacctgaaaggaataccaaattgagacaagagagctatataaaccaaaaattgcttcaaccacagaatggaggtctacaggtgcggaaggaaagtttatatggtgaggctttatcttatattcctctcccatcatctgcaggaaaannn

SEQ ID NO: 20675 - DNA, 749 bp, Homo sapiens
  misc_feature 1, 2, 3, 101, 749: n = A,T,C or G
nnngagaccactggagccaaggcaaaaaaaggtaacatgttatctttttatctgaaagggggagaaaagataattcaaaggaaattagaaaggatactaanatttccttaacgtctactgtgtgatataagagaaagtgtccttaacactgaggcaggagaatcacttgaattcaggaggcagagttttagtaaaatcaaatggttgtcaatcaaactgacataatttcatagtatgtactatgtacatgactgtcctaacaaaaaacaaattgaaggcagaagtagatttttaattggctgtttcatctttcataaaagctaagaacatagtagcagaatgtagctttctggaggtgacgtgtagaggggcctgagctgaggtccaagtattttgacttgctcaaagagtagattcagaattcccagtgagaggggaggagggagaatgttccttaaactgttttcctaaacatctttaaaaacaaacaaacaaacatggtttttaataggagctcaactgcaaatgctaacaggtagtattttctgttaaggtcccgcggcatgcaaatgtattgagaaagattatactaaatatttttctcttattcaaccacaggttttcagaatattggattttatagaacaaaatttccaaaaagaattttgagggctccatggatttgtccactttttattgtcaagtgagaacaattttttttttttccacaaaaaagactactatctaan

SEQ ID NO: 20676 - DNA, 500 bp, Homo sapiens
  misc_feature 500: n = A,T,C or G
acatgctagtttatgttttaggagtttagtttctatttctctgtttagctaattctctatcttttggccactccttttttattcccctcaaacagtcgctttctcttcccatctctatagcaacttgtaatatactataggaataattatggcacatgcaacaatgcaacaatttaatatataagtgcattacatttcttatttttatttttcttaaaaaaaattacccgggtatggtggtctgtgtagagatggggtttctccatgttgcccaggccagttttgaactcctggactctagcaatccacccactttagcctctcaaagtgctgggattacaggcatgagcagccacatagctttcttagcatgccctttgtatgatcccagacctaagtccaagggatttatcaatgatacgcatccatcttcctaaggggaatactactgccaagatttctgcgtattgtttaaaatgtctcttgaaaaaaatatctan

SEQ ID NO: 20677 - DNA, 825 bp, Homo sapiens
  misc_feature 1: n = A,T,C or G
nctctgccgacgtcagcttttgtctccagtattttcgggggctggtggacgcgtgggcgatagggtgctgtccttggggtgctgtgtatatgggatgatgacgcttatcagcattatctagtcctttccaccccgaaattcgccccgattaaagactgtgttgcattatcaggtaatgagatgtgagggagggtctttgaaagtggaaaacctgggcgtcgaggccactgtgccatcttggggcctcagtttccttatctgtgaaatgagggtgaatgtaaagctgctatgtaaaatgtaaagctctacataaaccactctctgcattactttggatatatgagaatattaacgtttgacgtctacgagactagatcccattcgagcatcacctcccataaccttacagactaacccctcttttaaatctcaggggttcgtaatcttacagactaacccctcttttatgtctcagtggttcttgcagctggcttttgtttcattagttctcaatttctgtcactggtgtttgtactttattaaggaactcttaatggaataggcttttgggtttttctagtttgcaggatgatgaaaaacatggctgctgtatttggtggctttcctgagtttattcatatagtaacaggtaacttcaaaccttcaggggtttacagccacagaagtttatttctcactcacgtgatctgtgggctgggagatggctgtggctctgtgctccatgtattttcttcattctaggatccaggctttcgtgagtaaatacagaaagatttttgtaatatatcaactgtttaaagtttg

SEQ ID NO: 20678 - DNA, 584 bp, Homo sapiens
  misc_feature 581, 582, 583, 584: n = A,T,C or G
gagatggggtcttgctgttttgcccaggctgatcttgaactcctggcctgaagcaatcctcctgtataggcctcccaaaatgctgggattataggcatgagctactgcaccctgcctcttgtttttaagatagattcctcatgctaacagaataagctattagccacatttctacaaaggtgattttaagtcaggtttattctctaaaaatgagaggcattaaaacaaagatagttctctaacaacaacaaactaataatttaaatttttttgctgtttactttatgaatagggtagaatgtcaacatttaatttttatggctaatagtctatggaattaataatattaagagattataaacgttgctaacatacacacaaggaataaatcagttttctacatagatagctgaattgacttgttaattttggaaaagaaggaataaaagcagaaaaataaatttggaaagaattttaccataaaattagtttttttctgaagaaaaacgtcagcaaaagtaccttttgtgtatgtgtgtttgatttagtatgggaaaagatatgcatcttatagactggcnnnn

SEQ ID NO: 20679 - DNA, 953 bp, Homo sapiens
actcacagccaggcagaggagtctgacagacccaaggattagaagccgtgtggttgccccttcccaagaataacccttgcttgggtgtctgagactgcaagtataatcctgcatcagaggagagagagcagggagctggggccagggcttgtggctgtagacacaagtggaagaaaccccagatctcttttcttttctagggcacttcttgctattgtcatttgaaaatgtattatttgaataatgagggatgtctttctcctgcaggactggtagctccttggaggaagggcctactggtcttgcatctgtctccctaccccaaggccaggcacatatgggaactatttgttgggtgtgtgtagtttcaagttctgcctctacccctgcctagtggttgcccttctgcaagccacttaaccctctatgcgtgtttcctcatctgaagcacgcaagtcaaatgatctgtgtgtgcctccctctgcctctggacccaatctgttcatatggttgtattgaagctaatttcatccacatacaagaatgtctagagctagcatagtgtataacatagccatcatttccaggatgtagatactctatttccattaactgattattatttattatttcagactttaccctgctttctctatagggtttttgtaaagactaagtgaaatgatgtataggaaattacttcagaaattataaagtttgtataactgaacaatgattgttattgctggcccaaagataccctcctgagaagaaactcagacccaaaagacagcattgcagaccaagtattgtaaaacatatgtgtggctagccccatcaaagaatgtatttcccaagttagtttttcattttaaaaaaaaaaaaggaacccctcaaaaattttttttaatttttaaaatataaccttgactctctctctctccctccctccc

SEQ ID NO: 20680 - DNA, 2931 bp, Homo sapiens
acaaaaaaacgtagttggtttagtgatgagaatgtacaactctgggtgtgataaatagaccaaaggataaaaataactgtttcaaaagtatcagctatggtgtcagcctgctgtgttagatggaaggcattggagcttagcttctcatgttttcttgtacaaattggctttattcagatttgtaagagtgtcaatgtaaaactctttcttactggaatatcctttacagaaggttgagatagtcatctgagcctttttaaaagaaaaaactgcaggtgaaaaaggagttagttgatgtgaaagttttagtgaaattctgggttgtataaataagttgctaggaattggcaaggtagtgaagtggtgactcacacaggtaatgtaattgttagattttttagcaaatcaggaatatgtcaatataagtacaatgttgaattcaaacaatctgttgaattaaattctgttgattagaataactctaatttaagaaaaattccaaactgtagatttatttttctctgatcagtaaaaagaaaatgagttccagcttgactttagctgttcaagtgagaagtctgaggaagtgcatgttaatgagccagtgacccataggtagctgggttaaagacactttggatttggataatccgggaagcaattaatccctaattgttgaacaggcagtcctgggtaaagaggacctaaaatgctgcactattaacagcattagacggccaggtttgtacttcatagttttaggctgtcttcttcacaagttttagaaaaagaatttaggagctagagccctggtgcaggatcaacagcagctcatactcctattttaaaataatttggtcgtggcctcccttcagttttaatgtggcactggtaaatctacctggttctggcatgcttcactttgatttcctgctatcctctactgcttgcctctaaatcaaggtaaagagcagagcaggtatgtattaatgtcacattgtcttgattattttaaatacttaaaatatacatgttaaaccttggtattagtttcacaggcagtttacttttcagtacataatttaacaggagtgacttggtgggagtggggctttaaactgaaaattggaacaacagcatgatgtggagaaaagttgtgcagcattaagaagtacatgcaaaaattaagtaaccaagttttgtctacatagcagatatgtttacattggatgtcaaaagtaacacagtatttgatataattacagataattgtgatctacattttaaaatatcaagagatcgtctcagtgcttcttcccttacaatggagagttttgcttttctttgggctggaggaagagcatcctatggtgtgtcaaaaggcaaagtgtgttttgagatgaaggttacagagaagatcccagtaaggcatttatatacaaaagatattgacatacatgaagttcgtattggctggtcactaactacaagtggaatgttacttggtgaagaagaattttcttatgggtattctctaaaaggaataaaaacatgcaactgtgagactgaagattatggagaaaagtttgatgaaaatgatgtgattacatgttttgctaactttgaaagtgatgaagtagaactctcgtatgctaagaatggacaagatcttggcgttgccttcaaaatcagtaaggaagttcttgctggacggccactgttcccgcatgttctctgccacaactgtgcagttgaatttaattttggtcagaaggaaaagccatattttccaatacctgaagagtatactttcatccagaacgtccccttagaggatcgagttagaggaccaaaggggcctgaagagaagaaagattgtgaagtttgtgatgatgattggcttgccaggagctggaaaaactacctgggttactaaacatgcagcacagaaaatccagggaaatataacattcttggcacaaatactattatggcataacgattgcatgcgtggcaaggtacacaaaagcaaggccacacgtgagacagcaatacactggaacacaacctggaaccaccacctgatgagcagcagacagccccacacaagaggtcataggcacaaacatcagtagcgcagactgcgcagaccccgacaagcaagccgcaaaacaccaacaccactggaatacaagaaaccaaaacgaaagacatgcctgaatgacacaacgcaggagcaacacacaaatgagccatgataaggacaaaaaaaccacgacgacaaaaagccagaaggacaacaaagacacaaaaaagactgaacacacaactaaggacaacagaaccaacgagaaagcaaaaagaccagaaaccagagcacggcgaaaaaagcaccacacaagcaacacaagagcagaccactcccaaacaagacacaaggacaaaaaagaaaccacaccaccaagaaggaatggcaagaagcagcaatacagaaggacaacgaacacagaaaggactgaaacacacaagcacagaggaagaaaaagccccaaacaaaacatcgttagggacaaaaaacaaaaaggacacacgacaaagcaaccaaaacgggacagagaacaacacacgtatacgaaatacgatagcccatggaacgaacaacaacagaaaaacaaacaagaggtgtgaaacgacacaaacaacacaacaacagaaaggaacaaaaaagaaaaagacaaaaacaaacacaaaagaaacaaaacaccaccgaataacaacacagagacacacacgaaaaacacacaagaccaacaacccacaacacaagctaacgaacaacaacgcagcaaagaaagcacaaacaaccaaaccacacaaaagaacaaaaagaaacaacacacaaaaacaaagacaacagaacccagattcaaa

SEQ ID NO: 20681 - DNA, 460 bp, Homo sapiens
  misc_feature 451, 452, 453, 454, 455, 456, 457, 458, 459, 460: n = A,T,C or G
acagattgaggtttgtttatcctttttaattccagtttgttcttggctttcttagttctgaaaattgaaatctgccttcattttcactgatgcctgtgttgtaatgtgtcagtaaactgggtattcttccaagcagttggttgattccaggcttctgcatatctttgtgctgttctggaatttgttttctgtccatcaccgcatttacctgcccatactctgaggctaacatatccagaaacttttaaacttaacttccatttttcagaacagccatctgctttagaataaatgatttccgtttatccagagaaaagtaactaggtcttagagacttcgtgtattcgtccgttctcacatgtggcaaaatatggtttggtttttcttttttttttttgaaagtgttatttcttcgtccttttggtttaaaaaagttcacgtcttggtgccnnnnnnnnnn

SEQ ID NO: 20682 - DNA, 887 bp, Homo sapiens
  misc_feature 1, 875, 876, 877, 878, 879, 880, 881, 882, 883, 884, 885,886, 887: n = A,T,C or G
nacaaagacttcatgtgacaccagtacgtaaaagccactagtttgggtgatccaagtgtacttagcactggttttcaagctgaaaagtaagtataagtcagcaataaatagttgccatttatgaatacacaggacaaagaaaattgagcacctagtggctgatgtttgcaaaatattaaataacttaagttcattgaatacaattagagtcaaattaatgaagcttagagatctagtgttatttaaactactagtagtgggccaagtgttgccattaacatttttttaatgatgaaatagaatagtaaaaatatgtttattttacctaataggttcattctagctttaaaaaaagtgttgtttcatgaagcttttgtgtattttgcatatatagataccccagtgtaaactgtatttgttactttggctcatagtccaaaaactcttgaaagccactaatctagcccagtgccttcatttcataggtggcaaaattaaacctatgggtcatctgatttgccaaaattcactcagggagttagtgataaaatccttggggcttcagactccaaggccagagattttttaaaaaacaaaccaggcgggacatggtggctcatgcctgtaatcccagcactttgggagactgaggcgggcggatcacctgaagtcagagttcgagaccagcctggccaacatggcgaaatccgtctttaaataaagtacaacggccgccacagcatggtggcgggtgcctgtggtcccagctgctctggaggctgaggcaggagaattgcttgagcccgggaggtggaggttgcggtgagccgaggtcggcgccactgcactccagcctgagcgacaagctcaggacnnnnnnnnnnnnn

SEQ ID NO: 20683 - DNA, 610 bp, Homo sapiens
  misc_feature 1, 2, 3, 4, 5, 6, 7, 8, 610: n = A,T,C or G
nnnnnnnnacagatggagaaacaggtgaggaaaggccacagagctaaaaagtgctggagtcataactggaaccccagctatctgaccccttatttgtattgttacactatgaataaagtttttaaaatatatatatttttaatagagagtagccccaagaaagcactaaacttctggagcttaattttcggggaagcctccattctaaccttgtccattctgttgcattccccgtgagcatccttaatctagtttgagctgggtttttggctattttcaactttcaaccccaaagtgcttggctaaatagagaatggaaggagactttgaaggcttgcatgaatacttaaggcagagaggtgaacaccagctgcaaggcaaaagaagggagatttcttcctgcgagcggctaggcgaggcaagatggcagacctctgagggccttctgcctgtcaggaggtggctgaaataccctgacagctcagaactgtttgcttgaagtaacttcactgtacgaaaataagaacatttgagaaagtatttgatgagtattccaaactcagtaggggagtagaagcagtgaagtaatgggagcaaattatgtatacan

SEQ ID NO: 20684 - DNA, 3518 bp, Homo sapiens
gcgcccgcggacgcgtgggcgcgcccgcgccgctagcatgaccgacgcgctgttgcccgcggccccccagccgctggagaaggagaacgacggctactttcggaagggctgtaatccccttgcacaaaccggccggagtaaattgcagaatcaaagagctgctttgaatcagcagatcctgaaagccgtgcggatgaggaccggagcggaaaaccttctgaaagtggccacaaactcaaaggtgcgggagcaagtgcggctggagctgagcttcgtcaactcagacctgcagatgctcaaggaagagctggaggggctgaacatctcggtgggcgtctatcagaacacagaggaggcatttacgattcccctgattcctcttggcctgaaggaaacgaaagacgtcgactttgcagtcgtcctcaagggattttattctggaacattacagtgaagatggctatttatatgaagatgaaattgcagatcttatggatctgagacaagcttgtcggacgcctagccgggatgaggccggggtggaactgctgatgacatacttcatccagctgggctttgtcgagagtcgattcttcccgcccacacggcagatgggactcctgttcacctggtatgactctctcactggggttccggtcagccagcagaacctgctgctggagaaggccagtgtcctgttcaacactggggccctctacacccagattgggacccggtgtgatcggcagacgcaggctgggctggagagtgccatagatgcctttcagagagccgcaggggttttaaattacctgaaagacacatttacccatactccaagttacgacatgagccctgccatgctcagcgtgctcgtcaaaatgatgcttgcacaagcccaagaaagcgtgtttgagaaaatcagccttcctgggatccggaatgaattcttcatgctggtgaaggtggctcaggaggctgctaaggtgggagaggtctaccaacagctacacgcagccatgagccaggcgccggtgaaagagaacatcccctactcctgggccagcttagcctgcgtgaaggcccaccactacgcggccctggcccactacttcactgccatcctcctcatcgaccaccaggtgaagccaggcacggatctggaccaccaggagaagtgcctgtcccagctctacgaccacatgccagaggggctgacacccttggccacactgaagaatgatcagcagcgccgacagctggggaagtcccacttgcgcagagccatggctcatcacgaggagtcggtgcgggaggcgagcctctgcaagaagctgcggagcattgaggtgctacagaaggtgctgtgtgccgcacaggaacgctcccggctcacgtacgcccagcaccaggaggaggatgacctgctgaacctgatcgacgcccccagtgttgttgctaaaactgagcaagaggttgacattatattgccccagttctccaagctgacagtcacggacttcttccagaagctgggccccttatctgtgttttcggctaacaagcggtggacgcctcctcgaagcatccgcttcactgcagaagaaggggacttggggttcaccttgagagggaacgcccccgttcaggttcacttcctggatccttactgctctgcctcggtggcaggagcccgggaaggagattatattgtctccattcagcttgtggattgtaagtggctgacgctgagtgaggttatgaagctgctgaagagctttggcgaggacgagatcgagatgaaagtcgtgagcctcctggactccacatcatccatgcataataagagtgccacatactccgtgggaatgcagaaaacgtactccatgatctgcttagccattgatgatgacgacaaaactgataaaaccaagaaaatctccaagaagctttccttcctgagttggggcaccaacaagaacagacagaagtcagccagcaccttgtgcctcccatcggtcggggctgcacggcctcaggtcaagaagaagctgccctcccctttcagccttctcaactcagacagttcttggtactaatgtgaggaaacaaacatgttcaggccccgaacatttccggtgctgactcggccttaaacgtttgtgccataatggaaaatatctatctatctgttctcaaatcctgtttttctcatagtgtaaactcacatttgatgtgtttttatgaaggaaagtaaccaagaaacctctaggaattagtgaaaaaagaacttttttgaggtgtgttactatactgctgtaagttatttattatataaagtattgtaaatagaatagtgttgaagatatgaaatatggctatttttaatggtgacaattatgacttttagtcactattaaattggggttacctatatcagtacaatttgtagttgtttccaggtttggctaataatcattccttaacctagaattcagatgatcctggaattaaggcaggtcagaggactgtaatgatagaattaaattagtgtcactaaaaactgtcccaaagtgctgcttcctaataggaattcattaacctaaaacaagatgttactattatatcgatagactatgaatgctatttctagaaaaagtctagtgccaaatttgtcttattaaataaaaacaatgtaggagcagcttttcttctagtttgatgtcatttaagaattactaacacagtggcagtgttagatgaagatgctgtctacaaggtagataatatactgtttgatactcaaaacatttttcattttgtttaaagtagaagttacataattctatattttaagtcttgggtaaaaaagtagttttacattttataaagtaaagatgtaaatgattcaggtttaaagctctatttgacttcctttttttgtttgagatagcgtcttgctgtgttgcccaggctggagtgcagtggtgtgatctcagctcagtgcaacctccgccccctgggatcaagcgattctcctacctcagcctcccaaatagctgggactacaaggtgccctccagcatgcctggctgatttttgtatttttagttgaggtgaggtttcaccatgttggccaggcgggtttcgaaatcctgacctcaaatgatccacccacctcagcctcccaaagtgctgggattacaggcatgagccaccacaaccgtcccactattttactttttaaaatgacattcctactgattgatttttatcttgctataagttcgatgacaccgtgaatctaataaggttcactgttgacacagtacaagttacatagctaaaatacatagcattgaagactaattttaaggattgacaagagtttattttctattgtgcaatatcttaaaggaagcacccacctttgggaaagtgtatctgctgctcctagggccatgcttgtatacatatttaaataaacatattcatttacccgaaaaaaaaaaaaaaaa

SEQ ID NO: 20685 - DNA, 555 bp, Homo sapiens
  misc_feature 1, 553, 554, 555: n = A,T,C or G
ncaaagtatttaggaattgatttcactcaatcatgtggtcaatactgattgtgtacctgttgtgtattatacactgtactgggtactgggaagacaaagatggataaaacagagtccttgatccagagagcagagtctagagttaggcaggcacacaaagaaatgataatgagataatgtgatatgtgctataatagaggtatgttccaagggcaacgggataaagcaaatgattctgtctggtataaaaggagaggatctcaaagacagcatcatgttaaccagctcttaagggataggctcacctacagagatatgaaggaagggaactctaaacagagggaatggtatcaataaagagatgaaggcatcaagtgtagtgagcagaaagaaatctgggtatcaggaataaagatatctaagctgagctggcatatgtagacaagagtaggaacgttcatgtggtgtaatgctagccccatgggctaatcagtgtttggggtcacaaggatgaagattaagagtgtttcatgtcaacaaaattttttggaannn

SEQ ID NO: 20686 - DNA, 827 bp, Homo sapiens
  misc_feature 1, 2, 3, 827: n = A,T,C or G
nnnacatgagcaccctggagatactaaaactcttattctgactaaatgtctttcaagagcagcctccagatttttctgcattcttgctaccttgttaacttgcagtgccttacagtttaccattggctgtcctgaaataccctcttagaactaagataatacaatttgaaatcatgggtagaaatcatgaaatcatgggtagaaataaagaaggtggaagaagcagctaggtttccaaagcagcaaaatgtcagatacattctgaagcagccagtttccccagtgtccccaccccaccccgtatggggctcacattctatttttctctttgtcctttttttaaattctcaagtattgtgcaacagcaagttgactttatctgctaatgttctttcagccttataacggcaacgacataaattgaaaaacactaaattagaaaaatcaggcattaatacttccagaaaaaactgtggtttcacttatagttgagaaaacatttactagactctcaggagcaactaggaaatgaatgtggaagttactcatggtagaccctggagaaggtgtttccctgtggaagtgcaccttccactctccagttacatcactctccacctacttcacctccttggaggggagtgcaaaatatttggttgggtgtggggggaattggagaggattgatcaaaaggtacaaagtttcagttaggagcaagttcaagagctccattgtacagcatggtgactacagttcataacagtgtatagtattcttgaaagatgcccaaagagtagattttaaatgttctcacttgaaatgaatan

SEQ ID NO: 20687 - DNA, 412 bp, Homo sapiens
  misc_feature 411, 412: n = A,T,C or G
acaagcatttggattcatagcccttagaatctactgtttccaaagctagtcgaatatcagaaaagcagcttggtaaagtgcaaataactttgttcagggaatcaggaagcacagcttagaatcccagagctccctctaactgtctgtaatgtaaactcaggtaattcccttcactaggtatcaaatgtctcatctataaaatgaagggtatatatgtgaccagtgatgctactttgacgtattttgagttaatcagagatttttctgctcaaaatctttggaagaaaagctactaatgggtggcagagagtggcaaacgttctatctaaactatagacctcctcctcttcagaaacctctgatgaattgtgctacatagaataaaatataaaatcttttgtatactttacnn

SEQ ID NO: 20688 - DNA, 523 bp, Homo sapiens
  misc_feature 392, 522, 523: n = A,T,C or G
acgcgggtttgtctcccaaaatgtgagaacctccattaagtccagaaacagttttttaaaaaggacactttttaaattttatttaatcactattcactcattgtctgttatgtgtcaggtcttgtgccaatattagaagcatagtgatatatatgacctggttccagctttggggagctcaaaatttagttgatgagacacacaatttcatcatcagaatgcaatattataggtgttaaaatcgaggtggataaagtggttgtttttctgtctttcagtttgcctgggagtcatacttcagaataagggctaaaattggggtctaagaaaggtgtgaataaggaaaacattaaatacttttacctaaaagagagttgggagagacagtttangggacaagttactgaataagaaaaattagtaagacgtcagcagggcatagagtggcagaagtaagcaagagaatggaaggctcacggagttcacatcccacaggaccgagaagagctgaggtgtggatcnn

SEQ ID NO: 20689 - DNA, 520 bp, Homo sapiens
acattcattaacatgggaaaaaatgaaatgctgattctgaattcccagtatgaaatcccttattgaaacagttccatctcagcatgagctttatgggggatttcataagaggccgtcctctccaaagtccccaaataaagcatctggggatgattctcctcaaattctcctcaaatgcaatgttaacctttaagaaaaaccagaagaaacaaatttaaaataccaacaaatgatgcctgttttgcatcattaaccgtaagtgttcacattgagaaatccatacaattgaaacataaaatctagtatctatctaaaaataaaaacaaaaatagaatggaatgaaaaacacatgcaactggagttattaagctagtattgctcttttgtattttatctttctgtttacttataatttctccctattgcacaataagcaatttatagtaaattgtagatcttatatatcactgcattccagccacctggcatttttccctaacatattagcccgataaatatt

SEQ ID NO: 20690 - DNA, 974 bp, Homo sapiens
  misc_feature 968, 969, 970, 971, 972, 973, 974: n = A,T,C or G
acagtagtagagtgagcggaagcacttttggctgaagtgcaacattagtgattgaggaagtgcaggtccgtaatatcttaccccaaaccctggggctcactgagcttccgagttcagagtttttcagaattgatgaacacatccagaaggcccatggggcagatacaccttagacatattgatgaaagtggagttggaattgggttgtggaagtcgtaggacgtgaattctaggtttcttggagtgtggagtatggtgtctaccgtttggaaacagagaagaatgacattatgagttttatttataaaataagaatttcttctttgtattaaaatagatttttatataggaaattttcattaccttcagtatcagaaaggcccccaaatctatttcaccgtttccataataaattgtgaaagaaagatttgattgggatattgtctttaaaaatgaaaccaaaaagtatgggaaaatactttaattttagagttaacaacatttatagttacaatcatgaagcaggtatggtgctgcttcatgagccaagttcataaaagaaaaaaaaatcagaactcagtaagatctgtgagacagatcattatttttcttattaacatattcatttattcagcaaatgtttattaagtgccaattaatgtatcagtggctgctttaggcactggagatatatggtcagtgggataaggggaagtctctgtcttcaatcctcacagatcttattttccataagtaagtgtacaaatacgggctatgaattaaatagagcaagataaagagatgtgggtgtggcttcagttgtgcacatggtgcccagaaatctgatagctccatcatggagtccttcacttgagacttcacagcaggatgtaaaaagcaacagccaggaaactccttagttttcccaaagtcctcccttaatctcgtttagagaattatgaaacacnnnnnnn

SEQ ID NO: 20691 - DNA, 531 bp, Homo sapiens
  misc_feature 530, 531: n = A,T,C or G
acttcctctttcttttcacttcatctttacgggcatattaatgagtggagtaaagcactcagaagaacagcaggaaaagaggattcatgtatgtcagaggagctgaaggctctcaataggttcagagaatgcaggtcttccagctgctgagggtgtatgcttccactatgcctcatagcaacccctgaacaaagtggggtctctaaagttctattaacaggctcaattactaaacacctttaaccagaaaatattccctctgggtccttttcctttacattccatgagttggagaagggaaggaattagtgtagtagttgaatgaatggctgaatgaaatgatacagttgatagtgtaagactctacaagcagcaaaagtcttgactataaaagatacttccttaaaactgagaagaagatattcatttttgtcccccactccccggattttcatctcttaaccattctccgcattcctccaaaatgtgtcctgtttggcaggatctcatgctctactttcttggtctann

SEQ ID NO: 20692 - DNA, 955 bp, Homo sapiens
  misc_feature 930, 931, 932, 933, 934, 935, 936, 937, 938, 939, 940, 941,942, 943, 944, 945, 946, 947, 948, 949, 950, 951, 952, 953,954, 955: n = A,T,C or G
acattcaaagccctgctccacaccttgccctggccaggtccacctttgaggtgatgacgacagttgctgagaaaagagaaaagaccactggctcactacttgtttctgctgctataatagagaggagaaaatgatgaaatgctctttttaccttcctgtttgaagattgcctggtcataaaagggagtcagaggtctgacttctctatttccatcccttaggggactctttaacaacaaaaagaatgtattacaagtatgtcaagctgataacgcaaggcttttcctcctggaagattggtgtaggtgatgagtttctaatcccaaatatatttgcatttaccaggcttttgtgagtttaagaagttatctatcatatctttttttttttttctatagaaaaatgcttgtttctatcaagaatgactcctttataaactggggagtatctttaagagtggtttcaaccctgactgtatagtatcatctgttgaggagcttaaaaaaaatatgtaggcccagcccacactagactggcattggtacctggtatcagtattttttaaaaacttcccataggattctaatgtacagccaagattgaggaccatttgtctgtcatctgggattatgcttaataaattaatactgttttttaaattaattagatttcacttctaagtcattatcagtaaatttactcagtatctaactgacaagaatttctagcatatatttcttgattagtgcatgtaaaattctaaaagaatttctatagtattttccaggcaataagacaactagtgccccaaatttaccaaatgcatgagtctaagcctgtgctatatataaatatactcaaagccaagtttacatctgtgtacacaagtgtgcatgcatatgtacaattaaagactatagttgtaacagnnnnnnnnnnnnnnnnnnnnnnnnnn

SEQ ID NO: 20693 - DNA, 381 bp, Homo sapiens
  misc_feature 381: n = A,T,C or G
acccaaagatgtttacttgagagtagtttattcctttcagctcctcagctctatacattcttccagggaaccgtagatcttggtgcctatttgagccccaaaggatcagttagttttacaaaggacaatcgtattctctgtcacatcctttttggccatgcctcaaaagcagtcccacaatgtaagctactgctcataggctcaatgcagtccaccttcaaagcaagagaaataatttcatgagtaactccaactgccgccttgttatagggaaggcatcatgttggagcctcccagctcaaattctcacagtgaacaatttaagtctaaagttcaaaagtttcaatggcatttggtggaaaaaatatcactttactgtgn

SEQ ID NO: 20694 - DNA, 413 bp, Homo sapiens
  misc_feature 1, 2, 3, 4, 5, 6, 318, 327, 346, 409, 410, 411, 412, 413: n = A,T,C or G
nnnnnnaaatatcgcaaaggctatctccaggcaagtatgttcctttgcttgtcatccccgcgtacgagaatctaaaagaggcacggaaggcctcaggggaggtggctgacaagcttgaggaaggatctgttttcctccagaagcaaggtaacttagcagtgaacagaggttgaaggagaagtggctctccttttgtcatgttcactctggtctcctgagcaaggccatgggacctgatggcacagctgactccctggggcagctggaggacttacagaaatattgttaccagtcccttactgggcattggcctgaatnatgtggctntgtccactaggggtggacnagatcacagaggtatcccccaacatgtggacactgatgctcccctctgctcttcctggctccnnnnn

SEQ ID NO: 20695 - DNA, 523 bp, Homo sapiens
  misc_feature 520, 521, 522, 523: n = A,T,C or G
actcacttcctcttggtgccttaagagctttcctcaaattgtatttctgagcagggacatttacaagcctgcatggaactgaaggatctcctgtctgaagattctcacaagtaattgatagaatgagatttatttgacaaataacaaaaccatctgccaaatccatgattaaatggcagggactctgggtctcttgtgcttagtgagggaaggaaggaggtggtatgttttcagtgaaacactcactgaatggaactccaggctggagggagagtgaagagggaagagaatacagtccttgctattttcctcagctgattcataatacattaacaccctcatttacatggcctattagaagttatttatattccaattacaggctatttgaatattgcatttgtagtcgaattacagggtttagggaaagctcgtttgttttcaagaaaggattctggtttaaagacaaagaaatgggcagcttgcagatacgggcagcttgcagaagctctgggcacannnn

SEQ ID NO: 20696 - DNA, 1068 bp, Homo sapiens
actgttttccacagagtgggaagataagaacacatgtagagatgataaaatgtcattggctccaagagacaagcttccgaaatccatggtggttgaagaacatcaaagaggagcaattatttcagtcattagggcagttccacctgttctaattgaacatttttaggatgtagaagatgcatcatacattggtatctattcagaaggtggggacatctgctgtctgtcatgtatctgggagatgtttatctcaacaggaggcaataataatatggtaaaccaaacctaatattatcatgatgcattaaaactgggttaattgaagcaataaaatcaaagtaacagtaaatgcttatacaacatgttaagtaatatttacttcaatcttagaaatgaaatgataattttacattctagcagatgtatttcttgatacctgttctgagaggacagaaacaaggctcaaaattcatgcaagaggctaataacaacttagttgatagtaaaatatggagcattggatgtagagtgcattaaccttcttgtttaatctgagttgacctataagtgggcatattgttttttggggaatcgggagttttctcaagtagaaagaagccccacttttcctttgatagggtaccagtcaaggaaataaatgctcttttttctacctgagttagatttgcctttcatttgctcaccctgatctgtgtggctttattgaccactacagtttaagcccatgcaacctgcatgctgtgcaagaaagaaaggtgatggacagatagtcccagagttaaacttctggtgcctttgccactccatgtcttgccatcttatcatcatagtagctttgggtatggcctcctagcagcttcattgttatgcctgtgggcattcgtgtcccactgtcaggcagattctgggggactggggagccagaatgatgggtagcaggcaggtggtagatggggagacctaaagtccaaaagctagaccccttctctcttaactcataatggcattcagaagttgtaattatttcacaaataataaatgaggtac

SEQ ID NO: 20697 - DNA, 560 bp, Homo sapiens
  misc_feature 553, 554, 555, 556, 557, 558, 559, 560: n = A,T,C or G
actcgtggcccatgttggttcaatttttatagcttcagttatccaaaggtgacacagaatacccataatgatgactgggcatgcgttttacctttgggcagacaccccatctttttattctgaaatttaaaataattcagattcttttggggaggggattagtttaaacattaataaacagaatataaacaggcagatggatgggtagataagcggtattcgggaatttgagggcttgggacagaaatagattccttttcctttttaggttttctttcctaacttgctgcttccttctatcaaccttatctggtctgtaagaacctgggaaaatataagaaactgatggttgtggggagggaatagaagaagactgttctaggtcttaaaagatgcattaattaaaagttgctaaggcttgtaattaagaatcaagacccttgtaggtgtaggtgatagacctttgtgtgattttctcagttgcaccaaattataccaaatttcaacctcataaagattctgaagttttacaaaagtagagaagagagaaaannnnnnnn

SEQ ID NO: 20698 - DNA, 602 bp, Homo sapiens
  misc_feature 1: n = A,T,C or G
nactgtagactgacagtcctggaatgcttccccccaacccccaacctccacgtcaaacctgtcgttgcaacgaaataaataaaactgacagctggaaaaatgaggggcaagcagaccaaatatgataaacggtctcttgccgtgtattgtattctctacaataaaaccccaagcggatgctaaaaatgtgtgcggctttgtgaggagacaggcgtgctctgtgtggccgagattttctgagaaaggtaatttaactgcaatgcacataaaggagagaaaggcagagaagtaatttggaaagtgtacatcaagtgctttttaaaaagttgatattgttggttatttttcttttattaaaatccacagccctgtgggctgctgtcccatccttatcgggctcattcaagaccagcattgacatttctaatttgcaaatttaaagattgtcaggaaatggtttaaacacccagtatgattggggagctttttgactgtgggtgacaagagtgggctcacctctgggaagacagtaggggcaggggaggagagctgggctagatttagggagagttaggaatagctaacatttattaagcacttaa

SEQ ID NO: 20699 - DNA, 780 bp, Homo sapiens
  misc_feature 1, 772, 773, 774, 775, 776, 777, 778, 779, 780: n = A,T,C or G
nagttgcagtcctcttcaagctgttatcataagtacagtagtcagctacttggatatcaagactaagtgctgatatgaagacttgcctttgtgttttgttatgaaacacgcaagcataaagcaggactcaagcacaaggctgactgttctactttgaataacagcttccttgcagtctcctccacatgggtggtactgtgtttagaagggattaccaaaggctggagcgatttaagctatgcactagccttgccctcttaggttgcattctctttaggccactggttctcaaacattagggtgcactgtaaccattacagagcttgtgaaaagtgcagaaacctgagcctcaccttatgagattctgattcagccagggggaggacaggaatctgtatttttcatagcaacctcaagtaatctttattctgagggtctcgggattgcaggttgaaaaacacaaccttaatcagcagtaaattcttctctactcggccaggcgcagtggctcatgcctgtaatcccagcactttgggaggccgaggtgggtggatcacaaggtcaggagttcgagaccagcctgaccaacatggtgaaacgccatctctactaaaaatacaaaaattagccgggcgtggtggtgctcacctgtaatcccagctacccaggaggctgaggcaagagaatcacttgaacccgggaggcagagggtgcagtaagccgagattgcaccactgcactccagcctaggcgacagagcgagactctgtcnnnnnnnnn

SEQ ID NO: 20700 - DNA, 2398 bp, Homo sapiens
  misc_feature 1, 2, 3, 4, 5, 6: n = A,T,C or G
nnnnnngtagctgagaacccggagaaaagaaaccaggaacggctgaaacgaagagaagagagagagagagaagaaagggagaagctgaggaggtcccgatcacacagcaagaatccaaaaagatccaggtccagagagcatcgcagacatcgatctcgctccatgtcacgtgaacgcaagaggagaactcgatccaaatctcgggagaaacgccatcgccacaggtcccgctccagcagccgtagccgcagccgtagccaccagagaagtcggcacagttctagagataggagcagagaacgatccaagaggaggtattgatgtgtcaatcagaggatatggagctaccttaatgttttagagttgtttatgtttacttatgttacttatgtttagagttcagattattggtttgaaacttttgcatctggtaatatgtacacatttatgtgtgggtgtacaacatttttctgtgattatatgggtagttttgaaagaatatacttatgagccagagcaagaaattggaaccaatatgtgtagaggttattgcttttctctgcttagtgtgtcttggaaaaaagttctttacaggtaaataattttaaataccaatacccttagtatggatcagcaaattaggggctctgagaagtcctttcattacaagagttgtttagctttgatttattgttttctaaacttatttgagctgggatgctttttcagagcagacacattctagtatattcttgttttatctgcactatagatatgtattgttacataccttcagcttggcaaggcagactaataaggaggttccaagacttcccttggtttaatgagaacattcaaaaggtgcaggcatagggtaaggtatgtttgaggacttgaatatctattaaggatagacaaaggattataatgtggtagaagagtttagcattcatagtctgtatagatcaaactgtcaaaacttctcaggtcacatgatggcccttaaaccaggtaatttctgtgtaacgtaagccatgtttaaaattgcttttttcttgacaactattcagaagtatatgtatgataaacattttttgagtgcctagtacctactagtcttacatattctgtggattactccacataaaatctataataaaatccacagaaagctgttaaaatctttcctatttttttttgactcaactttccattccctgaaatcactcacaagctgagtttgttaataggctctcaatattttatttcttatatgcgggccttgtttttagtatttcttaaggtgattttaataataattaattgtatatgttttactgtactagacttagtgtttcctatgtgaggctgggtgccatggctcacgcttataatcccagcactttgggagaccgagatgggcgtatcgcttgaactcctgacctcaagtgatctgcctgccttggcctcccaaagtgctgggattacaggcgtgagtcaccgtgcccagtctttttatatcattttaagtttattaaaacattaagtagaatgttcaaagtggacattattttagaaccattttttgtttaaccctccttaactatatttctaaaactgaacagtcatattttttattttcctgaaagtattacttattcaggttcttggtagtgcctcagatcctaattttgaatatgggttgagtgagataattatgtaaaagtgctgtgtcacctgtaaagaaccaaataaatgtaattgttgaattttagatgttggaggtatggaagattccatgtttattctgactccataatatgtttggttttccgattgatttattatttacctttcttataatgaagttgggtatgggaatggagaaggtagtaaacagttatggctaatcaagatttattagtgtgagcatctttgtctttttttatttccccttgttggttgaataagctaactcagtatgagtagatttttagaagtggttatttaaattcatattaataattgagtagttctcttatctaagtcaggtgttggcaaactgttgccgataggccaaatctggccggtagcctgtacaaccagcaagctatggatggtttttacattctaaaaagaaaagaactgccacaaagattgcatggacctgcagtaccccagatagtcaccatctggcccctattctaagcattaaaattagatatcattcttcattttaaagcgtactatgttatttaataaaaacctttgaggggaaccggtgctggaggaacgggaaattatttgcctcgttttttccactgtgaggctgacaggggctgtacagcgcgcgatgttcgacatttctgtgtggccattcaaaggtgggcccagggaa

SEQ ID NO: 20701 - DNA, 457 bp, Homo sapiens
  misc_feature 1: n = A,T,C or G
nagcaaagaacatgcattattttaactgcacagaacatatttaacatgatagagctttaaagaaagtaaaataaattttgaaacaaaacccaaagaaatataagatcaaattgttcctgctctcgggcccttcctttgcgcggataatggagagagatcacccggagtacaatgaaaggccaactccctctttggacacagggggcttggttgtattctaccaaactcccactagggggagtgttttagcagtgtgggctgtgcccttcacattctaaacaactgattttcattagtgattctcatgaacaaaaaacttcacctcttcacctatcatgaatactcaacttataaggccaggtgctgtataaatccccgccctcaacacccagactcccaaatgcaggtagctgagctgatgactttttataagcaatgctaccttaaaaatatgcag

SEQ ID NO: 20702 - DNA, 570 bp, Homo sapiens
  misc_feature 566, 569, 570: n = A,T,C or G
acagtgagttcgtcatacatctagatgaggatgtaaaagaacaaaaacttggaatttccctccctctccatgcagctttgaagagtctttaatccaagggaaacctacagttctttctctgccgtaggttctcttctcctctcttccacttcctccagctcctgtttgtctcttcctccctgtgtgtcttactaccttgttttgggggtttgttttctctcctgattttcacctctttcagtcctcaaaatggtctgaataaactggagattaatttatttttgaaagaagtgtttgtatctactaagtgaggttatggaagagatccaaaaatgttctgggtggcaggagaagacatttaaaatacacagttaataagccacatttagataatctataattgactgtagtttattcagaaatgtcttttgttaaataaagcttctaagtgaagtctcaaagccacagaattaagaaaggctgtttgtttagtcaatgtgattactgctatatttttaaaagggaaaaaaagcaaaaaaaaaaatcagtttttcataaaagtaaantgnn

SEQ ID NO: 20703 - DNA, 514 bp, Homo sapiens
  misc_feature 513, 514: n = A,T,C or G
gaaagaaaggaaactttctgtaaactagtttattagtattatagaaagtacataaagcatgccaactgctgctgggaatcatctgttccaaagaggccaacacttactcgtctgtttttattttgcgtaaagaatgagtagagcataaaacccctcaccatctagtgcctgttttaccccaaatcttctacatccactgttccgaagatttccacactgattctgagcaatttatgtaagcccaggtgttcaaagttccaggttgaaacatttggttaattaacatcatgctgcaaacactcaaaatcacttcagctgccactataacaaaacaaaactcccaaaaacaaaaactgtagggaaatataaacaaatggcagtattctttggaaaacagtatatgattttagtgacaataaaagcagcaagggctttcttgatttaatactgtgtttctcaaaaacatttttctaaaggaaattatattgagtttgagtaaaaacttgaaagtann

SEQ ID NO: 20704 - DNA, 727 bp, Homo sapiens
  misc_feature 1, 2, 3, 4, 5, 6, 7, 8: n = A,T,C or G
nnnnnnnngagcccactgtgtgctgcctgactttataagacattgaattttgttaatagaatgtaaactccatgaaggcagagatttttgtttattttgttcactgtggaattgctagcacctagaatactgcttgacagacagtaggcagtctgtaaatttatttgtttgtttgtttgtttgtttatttatttatttatttatttatttttgagatggagtttcactcttgtcgccctggctggagtgctagcggcacaatctcagttcacttcaacctccgcctcccggattcaagtgattctcctgcctcggcctctagagtagctgggactacaggcgtgcaccaccacgcctggctaatttttgtatttttagtagaggcggggtttcaccatgttggtcaagatgttctcaatctcctgatcttgtgatccgcctgccttggcctcccaaagtgctgggattacaggcttgagccaccgtgcctggcctgtaaatatttattaaataaaaagtgtgttggactttgggaatcaatttgaagataagttttaggatttatatagatggcatcacaactcacttacagcattcaaagctgccctcaaattattttgcagggatgtataattgaattgaaaataattctgtaatttcctttcagatggaatagcattgacccagtttacaaagccatctgaagtgcccgagttgtatttgaagt

SEQ ID NO: 20705 - DNA, 4462 bp, Homo sapiens
  misc_feature 1, 2, 3, 4462: n = A,T,C or G
nnncttgcgcccgcggccggaggagcaatagcagcagccgtggcggccacggggcggggcgcggcggtcggtgaccgcggccggggctgcaggcggcggagcggctggaagaagttggattccatgggttccaagagaagaagagctacctccccttccagcagtgtcagcggggactttgatgatgggcaccattctgtgtcaacaccaggcccaagcaggaaaaggaggagactttccaatcttccaactgtagatcctattgccgtgtgccatgaactctataataccatccgagactataaggatgaacagggcagacttctctgtgagctcttcattagggcaccaaagcgaagaaatcaaccagactattatgaagtggtttctcagcccattgacttgatgaaaatccaacagaaactaaaaatggaagagtatgatgatgttaatttgctgactgctgacttccagcttctttttaacaatgcaaagtcctattataagccagattctcctgaatataaagccgcttgcaaactctgggatttgtaccttcgaacaagaaatgagtttgttcagaaaggagaagcagatgacgaagatgatgatgaagatgggcaagacaatcagggcacagtgactgaaggatcttctccagcttacttgaaggagatcctggagcagcttcttgaagccatagttgtagctacaaatccatcaggacgtctcattagcgaactttttcagaaactgccttctaaagtgcaatatccagattattatgcaataattaaggagcctatagatctcaagaccattgcccagaggatacagaatggaagctacaaaagtattcatgcaatggccaaagatatagatctcctcgcaaaaaatgccaaaacttataatgagcctggctctcaagtattcaaggatgcaaattcaattaaaaaaatattttatatgaaaaaggctgaaattgaacatcatgaaatggctaagtcaagtcttcgaatgaggactccatccaaccttgctgcagccagactgacaggtccttcacacagtaaaggcagccttggtgaagagagaaatcccactagcaagtattaccgtaataaaagagcagtacaaggaggtcgtttatcagcaattacaatggcacttcaatatggctcagaaagtgaagaagatgctgctttagctgctgcacgctatgaagagggagagtcagaagcagaaagcatcacttcctttatggatgtttcaaatcctttttatcagctttatgacacagttaggagttgtcggaataaccaagggcagctaatagctgaacctttttaccatttgccttcaaagaaaaaataccctgattattaccagcaaattaaaatgcccatatcactacaacagatccgaacaaaactgaagaatcaagaatatgaaactttagatcatttggagtgtgatctgaatttaatgtttgaaaatgccaaacgctataatgtgcccaattcagccatctacaagcgagttctaaaattgcagcaagttatgcaggcaaagaagaaagagcttgccaggagagacgatatcgaggacggagacagcatgatctcttcagccacctctgatactggtagtgccaaaagaaaaagtaaaaagaacataagacagcagcgaatgacaatcttattcaatgttgttcttgaagctcgagagccaggttcaggcagaagactttgtgacctatttatggttaaaccatccaaaaaggactatcctgattattataaaatcatcttggagccaatggacttgaaaataattgagcataacatccgcaatgacaaatatgctggtgaagagggaatgatagaagacatgaagctgatgttccggaatgccaggcactataatgaggagggctcccaggtttataatgatgcacatatcctggagaagttactcaaggagaaaaggaaagagctgggcccactgcctgatgatgatgacatggcttctcccaaactcaagctgagtaggaagagtggcatttctcctaaaaaatcaaaatacatgactccaatgcagcagaaactaaatgaggtctatgaagctgtaaagaactatactgataagaggggtcgccgcctcagtgccatatttctgaggcttccctctagatctgagttgcctgactactatctgactattaaaaagcccatggacatggaaaaaattcgaagtcacatgatggccaacaagtaccaagatattgactctatggttgaggactttgtcatgatgtttaataatgcctgtacatacaatgagccggagtctttgatctacaaagatgctcttgttctacacaaagtcctgcttgaaacacgcagagacctggagggagatgaggactctcatgtcccaaatgtgactttgctgattcaagagcttatccacaatctttttgtgtcagtcatgagtcatcaggatgatgagggaagatgctacagcgattctttagcagaaattcctgctgtggatcccaactttcctaacaaaccaccccttacatttgacataattaggaagaatgttgaaaataatcgctaccgtcggcttgatttatttcaagagcatatgtttgaagtattggaacgagcaagaaggatgaatcggacagattcagaaatatatgaagatgcagtagaacttcagcagttttttattaaaattcgtgatgaactctgcaaaaatggagagattcttctttcaccggcactcagctataccacaaaacatttgcataatgatgtggagaaagagagaaaggaaaaattgccaaaagaaatagaggaagataaactaaaacgagaagaagaaaaaagagaagctgaaaagagtgaagattcctctggtgctgcaggcctctcaggcttacatcgcacatacagccaggactgtagctttaaaaacagcatgtaccatgttggagattacgtctatgtggaacctgcagaggccaacctacaaccacatatcgtctgtattgaaagactgtgggaggattcagctggtgaaaaatggttgtatggctgttggttttaccgaccaaatgaaacattccacctggctacacgaaaatttctagaaaaagaagtttttaagagtgactattacaacaaagttccagttagtaaaattctaggcaagtgtgtggtcatgtttgtcaaggaatactttaagttatgcccagaaaacttccgagatgaggatgtttttgtctgtgaatcacggtattctgccaaaaccaaatcttttaagaaaattaaactgtggaccatgcccatcagctcagtcaggtttgtccctcgggatgtgcctctgcctgtggttcgcgtggcctctgtatttgcaaatgcagataaaggtgatgatgagaagaatacagacaactcagaggacagtcgagctgaagacaattttaacttggaaaaggtatgcagataatagccacacagaaaaaattttacatctcaaaacacctattccagaaaataaatgaataaagtattcaaacttagaaaaagagcaacaacacaaaaccttagccaaacaggaagaaggaaactataacagaaagaaatttacactttcaaaactgtacattataatttaaaagtaaatcaggccaagtgcattggttcacgcctgtaatcccagcattttgggaggccaaggcgggcagatcacgagatcaggagttcgagaccagcctgaccaacatggtgaaacctcatctctactaaaaatacaaaaattagctgggtgtggtggcgcgtgcctgtaattccagctacccaggaggctgaggcaggagaatggcgtgaacctgggaggcggaggctgcagtgagctgagaccacgccactctactccagcctgggcaacagagtgagtctctgtctcaaaaaaacaaaaaatttttttaaagtaaatctaagagctaattatttgacaagtccaattagataaactgccaactatctaataatgggaaaagaaaggggttaaacttcgacacaaaatgtggaagaaggccaggcgcggtggctcacacctgtaatcccagcactttgggaggccaagatgggtggattacctgaggtcaggagttcgagaccagcctggccaacgtggtgaaaccctgtctctactaaaaatacaaaaaattagctgggtgaggtggtgggtgcctgtaatcccaacgggaggctgaggcaggagaatcgcttgaacccaggaggcagaggttgcagtgagccgagatcgtgctattgcagtccagcctgggcaacaagagcgaaactctgtctcaaaaaataaataaataaataaatgtggaagaaatgtaaagactgtatatttctgctaataaatttgaaaaccn

SEQ ID NO: 20706 - DNA, 386 bp, Homo sapiens
  misc_feature 385, 386: n = A,T,C or G
acctgcaatatatttggagtattatgtctttattgttgttaaaaagtttttattgaatgtatgaaaattatcaaattgtattcatcattattaacatgtcctggggaaggaagggaaactttctaggacagaagtcactttcagatgtcatgtatgtattgggtgttcaatcatatctaacactgttttgatttttgtgggaaaatattccaggaaacgctaattctctttagactccttgttcttttatgactacaatgaacatatgtctatgtgatagctaaagatatttttgaattgtatgtgtgcttaattatcggtaagtataaatatttgagaaaacacatggtctggatatttaaaaccctcataaacatgttggcann

SEQ ID NO: 20707 - DNA, 423 bp, Homo sapiens
acttaaaaaatttttaatgtaaaatacccctttaaggatagaatttagggccttgaaattctactcagttgctatgaactgtggggaatttgagacaaatagcttttgtaattggaatgcacactgtgttgtaataatgtggaaagagaaacaaaaactttccttaatgtaatgagtttccattatctgcctaatctaaggtttgtaagtctacattgtcaggatttatattgaggagatagggggtgtcattttctgtacaagatagttttaagtatgttctaaatatttgtctgctgtagtctatttgctgtatatgctgaaatttttgtatgccatttagtatttttatagtttaggaaaatattttctaagaccagttttagatgactcttattcctgtagtaatattcaatttgctgt

SEQ ID NO: 20708 - DNA, 460 bp, Homo sapiens
acactggcagcctctactggccattgcaaagagcagcattgtcctctgttctttccattccaggttgcatatgcttttacttgggtttagctctttcttctttggtcctcaccctctttgttgtcctcttttgaagactagttattctgttggatgtcttgatttataattaataaagagctactagtccagtattttcattaataaattaatatcataagtgaatggaattcttcaggaccttagaagaagttatgaatataacctttccttgagaagtaattttcatgtaagagggaagatagatttatctttatgtaggttttaaaatactttctcagttgcaagccttaatgtatgatatagagattagtcttttacttatgactgacaaaaaaccctgatgccttgaaagaaagccttggctcagtgatagacttaattacacacacacacacgt

SEQ ID NO: 20709 - DNA, 447 bp, Homo sapiens
  misc_feature 1, 2, 3: n = A,T,C or G
nnnactacttatacatctccagcttacataactcaaatttagtttgctttctgcggcattaacatttgactcattgaatggcttatagtagacatgaaggttattataatgtagaaagcagattaaactggattttaatttataaaatcaaggtgttagaagaggtgattatggacgtcttttctggcctaattttgtgactgctgttgaattccatgttacttgaaaagagtatttcaatagcagatgaacaataggcatcatacttttcattctgaagccattgaaggtttactgcagaaaaattattctctaagcacatgactgttatccaatatcttaacaaaaaaggaggagatcattttctgggttattttttcctcagacttactatgccactgaggtagcatactaaattgtcaatgacacttttaaaatttgtacctc

SEQ ID NO: 20710 - DNA, 292 bp, Homo sapiens
acgcgggcactcctcttctcagaactcgatcaagatgttattcacaggtaacagtgacctggtttgggttttctctttcctccctggctctacatgtctcatggtcaaaagaacttggaagcaaagacttagccatctaccatggccaagcaaaggaacctgcataacccccaataggcctgggcacagtggctcacgcctgtaatcgcagcactttgggagaccgaggcgggcagatcacgaggtcaggagatcaagaccatcctggctaacacagtgaaaccccatctgt

SEQ ID NO: 20711 - DNA, 1048 bp, Homo sapiens
  misc_feature 1, 1038, 1039, 1040, 1041, 1042, 1043, 1044, 1045, 1046,1047, 1048: n = A,T,C or G
ncttcccaaagtgctgggattacaggcgtgagccaccacgcccagcctatggtaaatatattttgaactacaaaggtgctgtggtactttaaagaaaaactatttttactagtttatctgaatggtctgtggactttatttagaaactgtttttcagtttagttttttggacatatcctttgctcagtgtattttgttacttctctagtaaaggtagaagtgaagcagatgccattgtaggttttaccagcatttaaatatattatgaattgcttagcaatgaaatgcaagtatgcatcttttacttaaagatactatttatgtattcagctacagagatgaaatagcattttatgtgttaattgttttggctataaaatttaagtccttacagcatttggggattatacacttggatttcaaaattgataaaacccttgtgaacatatctaatagatattctgtttacttgtagaaataatataatgtgtctggttctgttttgttagacattttttatgttctactgaatcagaatagtcagtgttatattccttatttcaagaattcatctattttatggctacatctcatatgtgctatgaggacttctagccagtgggtggcgctgtaataccgaagtactgcactgctttgttcctgtttccttgtgctgattcctttctagtatttaggtaacattaccggatggcattcccttaaattccaccaatcttaatcttattttaaaatggctacttttagggggtggggtacggtaaaacttaatagtacgtgtttatctcagttaatgtctggatatctatatgcactggttaacagtcccgaccgtatatgatggcgtatttaggaaagatataatactggccttttaatataaaaatcaaaaagagcgaaaaagagggggggaaatcccgggggcctaagccaatattaaaggagaaagaggataaaaagcggtaaaagagcgaagatgtagaaacccgtgagtagacaaagaaaagtatagctgtatannnnnnnnnnn

SEQ ID NO: 20712 - DNA, 391 bp, Homo sapiens
  misc_feature 298, 300, 302, 303, 304, 305, 306, 324, 387, 388, 389, 390,391: n = A,T,C or G
acaattccctctctctcccaccagttgctagtttgttgatatgagaggagccttttgtgagaagggaaggttgataaactaaatgaagagtttactcacactagaaattgttatttggaggagtttttgtaatcatatttaaataccattcaaaacctaacagtttggttgagtagttataaaatgtatactgtgggagtatctgaaagggatatctaacacacagttgtttatctttcttcatttctgagaggtgtaagggtgtgataaaaggaagatcactgtaggtatgaataantncnnnnnaaaaaaaaaaaaaaaaanttttctttgggcggaacccccttggggggaatttcccaccccttggggggggttttttggggnnnnn

SEQ ID NO: 20713 - DNA, 1044 bp, Homo sapiens
  misc_feature 1, 2, 3, 4, 5, 6, 1042, 1043, 1044: n = A,T,C or G
nnnnnnactttgtgttgggagcattccagttcttctcttctaggtattttgaaatatacaataaattattactaacggtaaacaccctaccttaagttttcttctttaacatcttaatgtagtcaattatataaatatattctatttttaaacttgggtgagttaaaaacatatttgtctcaaaattctcttttgctgtctgaaatatccagattcatatctcgcgttgttgtctttgtgctaaccagcttctcagaaatattatttcacaacttcatggctttgcttagttggaggaattttggcacctggcttcttccttgctcagatccagagggcaggtagtgtttaagaaaacaggatttgcaattaggaagacctcagtttggattaggttcatccatttgatagttggtgaccgtggaccaagttacttctctgaatttcttttgcacagctataaatcaaggattataatccttcacaaaatcataagaatcaaagccaaataatgcatctaaaggtccagcccagggcttagcacactggtataacacaaactagctgttgttattataagtgtaaatcctgtggtatgcccctttatgacctgcagatgacattttccacttctactattgatcataggtaccttcatggttaagaacatgcattttttgcattgcaattttattcccaaatctattcatgtattcagcagtgaacccgaatacccggtatatgccagatccttgctaggctgggctgtgggtgatacctgttccacaagacaaatgtggctcaaagagacatgctcttggccttgtaaagcttgcagggaagatagcaattgagtatttggtagataggaagtgttctgggaggcctctcatatagtatgtgagagctctcatataggggataaaggaagtcacacctcacaccaagacctgaagccacacacctggtgtagaaagggcggagagtcttctaggtggatggaatagcatgtggggaagagtttgtggtatttgaggagtannn

SEQ ID NO: 20714 - DNA, 503 bp, Homo sapiens
  misc_feature 486, 503: n = A,T,C or G
actagcagtagttaaaattactgagatattttcaatgaaccttcaaaaaagaccaacaaatctatttttctgtccaatgtaattttgatacttaagtttataactgtgttaagattaagtcaaactccttagaaatgttcagagaaatattagtctatatttcttatattgctcaagttctatttctataagtgataaattatacaaaatcagatatatggctcagcctgcagaagtttaagaaaaatgtttaaactaattttcatctttattaagctttcccttaagcaaagatgagcaatcatcttaactgtatcaccaaggggctataagatatttctcagatttaataaaatttcaatacctgatttaaccaattaatgccaaaatcccattcctttcctgttttcattacacttatatctactttatcaggactggcaaaaacagaccttaccacaaagaagagcccatattatgcatctnctgaacaagcatgcacn

SEQ ID NO: 20715 - DNA, 795 bp, Homo sapiens
acattcttacaacttggaggataaggactacacacattcatctacccatacacacagtgaaacacatgtgtagcttaaataaaacagacattctccaaggatttctccaattataataattgattgggcttcaaaaactcaaggttgaatttcagcttctaacttgatgagaatggctgtcttaattctgtcattttttgttaattttacttccaggaagtcagggctgtgatttgaggcttttttctctaagcttctgtgatggagatgaatttattaaagtggggccataatgtctttttgagcaacattaaaactgagtcatcagaattaggaagtatcagaagtcaagatcaattttcaagaacaggagcataaaattcgaactcaatctgtgttaacattaagagatttagaagctcattcagactgataactaatgaataatatagctttcatttgttggagactttatgtgagccagccagttatacatgttatttataatccccacagtaacactgcaaggtagttatcaactctattttgcagttgaggaaattgaggctaagaaatatgccatttaacttttgctgcataacaaactaccccaaaagctaatggtttaaaacaatatgcatcttttgtgtctcagcattttgaggtcccagtgagtagctcttctggtctggattagttcagctatctgcagtctgctaacatatctggtgctagatgatctacaatgactttacccacttagtaaatctagttgatggtaggttttgttcaggt

SEQ ID NO: 20716 - DNA, 461 bp, Homo sapiens
  misc_feature 461: n = A,T,C or G
acgagggcaagagaggaggtgtctccttaaaaaggaagacagtaaggtaacacaatttatctaaagtcaaaaaacttaaaacggacccggatgtcaaacccaggactgcccgagcacaggacctgtatttttactgctctgcctgcctgctaggcagcaccgacccaccaaaacaaaggatagcaagcaccaaatggacagtattttaaacagaaaaaaaattgaaaacagctcacaagtgtgtataataggtattcatagccataatgttttaatcaaacaaaaataagtttattttctttgactcaaattataattatgtattatgcgattaagtatgtcaatattttacagagttgtagaaagaatggattattccaaaagctagcaccatactaagagaaaagctttgcaactcactgtgtaggacagtgaagaactttacctgtggagtagttagn

SEQ ID NO: 20717 - DNA, 3237 bp, Homo sapiens
  misc_feature 1: n = A,T,C or G
nacagttgcccccgggatgattgacaccgggctcatgccccccgcccggagtttagtttctcccaggtctgcccttaccgtggcccccccagattctttcgcaatgtgacacctcgggaaatattgccaaaaagagaccattgggcttggtatcaacccagcgtggtctggggctttcttttttccagccagctttaggagggctgatcgaaccccagtctttgttaatgttatattcttaagcagtctgaatttccaatcaaatgcccacacctccagatcctgaactatgaagtcttcctttttggaaagaatatcattattgaaagtgctgcaagagttgcttcgtccgtggtataaatcagcatctagccataaaccaaatcgtccccctccaccaccaagttctaaagaacttatgtctccattgataaagtatgaattttctccactccacttaaagaccttaaaatgagggctgaatgtgtagagaaaagtttcgcctgtgccataatagtggtcactgaacttgaaaggatgagttgcatatgctccaaaaatctgattatccatatctttgatgaccaataggacaggactgtctagtgatgccgatttccggtagagcgtctttaagctggtcccgtgctctaacgtgctataggccagtctccatggatacccttgcacccttgcaggaaggcgtcgggccagctgctcgatgtgcatattctccaggagcgcgctgtggggccgtaggacaggcagcacctcttcgtcctcgtcttcatagtagctgcatgtgctcttcctgcgctttgcctcttcaacagtgatgatcttcacaaaaggctcttcgtcaggtctggcacaatagaaaatctggatgtccaagggtaatctttggcctctcattgtgagcagtgagaagtgtggctctctctctaatgaggaacaagttttctctctactctgcttccacaccacagttacttgtagccacgctgagctacaacggtttgccgtactgctggaccatggctgcagtgtgagtggcaaaggattttctcattggttttcccactttgatgcacaggaacatgggtggggtcttgcttttttcttcttttgaaggaagtatatcttcaatgggtacctgaattctctttaacagccacaactgaacttcagatttattatccatttgtgcaccttgacagctgttgtccagagtagattgccaagggttccaagagattaggcctcttacacttgcttcgtagagattcatttaccggagggctctcccttttcacccggtctttatctgctcttattgccctcaattatggtatccacccgccctgggaaagagaactactaaggttaatgtctatttccccctggttcgatactttttgccatcacttgaattctgttttcgccaaattttcagatacctgtggcccttctttgttcttagtcaggtaatattccaatgagtttaactttatctaaatcttcatgtatgttcagtgtgttttctactcggctttctggcgaaccagactgcttgtccacttctggcattatatcttgcttctcacaggtttctaaatctagcgcccccttcagttcaacatcattctctgttcccaaaaggctagggctgactgcacctgcatttccacggcagaattgtttatttgtgactcagctttctttcgttcctctgggtcaagagaaaggcactccttcaaggtgtcttttttgtgcattccaccaccagtttgagaagaaagttcttccaagtcaacaaaatcatcatcttcccctagaaagttttctttggctgtagattcaaatgcagaagaagtgtcggaaggttccttgctgagcttagtcactgtgggagaaccatgggatgtctccctagaggagtccagtttctttaatttctctgacacagagctgcctgagggctttgtaggtgtatgtcctgtggacttctccaaggtactattggtctggaatccgaagtcataattttctctccattctgctgtcgtttttccttgttgatagatttgaacttactgaatgggttgatatccttttctgaagccaggtcttcccattctccaggcctgtacagaggacaaagatcctgaggtaggtcagatggcaaggcatctttgatcttcatgtgagaaatgtcattgtagagcgcaatggaaacaacctcttccatggggcagatgagaccatactcctcacacccattttcaataaccagaggatcagatttatgagggtcaaacatgatgttgttaggagtcactatcataacaccgccaaccacaccctttccatcggtgaagtatcgacaattcatttttaaaaatttcaccacacctggctcatcttcttcagaagtagacgataagactctttcaatgggtttcaaggcctttcgtgctaagtcagcatcaggcaatttatcatattctgcatctgatgatgaaggagagacagtagcaccaggactggatgatgatagccttaaggtactggaaggagagttggcatctggcacaaaaaggacctggcctggaacaatagtatgtgtgaaaagtttattcagttccaccaatttattgggagtgatgttaaatttcagtgctatggagtttagggtgtcctggtttccagcagtgtattccatagtcccatggggcttctgaaccaccatcttcttctcttttttatcatgtgttttgttttgattgtcatcaatactataatatctctttagttctgtacgcctgatctcctttaactgattactttttctcttttttttctcatcagtcatatattcctcttccacagcaatgttgcacttgtctggctctaaaactactgtattattatcttccttcccagtatgagtccttgtagctacagctgaggctgtctctgcattttgtttggcttgttttttctttttcagtcgagcaaaataactttgtttccgttccttcttctcttccttggtatccataatacacaatcaaaagtgcaaagtatttgaaaaagtccctctttttaatcagtgagtcgtaaccctacagggcgggggcgccggctcctggcgcccgggagaaggggatcggtcgcatgcatttctgggagcggtggcctctgctgctgggccggacgcgtgggtgactccct

SEQ ID NO: 20718 - DNA, 808 bp, Homo sapiens
  misc_feature 1, 2, 3, 4, 5: n = A,T,C or G
nnnnnaatcttctgataaagtttcagagggtccttaggcatttataaaaacaccatgttctatggtggcccatcctttgtacagtaacactggagggatgttgggggcaggatgagaggcatgtatcccaattgaatgaataaatagtcttctatataaggcccaaggaaggaagcaatgcctagcctaattggcaaagaaagagatatgcccacttgtcattcttattcagaaggcacttctatgttgaaacacattaaaatacaagaataaaaatatcaaccgcccctcaactagctgtgtagtaccacaaaagcaagtatcaatcagtctgctatcacaagataagttctgtccttgattagtcaagatgaactctttattttcaaatcctattattaacgtatataaggatggaagcctcaaatttaaagccaaaggatgctggcaaactgacaccctgagagagtaaaaaacaaactagaaatagataaaagattctttcacacacagactgggaacagaatagggaacccagaaataagaccgcacacctacaatcatcatctttgacaaacctgacaaaaaaacaagcaatggggaatagattccctgtttaacaatggtgctgggagaactggctagccatatgtagaaaactgaaactagaccccttccttacatcttatacaaaaattaactcaagatggattaaagacttaaatgtaaaaccccaaactacgaaaaacttagaagaaaacctagacaataccattcaggacagaggcatgggcaaagatttcatgac

SEQ ID NO: 20719 - DNA, 275 bp, Homo sapiens
acacctataggtaaccagtgtaggtcattagaacacaggcttcacactgcatgctgatctgcaaagtgaggacataccagtgacaactttggaatctgcatccagccacaggtaacagatgtattgcaccagactcagatctagattttgtgatgactatataatgaactagaagttcaaattagagaaagaaacaattcaaaatcagaagaaaggtaaaagcaagtggccacatgatcgcattaaaaaagaaaaaggcaaatatctcagtaagt

SEQ ID NO: 20720 - DNA, 440 bp, Homo sapiens
  misc_feature 1, 2, 3, 423, 424, 425, 426, 427, 428, 429, 430, 431, 432,433, 434, 435, 436, 437, 438, 439, 440: n = A,T,C or G
nnnactcttttgattgattttcccaataaaacattgattagccatgcctatgtgaaaggaacactctattatatttcaagtcattccatccctagtcgcgtgctgatcaccagccttggtctccttcaggactaaccactatacgcagagtgtgcacagggtccagataaaactgctcaaagccaatgcatgcaaaaaactgcccaagagagtctaagaactccttttatgaagagtcttggctctccaatggtgagtcccagtctgaatttattcaagactgaaagaagttggagcatgtctgtgcaagggtatttttcaagagattttctctaagaaatcgagcccctggagaaaaaccgaaaaaaaaaggttcttgggccgccaccccctatgggggaaattcccccccgttggggggcnnnnnnnnnnnnnnnnnn

SEQ ID NO: 20721 - DNA, 499 bp, Homo sapiens
  misc_feature 494, 495, 496, 497, 498, 499: n = A,T,C or G
actcccattcatacctacccatccactcccaatttcaatacaaatttatatctctataaatgactaaaatactattgtgttggtttttctttctttttttttcttgctgccacaacaaattaccacttacttaaagaacataagattaaagtgatagattttaaagcataaaataaaaaaaaaaattattatcttaccattctgtgggtcagacattcacatgactttggccaaaatttagatggtggtagactgtgttcttttctggaggatctggggatttatttccttgcctttacagcctccagaattctggacttgaatgggagtgacagggtttttcttctggtaatgagcataggtgtaggctggtgcaattaatagtcactacatgcaagaaagcagaatcaagggaaatgaagagaacctagtcctgttaaacttcaattgacactgaaatatcagtcatctctgaagttgaatatccatgaacnnnnnn

SEQ ID NO: 20722 - DNA, 616 bp, Homo sapiens
acaaaatggaacctacattaatcatctaaaacggcattatcataacagacttgcctgagccattacttaccacaatgaattggtatgacacttctaacaaggtcagaaaaatcagattctgttttcttaatattgaggatctttcccactttccctgagctaatgagacacaggtctgtggcaaatacatttagtattttcctacacatgaattcctaacaaaaccaagcaagagcatacaaagggaaacatactttagctaatttaaaggtgtcttatgttattttgcttattgaaaaaactgaaaaggtagtaaggaaaagatgtaatgtggtaatagcaaattgcatctgtggtctctaatgaataatctcgcttccagtaaaaaaaactatcaaaagagcttaaactcaaggtcaacaaaaggatgaaaatattaaaataagagcagaaatcaatgaaacagaaaacagaataaagaatgtcactgaaaacaaaagtaggtattttgaaaagatcaataaaattgtcaaacctctagccagactgaccaagaaataagacacaaattacccacctaaataatgaaacaaaacaaaacagcattatagaacca

SEQ ID NO: 20723 - DNA, 345 bp, Homo sapiens
  misc_feature 1, 2, 344, 345: n = A,T,C or G
nnaaaacgacggcctagtaatatgggccatacggtgtttcctgtgaggagaaagaaccgcaatttttcttttcgagcggccgcccgggcaggtacagattctaggtggccttatttacataatagattggtggtgtttacatttcctaatgagtttccatttgacgaaaacggaaatccagtgtatgagcttaatgataagaactggaaatcctttttctcaaggacgtggtccagattaagtttgcacgaggacgaggacaaggaaaacgatggagactctttgccaacgtttaaatgtgtgtcaggacaaaatactaacacattatgaaaatgatagtaccnn

SEQ ID NO: 20724 - DNA, 389 bp, Homo sapiens
  misc_feature 1, 2, 3, 4, 5, 6, 7, 380, 381, 382, 383, 384, 385, 386, 387,388, 389: n = A,T,C or G
nnnnnnncatgtacaaatatttggcaaaggaatgaaaaaagttagaaagttgtctgtctgtgggctaggctctgcctgcaagatacttacaatctaggtcagaggttcctaaatccttctcaatgccgtttgcactggccctgaggaaagtgtgaaaatgaagactattgtagagtcttacatgaagctaaatttgttcatttatatcacttctcttttattatgagattatgtcctctgcagttttttggtattaaaatgtcttttatgaaaggatagtaagagttagatagtagtcttttttgtggaaaaaaaaaaaaaaaaaaaaattttttggggcggaaccccctttgggggaatttcccccccccgggggggcnnnnnnnnnn

SEQ ID NO: 20725 - DNA, 2610 bp, Homo sapiens
  misc_feature 1, 2, 3, 4: n = A,T,C or G
nnnnagagcacgatatctacagtagagagaccgattgcggcttaatggtgcgtggggtgcgcggatcgccgcttgttgcagatgctaacctgtcccggcgcagaagggggggaagtggaacagagggtcggagcgtcaagaggctgttcctggaataagaccgtgaggcccggtgcatatgcaataggtgccgtaagtttccttatattggtggtaccagatcatccagtccggaatgggaccggtgatgtgccttaagagttggttctgaagagactctgcccgttatgccacctcccagtctctctcaacagtttcacacaggaaatattatgagcagagaaatcaaattcaggaggaactttagattcctttttgtgtcctcctgccaataacttcataaccacaaagttgggtttggcaacctttaaaattctattaacctcatggtccgggttaggaatattttccaatatcatttttgcctgttgaaagtgcttactagctgccacatacagttcaggagactgaggaggagggctatatttattgaggtcagacatttccttgaactgtaagtagtgcactggcggcggggtcatcacactgttgaatggagcaaacctgtgttcataccgaacttgttcactatcaagctcaaacttcggtttacgtactttgccgtccatgtcaaatgctaccatggttttaaacattccagcacacatgttctgatatgcttggctcattgtgatctctcggctcaatgggcgaactttcttttttttctttgtttttttactactacggcctttctgctgctcttccattatcctttcctctgccatttgagagccatcggcacgactcaatgttgacatcaaccatgcgtaaaggaattcagagagataccaatatatgtaatagtactcgtgcatactgtagagttccaattcaaagccacttagaaggtactgtatcataatgcgaaggttatggtaaaggacccaggtacctaaccaggccaaatgttgcctttggggttcctgtttcaacagcatggtgtgaagcgctgcatcaaccttctctgcctcatcctgcaaggtggcaaattcctcaagaatatgaccaagcttatctctctgtcgagccctgttatgtccatggatctgaataagactacagaatggccgaacacagtgagtaacaaaggagtcgatacagtccttagcctggtgattattatataggtagcacttgggggaaagcaccggaggactgacaaaagaccgaagtgcatctttcaccatgtcttgcatgagatgagttccaaagacctttttgttatccaccaggaaagtggtttgtaacagagatcttgaaagaacacatggtgactgttcactaaattcacagaaaaaatccaggatacaatgtaaatttgttaaattcacaacctcacagacagtttttattctatctattaatcttgcaaaatagttcaccatttcttcccttttaattatttttgcatatcgagggaaggtaggtggaagtagcctctggttcacaaggggttcaaaacccatcataattggatgatctccttttgtagtatcattctgggcctggatgccatgatgcaatgaattatgaatggcagaaagaagatctgctgcttgaaccatcaatttttgagcttctgcaacagcactggtctctttcttagtaaaggctataagcactgtcagtaacacacgagtaaatttcactctgctgaatactgctaaacattgttggtgttctagttcaacttctggatctctttcttctccttgtcgacttcgagtactctttactcttctttgcatgtcatcctccacatcttttagcatgcctgtaactcgaagatctgtcacactgttagccattttaaatccataagtcattgactgaaaatcttcctcttcaaaaacagcagctttatttactttttcccttgcaatgtcacagattttcaagattcccagagcaaaagccttcatagcaggatcttctataaagtctggattatgaatgtaaaggcacgtaaatactgtctgtgccagtgaatggccttctaaccacgttatcaaacagcaaaaacatgtatccataatccctatcagttcaggcaaggtgagatctttaattttaatagtgccatccttgatagcttgttcaaaattgagaacttttcgattaacttggtttccaatcatgccagcatccatcttgggatccatcatttcaatagcagacatggcttcaaaaagaccaaatagcttatcatgaagtagttctcccaactttaattctcgacaagcttcttcaaaatcttgggtaatgtccacccagtttgtattgcttttctccattttttctggcatactgagctcccatcctgaatcgtcatcatctacagaagctttcataaccattatgcctacttctcccgtggtcacccgcgccgccacgcactgtccggaccacggaaataacgacgccgcctcggccgccgccgccccctcccctctcagcccagcccgaccggcagcgtgcacgcatgcg

SEQ ID NO: 20726 - DNA, 1298 bp, Homo sapiens
  misc_feature 1, 2, 3, 4, 5, 6, 1292, 1293, 1294, 1295, 1296, 1297, 1298: n = A,T,C or G
nnnnnnatacaaatgttggcagggagcattcattttacaggtaaacatactggcatagaaggattttaggcaacctcatcagggtcacatagctaataaatgtcagaatgggattgaacctgggactgttagattctacgcctcctcattcattcatttattctctcactcattcacatgctctgttatgctgtatggtgttgagtaccatatttcagatattggcacattcggcttgtataaggggagacgcttttttgcagttggacggccattgaagacaagttggtcaccccaagttttctttccagttcttctgaaaaactcactaaagaaaaagaaagcaagaaatacagaaaagtatagaaaaataatccttattcccaccacctagaattaagttgttaacaagatgaaaacttcatactgaaaaaccaccctttctagaggcgatttaccacttattccttgcctttcaaaatatttacttttcaaggtaatctctccttattaatttgaaaaaaaaaatgtttcttttaaatagagattgttaacttggggtctggctaggctgtgaatcctctgatattaaacaaaagattttgttgaaggtgcttataaggctttatttttcttcctttctgctctagccccatatgtgcaggattttcattagatcctcaaagagttctgtgacccccaccctctccctcctaccttgttactttgaaacattctcactacagatttagtggggaatttggtcatttatttggattattaagagtttggaaactgcttctaactaagcagatgatgtggtaacaaagaaggcttatttgtgaaatagtgggtccaagattgatcacatctttctggtaaaccagccttatgcctactctcttttctcttatatcttcatgttttgccctttaattaatgaagcagtttacattgtgtgctgtggactgtcatatctgaaagcaaaagccttgtcttactcatctgtatatctcctgctatacagtaacatgtgtcttatgtaagttctggatctctgctaagtctcatgaagtccatctctgtattaagaataatctaattttttttatagccactaggtggggaacttgcgactcagttgggggaccgaatggtgggatttaacgagaccgggagtttggccaatttggtggtttaccacttttgggttggagtggtaaaacgttgtggacaaatttgggtacataagaaagcgggagagaacataacagaggttgtgatcgcgatannnnnnn

SEQ ID NO: 20727 - DNA, 199 bp, Homo sapiens
ccgggcaggtaacaaagcaaaccgatcaagggcgatttcccagtgttagcctgcagtgaaaagcttgagaaatgcgaggcccgccctcctcgcttgcccctgatgctgcaggccttgagagccacaggatactttttaccatcagagcaatgatgtcagtttttcccttccaactgtgcggacgcgtgggtcgacacct

SEQ ID NO: 20728 - DNA, 429 bp, Homo sapiens
  misc_feature 104, 105, 106, 107, 108, 109, 110, 111, 112, 113, 114, 115,116, 117, 118, 119, 120, 121, 122, 123, 124, 125, 126, 127,128, 129, 130, 131, 132, 133, 134, 135, 136, 137, 138, 139,140, 141, 142, 143, 144, 145, 146, 147, 148, 149, 150: n = A,T,C or G
  misc_feature 151, 152, 153, 154, 155, 156, 157, 158, 159, 160, 161, 162,163, 164, 165, 166, 167, 168, 169, 170, 171, 172, 173, 174,175, 176, 177, 178, 179, 180, 181, 182, 183, 184, 185, 186,187, 188, 189, 190, 191, 192, 193, 194, 195, 196, 420: n = A,T,C or G
  misc_feature 421, 422, 423, 424, 425, 426, 427, 428, 429: n = A,T,C or G
cctgagccacgatttgttctctcaacactctccaggctgtcagaaaagagatagaaactcaccaaggccaagaaatgcttgtgcgtggcacagaaggaatcaannnnnnnnnnnnnnnnnnnnnnnnnnnnnnnnnnnnnnnnnnnnnnnnnnnnnnnnnnnnnnnnnnnnnnnnnnnnnnnnnnnnnnnnnnnnnaaaaaaaaattttttttgtttaacccccaagctttatatagctttggtttaaaaaaaatccaaaccaaaaaaaaattttaaccaaaaccggggaacccaaaacccttttccaagggtggggcccttccacccttcaaaaaaaaaaaggttttaaaaggtgtttttcccattgggaaaaacaagccaaaattttgaccggggccctgctttttttttaaaaaaannnnnnnnnn

SEQ ID NO: 20729 - DNA, 1185 bp, Homo sapiens
  misc_feature 1, 2, 964, 965, 966, 967, 968, 969, 970, 971, 972, 973, 974,975, 976, 977, 978, 979, 980, 981, 982, 983, 984, 985, 986,987, 988, 989, 990, 991, 992, 993, 994, 995, 996, 997, 998,999, 1000: n = A,T,C or G
nnactaaaacaagtgtataactaaactaacaagattaaatatccagccagtacagtattttttaaggcaaataaagatgattagctcaccttgagataacaatcaggtaagatcataacaatgtctcatgatgtaaaaaatattaaagatatcaatactaagtgacagtatcactctaatataatatggatcagagcatttatttggggaggaaaacagtggtgattaccggcattttattaaacttaaaactttgtagaaagcaaacaaaattgttcttgggagaaaatcaacttttagattaaaaaaattttaagtatctaggagtatttaaatccttttcccataaataaaagtacagttttcttggtggcagaatgaaaatcagcaacttctagcatatagactatataatcagattgacagcatatagaatatattatcagacaagatgaggaggtataaaagttactattgctcataatgacttacaggctaaaattagttttaaaatactatattaaattctgaatgcaattttttttgtgttcccttgagaccaaaatttaagttaactgttgctggcagtctaagtgtaaatgtcaacagcaggagaagttaagaatgagcagttctgtgcatgattcccaaatgaaatatggcctggtagagttggaaaataactgagctgtgctgtagaaacacgtgttgatgtctcgcgtccggtatgtagttacagaattcctaccaaacagcttaaattcttcaaagacgcgaattcctgcagcagttattcccttacctgaaggcttcaatcatttggatcaacaactgctactctcgggaagactcctctactcacagctgaagaaaatgagcacacccttcacactgttattacctatcctgaagatgtgatacactgaatggaaataaatagatgtaaataaaattgagttctcannnnnnnnnnnnnnnnnnnnnnnnnnnnnnnnnnnnnaatttgggggtcatttccttatgctctttcttaaatggagttttcattttgatgttagtttatgtataataggtaggatgcaaaaagatatgtaattgaaacaaaaaacattggactaaaatatcagtaattgaacatgtttatgtttgattattatttacactatggaaggatgcaattctagt

SEQ ID NO: 20730 - DNA, 910 bp, Homo sapiens
  misc_feature 1, 2, 3, 4, 5, 6, 7, 8, 9, 909, 910: n = A,T,C or G
nnnnnnnnngagacagagtctcgctctgtcacccacgctggagtgcagtggcacaatctcggctcactataacctctgcctcccagattcaaacaattctcctgtctcagcctccaaagtgctgggactacgggcatgagtcactacgcctggctaatttttgtatttttagtagacacagggtttcaccgtgttggccgggctggtctcgaacttctgacctcaagtgatccgcccaccttagcctcccaatgtgctgtgattacaggcatgagccaccatgccaagccaattttttttctctgcaataaagcactgttcttttttgattcaaaacttttggtaaatgttttatcttcactttgtactaacttacataaaaaaggccctgttataaatcaaagaacttaatttcagtattgcattcaatggctccacacacagaaagctcttttggtttgtaaaagggataaagtagacttctaagattattttaagtaatatattctatgtgcttttatggcacggcccaaacaaaagaactcctagatggtttctgggaactgtttgttaatttaccattccaggatgaaacaatcaggttgctccacctcaataaaatggcctttcacacacatcatccttgcaggacactctgcccaaattatttaaccttgaacacaagaacctaccctgaggttgctgagattaaatggaataatatggatagtttagaagtacttgctacatatcattattaccatcttcaaccattttagccacaaattaaagggtatggcctgtatcaataacaaatcaattcagtggtatctttttcagagaattcacaactcaaaattgacaagctggacagagcccacaaactttgtggcagcgttgggtccggcnn

SEQ ID NO: 20731 - DNA, 782 bp, Homo sapiens
  misc_feature 1, 16, 40, 95, 262, 270, 276, 782: n = A,T,C or G
ngaattaccctggatntgccacctattcggttgtgggacnttaagcaagataccttcttaggagttccaatcagtatgattggaatcaaaatacntgccctatgagggcttagtaaaagagaggatgtatataaaatgcttggcacagtatctggcatattaagtacttcactagagaagtattattttaacataataataagccaaatcgaatagctacttaattttcccaggtaaactccatctacccttatgacctcantgatgatntaaaantgaaagacaactctccatctttattttccagctcaaacctccctcctaaagtccaaccagcctgtacagccagctgggcactaaaccagaatttcccaccagcagctcaaatctatcgttatgtctttttccttctctgttaccatatcgcacatttcacttaaagctcaattggtttggccaagctagaaacctgaagtcctcttagactcactcttccctttaatgttgaacagagttagacctcaaggcttgttggttctactttttaaagatttctgaaatcagtatcacttatcctcacagtcagccttcgtttggaaacttaatagctcttacctggattacaacagctttgtaacttatttttgtcccaaggttctcacctgttgattctgacttccattgttataggagggccataggtggcagtaatgtttgttccacaaagcattaaattataagtgattctccccttccccctggagactttttctttggctgan

SEQ ID NO: 20732 - DNA, 3471 bp, Homo sapiens
  misc_feature 1, 2, 3: n = A,T,C or G
nnnacattatccacatttaacaccttttcagttgatggctgattatctgattttgcaaatggtgcctcactgtggggatcccctcctctattctcagatgtggtgatggtcccctcgtttttcgacgtgcctcccgctgtgggctgcagtgtcatatgaatctcggaagcacatttcagaagtctttctatcttttgttcataatctttgagtagtctcttcacttcttgttgactcttctgtgaaggcagctcttcacacagctccctcaggacttccatgtggtgattaagctggtacaggcagccttcctcagaaaagcaggcctcatgttctttgatgagacccttggtccttcctctacggataagtttcttttctttatttatttgcttttcaagttttaaaatattgtcactaagctttcctttttcaatatctatttttagttgttgaacatataaagacagttcatgatgaagagactcccatttggcacagacatctctactcttttcttctaaagacatctttatgtcctcagttacattattttttagttcttcaacagctttcaaatacttggccagactttttgtattagaaattattagtgcttccttgtgttttgaaatgagttcaccggggctctctctttgccccagtaactgctgagccctcatcatatatgattcaagttccttctgggattcttccatcttcagcctgatgtccaaatctggtgaaacgtcagttaagttcttcaacgctgcaatgagttttaccacattgatctggactttctctttagcttcttgaatctttgcctgaagcccagttgtgagaacatgttgaaaggactcctggcttgaaatattttgtatatccatttgtaacatatcttcacttcttgccataagctttcatcaaacatagagccctttggcaataagatgcttcaaagattcttccattgaggtgtccacatcatcttgatccaaaacagatttggcttctgcctcccagatttccacttgtccaatgagtttttcaacatctttagccacttttagttgccctgtgaattcttcattttctttttcatgtttctctccagcctttatattttgattataattttcaggaagttctactgacatatctgttgaaaactcaacagttgctttctcttctttagatagaatatttccagaattgtcaaaagtgggctgatcctgtttttttatcatcagtggcaggttcatttcaagttgagtttttgaaaccaactttctccatcttttattcagccttctcagttctttagaaatagatgatccaaccacatcattgctgacttcgactaagaaatttcctgcttcatttaaagtagcgtgttctagattccactgggctagtgtctcaaagggtacctctttaatttcttccttctttgtctcctcaaagcaagcccttagtaagcgaaggttttccacataagtagcccaacatgccagcactttttgtagagtggacttcacattatatatattttttctatacatacaaacatcagatttcaccatcatatactgtttattaatattctgacattctccagccaaattcttataaatttctccacatttttgaaaagaagtatcaagtcgagctaggaattctttttcttcaataaatttatgccagtcttccagcaataattccacagattctctgctcccatatttaatgttccaaatatccaattttgatttcacttcatctaccaaaccaagaactaagcacttgtagtaatgaaattctagaagtagaataaattttttctccaaaatgttgttgattcgtcttttcatttcctccaatttgttaggtggtaccaatggcaagtgattttcatccttattttcaaaggtaaggagaatgttcgaatgatgctcaaatctatccatcaggctcttgaataaagtcattttctcttgtatcagagtcacggcttgagagtgatcctgggaggctgacaaatcttcatccataagctcttctacctcctggagccaagcttcagtttgatggaggggtgggggcaaggcataatttagctttattttccatgcattaatctggtgatcgaggccatcccaggcttctctcaactgtaaatgatccttgtccagctcatccagatcccgttttattgacaggacatccaaaaaggactttttttcttcattgaatgactccataaaggacagcaggctattatactttttaaagtaggtatcattctctgaatcctttagcaacttctgtagtttttccttttgcagagttaaccagcccatagcatctttcacctttccctgagcctcctctccagtcccaggggcatctttggaatactgcagaaactgtgccacataggtcatgatggacttttcatcaggatcaacaacatccacatcttctggttccagcaatctggggatttttaattcttgttctgcaattctgaaggcctctctcagattgtctttgttggatctatgcttcacactcttcatgtcaattaggtctggtcgcaaggcatgaatgatggccaaaaaagccatcccatttctccaacttgacttaaaatcggtcacattgacagactcataggtggcgcattgttcctgagcccacaaaagaagggcctttcttgcagacatttgccatcttgcttgcactttagagcatttcttagctggaggacttgaggcaggagatgagtcaaccacactcacatcatccagggaaggctgattgtaattgcaagaaagagtctgggcaagcttctcaatatgaaagtgcaggataattgtccaaattaggccaaggataatggatgggtttccatcaatgatatcagtaacatgaatatttattagcttaattgatcggtttcttaggaatgtcaaggcatgttctatattgattctacactggaaggtattagatcctttatcccgaggcaactgttgcccagaaagtacttctagcagatccaggaggacatgcccctttttaatgtctgtgaataggtcggatataactgagggagaagtgtgcctggccaactgtgagtttatccagcacgtgaaggctttcttctgggtgtcttcctgttcagcttgcaatgaaatatggagatcgtcgatgccccaggaaccctgttcatcttcggtgggaagctcaggactagatgccattctttgactcaatggagattatatcatgtccatctcagttgaagaagtgaacgtccgcccggccgaggggcaagggcgcgggccggggccgcccgaggtcggcgccccgcttgcctggctctctggatcgcgccttttgctcgctctccctctcgctttttcaggtccggccgaaggctctgggcgcagctgagctcgtgcc

SEQ ID NO: 20733 - DNA, 477 bp, Homo sapiens
  misc_feature 1, 2, 3, 4, 220, 221, 222, 225, 476, 477: n = A,T,C or G
nnnnaaggaaatttttttcccccaaggggggggggccaattggaaattttgggggcaaaaaataacccttttaaatggtttttagccctaggggaaaatttttaaaaaaaaaagtttttaggggaaaaatagggtcaaaatttggggatttgggggtaaaaaaaaattttttgggggacagattgagaccctggctcaaaaaatttttttgattatgagnnngangaaggaaaagaaaagaaaagaaaaaacaagaaattagctcatgaatagccagccttatattataattatgtgacactttggatatttcaaagcacattcacaaagggtatgtcacttaaatacctcaaaatttccctgttatacatgcagatcattccccattcagccctggtatggactgaactgtgtacctgcccgggcgggccgctcgaaagggccgaattccagcacactgggcggccgttactagnn

SEQ ID NO: 20734 - DNA, 678 bp, Homo sapiens
  misc_feature 1, 2, 3, 4, 5, 6, 678: n = A,T,C or G
nnnnnnactgacaaataaaaccagcatgtcttcgatataaatgagagcacactatctaaggagatgcttcgttctcaggatgtggttgaaatcctgttatgaataaggtttacatccttgccactgaaataatatttttgtactgtggaaatcaatggtaaggaaaaaaatggacaggtcatctaatatgtaaacaatttaactttgatgtaatctcttgtttgctggatttggtcctggggaaagtcaaaggactttcttagttacttagttgaatctctcaccttttctctgtcttctcatttaacttctcttctcttaccttgcagagcattttgatgatgagtccagctgaaaatagtgttgtgtcaggaattcagacttacggcctaaccctttttcttgtggggaaatctttaggtgtataggactgtgctaatggtgatttaaagtagaaccagcagaggtttggtctgagcggaaggtgaaagcacgtattttatcaagtcgaagaaccctgtagagaatttggtgggttctatgtttcaacacagagctcaaatcttccgaggctcaagttccatttggctctgggcaaaaacacaagttccctggtttcaaaagggaaataagcaccttaaaaaaggggcccaggcctcttggcacatcaagcttacn

SEQ ID NO: 20735 - DNA, 546 bp, Homo sapiens
  misc_feature 543, 544, 545, 546: n = A,T,C or G
actactagttgtttcaagatataccaagaaacctcaggttctacatagctaaaaaagtttcttatattttgttaatgtcaatcaaacccatttttcacaggcaaaaatgtgtattttcatgccttatttgataattccatgaaaaaattaaaatattttagtcagcatattagaaatttattcttggagatgcaaatacgtattttcaaattgtaagtgttaaattgtggatataagaatcttcccacctattttttattttaacttaatattttcaaactttataaatatagataggataatttgcttatctttttttgacaaagccatcaaataatcagtgttgtgaataagggtatttctttggaaaacataaaaggggcacaattaatcagctgtcaacaaggaaaggaaacaaaattgggtatttaaataattgaacaggaataaatgcgtggagggagattaagttaaggaggggtacctttttcccaccaaaaagactactcacaaaaaagtaaaaatgcttacataaaacatttnnnn

SEQ ID NO: 20736 - DNA, 1973 bp, Homo sapiens
ctctcagtgtgccctaagccaagtactcgttctcatttgggtgtctgcactgttggaagctactgcactgtgtttccacgcagacagagtacagtgggaaaggctttctccagctgatggatggctgttctctttatttggagtatcttactggttatgtaagcgacctcgagagaaattatcctgacccagatcggaggatgcagtagtgcttcagctgcaggatttcttagtcgttaacaccacagtgctgatgacaaagagcgagttgtaatcctcatcactgccagggctgagccagagcagacagaaaatcgtcatttgctcgttggagacttgttaggttacagctcctgcttcgttctgtggtcttggcttttcttcctatacaatgacgccgctgcaagtgagctcagaaatgcttggtttgagagccatttgcctgtgatttttgaagactaaagaagtatttacactagatactcttccagaacaaaatagaaatttcagcaaatacttactgacctttaaagccttgttgtggatttctgagatttaaagatactttaaaattctcaagaacaaaactttcaaacctctggttgaaagaaatatacccagttcagtcactgcagtagaattccttgtagataagcaactggattttttaactgaagatagtgcctttcagccctaccaggacgacatagacagcctaaacccagttctcagggacaacccgcagcttcatgaggaagtgaaagtctgggtaaaggaacaaaaggttcaggagatttttatgcaaggtccttattccttaaatggatacagagtgagagtatatagacaagactctgccacccagtggtttactggcataattactcatcatgatctcttcacccgcaccatgatcgttatgaatgatcaggtactagaatcacagaatgtcgatccttctatggttcaaatgacctttctagatgatgttgttcactctttgttaaaaggtgaaaatattggcattacatcacgacgcaggtctcgtgccaatcaaaacgtcaacgctgttcacagccattatacacgtgcccaagcaaatagtcccagaccagcaatgaactcccaagctgctgtaccaaaacagaatacacaccagcaacagcaacaaagaagtatccgtccaaataagaggaagggctcagatagcagtataccagatgaagagaagatgaaggaggaaaaatatgattatatatcacgaggagaaaatcctaaaggtaaaaacaaacacttgatgaataaaagaaggaaacctgaggaggatgaaaagaaactaaatatgaaaagacttcgaactgacaatgtttcagacttttctgagagcagtgactcagaaaattcaaataagagaataatagataattcctcagaacagaagccagagaatgaattgaaaaataaaaatacttcaaaaataaatggagaagaaggaaaaccccataataatgagaaggcaggagaagagaccctaaaaaatagccagcctccctgggatcaaatacaggaagataaaaaacatgaagaagcagagaagcggaagtctgttgacactcagcttcaagaagatatgattattcatacgtcagaacagtccacagtttctgatcataattctaatgatttacttcctcaggaatgcaatatggataaaacacataccatggaattgctaccaaaggagaagtttgtatccagaccacccacaccaaaatgtgttattgatattacaaatgacactaatttagaaaaggtggctcaggaaaactcaagtacctttggccttcagacacttcagaaaatggatcctaatgttagtgattcaaaacactctattgcaaatgcaaaattcttggaaacagcaaaaaaagattctgaccagagctgggtcagtgatgtagttaaagtggatc

SEQ ID NO: 20737 - DNA, 595 bp, Homo sapiens
actcctcaaggctggagaagctacttggttgggttgtggcctactgtggtgccattgatttccccaaacattaagtccttgctgagcctcagccaaaatcaacagccgtcatgtcttcaattaccttggagcccaggctgccacggggaaacaggggtcacattcagccttacttggctccttaagcagcgacactatctgtgactaagcaagtgactggtgcgatgggggaggagggatgtaatggtggagctgtgaaaacttgcaaatgtgatcaccaaacttttaatcaatctagaaggaagctttttttttctccctaagtatttgaagtgcccactggtgtctttggggttggggaattaacataacttccttctctcacagtcctgtcttccagtctcccagtggggtttctctttgaaataagagttgtgtgtgtggaaaggattcagaaacaaggcttggaagccaagaagaaaggcaaccggccttcctctccaacgagtaaccaaatacagctgtaactttagacgggggtgcttgggaaaaggatttttattattttttttattatttttttaaaagtaagtgt

SEQ ID NO: 20738 - DNA, 488 bp, Homo sapiens
acgcgggagggaatttcatctctactgattgtctcctaaaatctgaaaaattgatgctttgccctaaaaaacaatctctcaaatgattgaggaaacaatggaataattgaataccctcaacttaattctaaattaagggagaatttgttggtcaagtgaagactgtgtatagctagaactgtaactgagaatttaggcagcagatttttaaacaatccaaataaaaaaaatttttgccccgcttaatacagagccagtgtctctgtagcacttggcccatggtagataatctaaaaatgtgatatgtgaaattccatgacttaagactgtaaaagactgcgtggtatttagtggacatagcaatattcatggaatgaatgaatgaatgaatgaaaaggtgattgagtgatggcctgtggatatgggaggctctaataataaaattctgacaataactgatacccaaagaaaaagagagtggttgtcta

SEQ ID NO: 20739 - DNA, 408 bp, Homo sapiens
tttaagaattttattcagagcctgtgctactttatttagcaatgagcgtcactgccttctcctgttaagagcaaatgctggttttggaaaggattaaaactctttgagaatgtgcttgctgagaaaattaaaaaataagttttgggtttaatttacaataatgtataatggttacagtggcatgtcttgtgaacacaaagtaaccctaaaagcagaataaagaaaaaccaatttaaaataacagtggcctcaaatgtatataggggcataaaacctccattgctttcatttgaaagttaaatgctgtgtttctaagcttggtcttcatgacttaacaaagaacccagatatataaatagacaaagaaaaaaaaaacagaccagttataagtcattatttaaatacagt

SEQ ID NO: 20740 - DNA, 460 bp, Homo sapiens
cacgcgtccggtggcagaagaagaagaaacatctgtgaagaagaagaagaaaaggggtaaaaagaaacacattaaggaagaaccactttctgaggaagaaccatgtaccagcacagcaattgctgtatgtttgtttttaattatcggttttcacttggaggggccagttctctatatttcaatctattttctatatcagaaatgagcaggcattttaaaaaatggttttcattgatggagaggtaaaagtgaaatggctttgttgtatttatattataaaaggccatttcccaaatctagaatttattactaaaaatcaagtttgcattgaggggaggagtatgatttgctcaagcttactttttttataggtggggtttttatattttcaatgtgattactcacccatacaatttcagctctttcaaagcattcttgttggctattttcagagtccaga

SEQ ID NO: 20741 - DNA, 372 bp, Homo sapiens
  misc_feature 370, 371, 372: n = A,T,C or G
catttcagtgtttgaggccaggaacttgtataagtacttctctttctatgcaggatctgaatgtgaccatatgagtaaaacagccatgatcatcttcccagtggaaaggccaccagtagttaacagttttgaatcaacaatacacctgcaaatgaggactgagctttgcatgcttcctatttcaggagattttccatccttttaaaaattccacacacaaatcaccagggctcctcaggaaaggttgctgagaacttgaaatttcagaccttcattcagaattctcttagttcgtcattatcttcgtgctctgctgaacaagaacttccatgagggaatcatcaaccacagaatcccgcgtacctgcccnnn

SEQ ID NO: 20742 - DNA, 388 bp, Homo sapiens
  misc_feature 377, 378, 379, 380, 381, 382, 383, 384, 385, 386, 387, 388: n = A,T,C or G
accaacactcttctgttttcctttctccttgcttccggatctgaggatgagcaagaatatcaacaccaattgttgacttaacctctctaactgttataataagttccttgaatttcccactgtttctttctttttttctatgtaggcttatatgaattatggcatacttgatttatataactgatatgttgctaaaaagttacaagaatatacttcctttgataaattaatatcagtgccatttattggaattctgtggtgaaacattctttaaaaacaggcaatattagggaaaaaagctctaactttttttgggggggataaatctgaattttcatatatcattgtagcttgaaatggaatgcaattaaactaannnnnnnnnnnn

SEQ ID NO: 20743 - DNA, 1074 bp, Homo sapiens
  misc_feature 1073, 1074: n = A,T,C or G
acgcgggaatcggaggtgaggcagtgaggcaggaggatccttgagtttgaagccagcctgggcaacttcagacttcaactagggagactcccttctcacaaaaaagaaaagaaaacaagaaagagcagcaggcagatgggaagagggaagcaggaacaaacgtccttgggccgtggaatctgtgtgtgggaggactcctcgctctgagactgacgtggctcaaggccacgtcaacactcttcctggcactccggaatccccctttttaagccccacagccttgtgcccttggagcgccgtttctgtccttcagtgggcacctctgttcagctcacgggattgtgctcgtctcgttagggacacacgcagtccacacagtgccgcgccacgtggctctgcagtgttggtgaacaggagttgcagggaactgaaagcccgggatcccagctggtaaagggagcctcagctaccgaccgagctgctgctctcatcttgagaacttctgattcccagccctgcggggaagacgtactggtatctgattgttcttacagaaactcaggatgaaaaccgaagaagaggcccggactcatacagagattgaaatgttccttagaaaggagcagcagaaacttgaggagaggctggagttctggatggagaaatacgataaggacacagaaatgaaacagaatgaactaaatgctctcaaagccacaaaggccagtgacttagcacaccttcaagacctggcaaagatgataagagagtatgaacaggtcatcattgaagatcgtatagaaaaggagaggagcaagaagaaggtaaaacaggatctcttggaattaaagagcgttataaagctccaggcctggtggcgaggcactatgatacggagagaaattggtggtttcaagatgcctaaagacaaagttgatagcaaggattcaaaaggcaaaggtaaaggcaaggataagaggagaggcaagaagaagtgaccaagttctcttttgtgttttctgctggtattctggaggtgggaaggacttggagagagttaagaaacacctggnn

SEQ ID NO: 20744 - DNA, 527 bp, Homo sapiens
  misc_feature 520, 521, 522, 523, 524, 525, 526, 527: n = A,T,C or G
accatttattaacagctttccttggaaactctgatatagagatacctttatatttgtcttctagggagtatattaagtaaaccaaaacatttacttttttggatgcaagatagaaaatgttaacgtttctttgctaatgacatgtcttttccataaaagtagcttgggttggctgaggactaatatcacacttaatagtattgctttctggtttctaggaagattgctacatgtgtatatgaagtcctgtagttctccttttaaactgactagttcctacatcggcttgggggatttatagaacatattttagatttatggcaattaaagcaatctaagagcacctaaattttaaactattttaactactcaattcagggagaaatataataagaaaattccccccatattatttgttatatagtctatttaaaatagcatagcaacttatattttatagtaagaattttggctggatgaaaattaatttaaatactagaaacattcatgtaagaaaacnnnnnnnn

SEQ ID NO: 20745 - DNA, 415 bp, Homo sapiens
caaacgcattggctgcttccaaaaacttggccctgaaagttgactatattttgccatcggcagatgttgttgttgtttttatcgttggagacgatggtatttttacacatttcagaaaggatcgctgaaatcacgaatgctttttaaaacacgctgaaagtgatcatttacattcagggtccaaaacaaggtgcacgtaggagccggcattgtatcttggcactttaatgagatgtccttttttcttcttccctgaacaagaacttccatgagggaatcatcaaccacagaatgaagccacctgtccttcttcactctcgctgggcgtctgtggctaccaattttcaagactgcccacccacctgttgtcccaaactgtccttttctctccttgagttgtgtcctctccccgcgt

SEQ ID NO: 20746 - DNA, 725 bp, Homo sapiens
  misc_feature 1, 5, 716, 717, 718, 719, 720, 721, 722, 723, 724, 725: n = A,T,C or G
natgnttcaccagaaagcaacaaaaaaatcacactacataatacctttctactgtcagaatctccctgatgcccatgccccaaagaccgaacagctgagaactccttcagcttaagagaaaaccaaatgtcttcagcaccttatagttgctgtgtataggaaaacatgggcagaagaggactgcaggaagagaaaaaaatagctaagaccaatggtgtactcttcagtaatactctacttgcatgcagcagcttacgtggagagaatggctgatgtattgggcattgtgagaaaaaaaaaactgacgtttatactttcctcaaattttggcagatttccccaaatataaacaatggagacaatttattcacacaatcatttcctagaacttcataaaataatgaagtaacaccgtaatggtgaaggttgtggtgaggaaaagaaggttggggaagaaaggaatgcttctttttattttctacccactcgacctcaccaaattactagggctcaattgagcccttagcaaacaaaacaatcaaaaatgtattttatgcaaatgaagctctttttagaccaagtacctcccaactgcagtgcttcccgcagcactccaagaagagtattccaggataagcagattctctaagtctcagtgcaactgtgccactgtgctgggacgggacgagtgatcgagtttttcaacacaaagagannnnnnnnnn

SEQ ID NO: 20747 - DNA, 411 bp, Homo sapiens
  misc_feature 1, 2, 22, 411: n = A,T,C or G
nncataagtccatcatgaatanattaaaaactttattcttcattagttttctttcccccaaatctcaagaatatgctttcaatatcatccatcagaatcatctgtggaggaaaggtcacagatctaattcttcattcaggcacagaggacattaacagctaatacacaatgtgagatatcatatataataattagggtgtaattatgttcatatatttccttgtagattctttaggcactagctgttcttccacttcaagaaatcacagtggacactgttcctatggttaccaggaaggatgcatttatggagatagctcaagaccataaaaggagtaagaaactaagccaaaattgcccgctggcctgataaagactttgtccagcactatttcttggttatccccgcgn

SEQ ID NO: 20748 - DNA, 650 bp, Homo sapiens
  misc_feature 1, 2, 3, 4, 5, 6, 7, 10, 39, 650: n = A,T,C or G
nnnnnnncgngaagtcttctagaattaattaacgcgggngaagagaaaaatctgtcatgatgggaattacatttattttttaggttggtgaatgtcattgttggctccatgtttagatttctgtataatttaaatttacattggcataaatgtaatttttttattatcagtttggatttaggtggcgagtagaaaaagaagtaatttcaggaaaaggtaattctttaaaatttttactttttaataggataaacttattttgttaagttactgaattggagtcattaagatcattcctaacatatacaagaaattattagctacaaaagtaaaattagagaaggtgtattcatgatacattattagcaaaggtctgaatataatgctttaatgattattacctttatacttttgcctttagaacattcagttgaatgttctgcatatttctaagtatgtagaaaatattttacaaattaaagatttcatagcaagacaactttcaacaaaaaagagaggtttatttttttcctttctttattaatttttggaataatgaattggtattactgtttttcagccaaatccacatttcaaaagtagaagttaaatatcactttaatcccaatagaattttggggcgggctagn

SEQ ID NO: 20749 - DNA, 304 bp, Homo sapiens
acttatcaaaaatgcctcaaaaatatttactgagtgagtcaggtaacaaaacgattaaaatgcttagccatcagcctatgcctctgttttttaagggctttttataagcaaatacgggtagaaaaacattggcagtttgagagtaaaataaacatatataactcaccaactgactgatcaggataattatctgggagtctctgggggtaaaaagcccccagtttgttccattttacaactcccaccatgggcctcagtcaggccaccaacatgatacaactaaatgtggattttgaaagggtgt

SEQ ID NO: 20750 - DNA, 471 bp, Homo sapiens
  misc_feature 1, 2, 454, 455, 456, 457, 458, 459, 460, 461, 462, 463, 464,465, 466, 467, 468, 469, 470, 471: n = A,T,C or G
nnacaaatctatcttaatgttactaacaacagatcagcgacaacaaaaacctcccaacattccaatatttaggtatttattggtgtccgagtttcctggcagtgtatgaatacatgggtcgaaatgaactggcctcatattatttcagggtagcatggctatgattattaaacaccacagacacccatttgcttatttttgatttttgacattctaagacatagactttttaaaaaatcttcttaaggggacaaatctcctaatttaagacctagataaacccaagatttaccagttttttgaaaaccagggatgttactttaaattcacaagaaacaccattctctttcagattttattacttcaatggaatgcgaggagggggttaaagtttacaaaaattggaaaaaataactgacaattagatactggcttacttgttcaaaaaaaccannnnnnnnnnnnnnnnnn

SEQ ID NO: 20751 - DNA, 304 bp, Homo sapiens
acagttccatctttggccataaggagacaatgatgtcaagaggctaaggccatatgatctgtaggtgaaaaacctgggatgagaatcaaggcctcaaactttttccactacatcacagatttaggagcagttagagggaaggcttcaatctggagaacactaacaggctctagagattattgggtcatggtggctgggacagaaataaggattcacagaaagatgtttgttgtcaatgttcttttacagtaaatgttcttttgagattttgcttgataaaaaggttgagcagaagtgaaaaaaa

SEQ ID NO: 20752 - DNA, 2587 bp, Homo sapiens
  misc_feature 1, 2, 3, 45, 2587: n = A,T,C or G
nnnatcacgggaagtcatttaacagatggcttaggagcactcagncccggtgtcttaaaaagacaaccttctacaattaatgaacttgcagggaaagcaaggcctaataatcatttatttttcatagaagatgagcacaacaggacaaaataaaaacaggaattgtgtaactggtcatcggaataaaagttttgtgctgctcagggattacacagtgttaaaaatattcaagaatgctgcagacaaaattgtatacgaatcactatgtatccttcctgattcatgacattaaaaaaaaaaagcttaaagaagtgtttgatgtttcaaaggtaatgatttcattacaatctactcataagattaaaccacaaaaactatatttaaatggcattaagggtctgaagtctatcttctggagaattaccaggtattacatcattctgtaatatagtgtgagtctgtggtatttgggtatcagtccattttacttaaaattacaaacatgtttttacactcatgtgcagggagcagttttttttatcatttggccacttagtattttaagtggtcaaagtctacaaagtatgccaaagaatatttcatctgtgaacctcaatatgcatagatttttttcctgatttagaaaagatcaaaggtgctaaaccttagtaaaactgtacatttatccctatgcaattttgtcatttaaattaaatggaaaaaaaactagttccaaagactgaatatgagtcccaatattatttatttgctgcagccccagcacaattttaagggcacattgaaacccctgaaaatagaggtttataatagaaatactgataaacctttaactactagaggaaggcattaacagattccaataaactacagtaacacgtaatgaatgaatatatagatgattctgtctttgttatctttgtcaaatccatgccatcttaaaccctaaccagtataaattatactttttctggctgtttttaaaatttttatctattattttaaaaattattttctctattttaatcaaacacttgaagtttttagaaaaagatacctatgttacattgcagcttcactttatgcaggctcatcattccattaaacaatatttgaagactcgaatcaatcaaatacagtctgtgatgcatgcattgtacctaaatttcctctaaccactctcagaaactgaaacaatgtctttgctcttaaaagagaagagacttcagatgtaatcaagaaaacattgtgtaacttgcctctaagctcttcagagccaattttactatggcaggatattccttcctgataaggtgattaatgaagtttttggtgctcacttttctctcatagtctataagctcagtataccaaaaaaaaaaaaaaattagataaaataaaacaaaacccccaataggtcttgaaaataatataaatattttgtggagtcccagtcacataatactccactcccaaacccagagaaaatgatcaaggtcttgtgagtctttctgagtccttcaaaagggatttgatttccataagccatgaattccatccgtttcagcacagagtatagaagagatgcttagaacaacagaaggaagagacatgcggggaagataattagtggtaaacagagaataaattctctctcagtagtgtgtacttgacgttaatgccgatgataattcatctgatctacagaatattcactttaatagagagatgagagtctgaaatgaccagaggaaaatagatactgaagccaatatagtcttgataccaaaataaaattaaaatgagaaactaacatgataggttcaaggccttttgggagcctgttttctttgccagatttcacattcttacagcttcatggtctttttcttctaacaaattaatcagctgagagaagctgtctttcagtgcatccatgtcatccagtgagcagggctgtagaatccagcgttttccacgtgcaagtggttcaagttcaaaatattttttgatctcttgtactgagcgagctgctggcttgtcttgatgattggccaatattaaaaagggtaaagtgcataactgtggatgctgaagagctgagtgcagctcatttctagcagcttctaaatcatcctctgaagaggcactgtctaatacaaatattaccccttgagatccttggtagtagcggctccagtatttccggatgttatcagcccctccaagttcttttacattcaagatggcattctggaatggcactgctttaatactaaaacctgtggtcgacacgacgttatcggggctttcactgcagagtttggacaacagactggttttgccagaacctgtgaggcctatgcaaaccaggtcatattctggtcgtgcaggtggtggtcccttgcagcaaagtgctctaaaacacagataatccatgtacagaaacgcctcagttatccggagatcagacatccggcagcctaaagcatccggaacggctccgaacccggaaaaaaaaagcagcgtctctggctgcgagcgagcagctcctgaaaaagccagcaan

SEQ ID NO: 20753 - DNA, 281 bp, Homo sapiens
accatgtccagccaaggaagtcctagtgttgcgctttctacgacgacagtcagttcagttgctgtgcaggctggggactccaaaatcgttatagctgtcataaaggtaagctaacaacttccttttttctgtgcggctgtgggcttctagctgtgtgttgaaaaccctaaagaacattccatgcaatcggcaggacacagcatagagaagacaacgcagcaagcactcttactgctttctaaaatgggctactaagagaaacctctacaagtttcagcagt

SEQ ID NO: 20754 - DNA, 469 bp, Homo sapiens
cccttggccgcccgggcaggtactaattatcctcttctagtctctttgttaatgtgcaatgtcctgaaagagtaaaattttaaaaaatgaattaatttacatacaaaagcagtggcattgaaattaaaaagaataatgtcaaaagaacaagaatacaaataaacaataaatttcaaagtagcaacagacaaacctgaacaagaacttccatgagggaatcatcaaccacagaatgaagccacctgtccttcttcactctcgctgggcgtctgtggctaccaattttcaagactgcccacccacctgttggcccaaactggccttttctctccttgagttggggcctctaggcactaggaatctaccaaaccgggacctggcccagcaccaggatcctcccaggactgtgcaccaaataccaaggcagggcagcactccagccaactcctccttatctgaatccccgcgt

SEQ ID NO: 20755 - DNA, 755 bp, Homo sapiens
  misc_feature 1, 748, 749, 750, 751, 752, 753, 754, 755: n = A,T,C or G
nccttgccaacccccttgaggagtgtgtattctccagagggcagtgggctactgctggaatatggtaagcagggaaagaaacatgttgatgtatgaattttagaaaagtccctgtggctgctgtgtaggaagtatgtgtcagggcgagaagcactaggtcatagtagttaagagtgtagatcctgagccagactatttggattgaaattttgactctactacatactgattctaatcttaggtaacttccctgtcagatgtcccatctataaaatagacatggcaatcatagtacctaactcatgggattgaataagttaatgtatgtgaagcacttaggacacagtgtttaccatcatcactattattcctattgtaatcttgttcagaggtgagggtgcctgaattaaggcagtagcagtgaggatgatagaaagaagtggccagatggaggctctacacaggtgatagaattgacaggaatttatgattaattggatgtcagaagggtagataaaagagaataaaaagttgagggtgattgcaggttttggatttcatcagttgagtgaatggtggtttcagtccctgaagtaaggagacagtcagtgaaacaggcttgtgatgtgaggtgaatgataggttcagtttttggtatgttaaatttaggtactagagagatatgaatagaaatgttcaggaagaagttgcctgtaagggttttgagttcagaaaagtgatacgggcnnnnnnnn

SEQ ID NO: 20756 - DNA, 838 bp, Homo sapiens
  misc_feature 1, 2, 28, 41, 797, 831, 832, 833, 834, 835, 836, 837, 838: n = A,T,C or G
nnactggggtaccgggcccccccctcgngggtacttctagnattaattaacgcgggggaataagattctatattattgcatccacagaaaagaatgtactgatatactataaactctaggagaaaacttaattgaaatagtgttattaagtgttgaaagtaccataaaaatataagggaaaataagctttcctagaatttttcagtgttctagtttttaaacagtgatgttttttattaacctatttcatccattcaaagacaggcctttctccacaccacattttcctctaaaatcatgataacacttttaaattgatggtgtcttccagtgtgtatcagccagatggcagtgtgttacagttccaggaaaactcgttcacatcttccgtaagatcaagaaggctctggcatcagataagatcaaatgttgtctttctgttttaaatatgtgccgcaaagagatttgcttacaatctattgagaaagctaaaacagagcagacattgtcctgttgcggggtagatgaatagcctaagaatagtttagacaaattctgaaaacgaatttaccttagaagatgttcatgttagatctggtaaaagtaacatgttatttttctgtcaagccctttttgtacttgccgtttattacatattttagatttattttttattttcgaaacatccaaaaaggaatgctaattagtgaaatggaagaatttccatttcaacaccttaggaaaaaaaaaactgacttgacatacctaagcgttgttacctagataaatgtaggttngatttcttggaaagcatcacttaagactttccannnnnnnn

SEQ ID NO: 20757 - DNA, 2937 bp, Homo sapiens
  misc_feature 1: n = A,T,C or G
ngacttcgcttttaaaagagtattgttggtttccctttgcaacacccgtgctgacaaaccccagccagagcttacctaatgaagaacgctgctcaactgctaagcacaccaagggcacagccttcaatacaatgagagctgatgctaagcaagcactcgtcaattccccctcatgccatgacacagacatgagcatcacagactcttcctgtcctctggctgccttctgaggcttgtggctttccatgatgaagaatggaaatcatgacacaacagtggcaacaggcttttagtatcatctagaaacctcccctccctcacatggaaagaaaacatgagccagtgttttcctccttgtcttctgaggtgctccagtagatgccccagacaggagagctgaaccttccctaaagcaggatccgaaatgacaggaaatgcccacaaactgaatgcctgtggctgccactgtgacagcctgcacatcatcctacgaacagacaaatcagcttcagcacaattggagttcctgggggtattcacttctactctcgcgctgctcaaaatgtccaggctgtccagcctgaatcataagcatagcaattcttaatattattctgcgcagcagaaggggtaagtggtaacatctcactaatcaaaacacacaggagttactgtgtctttacaagacattctactttgaagggaaaatgggaggcgatagggcaaggcacaactaaagaaagtgagagaggtggctcagggtatggagaagaaggtagaccacacataagttcttttcacttgaagagtggatagtggataaacttgaaacagcttttattactcacttacatccctggaaaccaacagatgggatctctcattgccaagttctaatgtatttcatgttcatgctcggctgcaggataccaggtttgccaaataccaataagctgttgagagtgaggtgagtatcaagaatctatagctagatcgtctccctccattgcacaaggaaagtactcactctaggtgaatttccacaaaaggcagtaagtatgtgggtccacagacacggacatggaagataaccagtgtccataagaaatatttccttttttagtataaaaaatatagtggctacccctaagggtaatttacatctattccttgaaagggctcattatgagtactgcagcaactaattattatcctgatggatagtcaacagaatagctattatgttcaaatattaaggcaacctagaaaataaacctcaagaaggttcttttctgtttcattctgatcatttttgaaatcagtccttgaatactaggccccaaaactcttgagatgaaaagttttgattcctatcaaccagccaccttagtgcctgggcttctttcttggattgttcaaagctggaaatccacatctctcgcaaagagctcaaaggtggagtccggagtggtgagaaagcaaacactgtgggctctgggcaactcaggtgggtatcttctgcctcccatcttttgggtggtaagcccttttcctgaagcctgatattagcccacaccttggtgcacaccatacactcaaatgcatcgatgtaattgtcctggttgacgtcttgcactccccatttccgttccctgagagctgtcagaagtcgctggttagagatctcacccttcagcttccattctacataggcctcatacaatctgtcatcagaatccagtcgtctgatgtaacttgccagttccctggggtgagaaaattctgatacaagaatagcacttttgttacttggaagccagtctgtgatgctgggggatccgtaatatacagggactacccccagtttcagtggcctccagaacttctcagtgatgtagtcatcacaaactgcattctcaaaagctaggataaacttatactgtgcaatgatcctataaaagccatcggcatccatagaggctggatttttcagctgctgagggaggtctttgtttcgtaaacattcaccataggaatcgacctcgatgtaagtcatcagctcgcgaacatagctgtccctgtctgatggtgggtcacagtctgactgtacatacaccagcggagcaagtctttttctaagcttgtttttggactgcaaaggaactaggtatcggagtgacttcaggacttcaatgctctccaagtattgggtagttagtggcaagtgggaatgcctgctgaacgtggcagtgtagttgaacaaggtgatcactggtttatgaaagagcttataattgtttttcggggactcttcatgaaaaacagcccagtcatgatgggctttccgaggcagaggtaagctatctatgttaaagtcagtaccatagaagaggaatgctttggtcatgtgatgatggaggtaggtccggttgatggtgaagaaacaagcatctgctccacattggcctaacctcccagtctcccccgtcagcggggaccaccagagcataatggggtagctgtccactgcgatcccaccctgttgaaggtcaatccttctttcttaagaaatgaattaagatgcgtaggtgcttcctccatttttgtatgtccatcttgcaaactggaacttttaaactccttcctttcaaacttccccagctcaaccatgacctcttttatgtgctcgctgctcctggtgttagataaaggccactgatcattgaagcattgcatggagtctgtaactccctggggagggcccgtgactttcattagattctcaacggtatccaaggccaaaaaagaaaaaaaaaaaaaccactgagtgaaagccaagcagcactccagaaggagtaagaaattatattggctttaaaaagtcatggatcacctgagacgccaaagtcaacactagagcagcagagcggacgcgtg

SEQ ID NO: 20758 - DNA, 393 bp, Homo sapiens
  misc_feature 393: n = A,T,C or G
actatcactgaattgaatgagattttagtccaaaccaaaaagtaaatattttttaaagtaaaatatattaatggaaggagagtttgctataaatgattgaattaatgtgacagtttaatttatgaatttttatagacatagtaaatgccttctcaaattatataaatgatttcataagtggtccttatgtgcaaggtaaaatgactgctttatctctctgatataaataaatgtgaaaaataactttgatacactttttatttgtttggatgattatttctaatcctggtgagtgaaaatgccatctggtgtgtccttttaacttttctattatctcttaaatctaaaaactttttcatttaaatgactatttccaggcaatctgagattcan

SEQ ID NO: 20759 - DNA, 764 bp, Homo sapiens
  misc_feature 1, 764: n = A,T,C or G
ncgaattggtgctcgacaacggcggccggccgcccgggcaggtacttggaatgctgtgtggagtcctttttctacttttgttcctgagaaagagagattcacaaacttcccacattcttccagtggcatctaaggatcccttcctaaatggcctttctcccagccaatagactgaagcaaaccatgtccctgatgcttcctgcccaccaccatccattctttcaaccaacagcttctccgggctttcacgtgccatgcactttgctaagagcttgagggaaatacagcaatgaagaagagatgatttctgtttggaccagtgctcagggattcctcctattagaaatcaaagaggcttccaaaagccctacaattttttccctgtaactaaagaaaatagcttctcaatgtaactaaattttatctcatacgcaaattggaatgtataccctttcactctgaattgcttgaaatattccaggagaaataaatacaactctgtgtaaggtcttctaaaaaagcagaagtcaaagtcaccagaaagaacctttaaaatcaactatgtttctgacaatgttgctttcgaaactgttaccccactcccgcaaaatcaccattgaaaaatacctttgtggtgtaattaagattaatcatgaatgcactgaatgttcagaaatgagtgtttttgtttttgttgattaagtgggaagttacagttagcaaaaatgccttgtacctcggcggccatcgcggtgaattccaan

SEQ ID NO: 20760 - DNA, 547 bp, Homo sapiens
  misc_feature 527, 528, 529, 530, 531, 532, 533, 534, 535, 536, 537, 538,539, 540, 541, 542, 543, 544, 545, 546, 547: n = A,T,C or G
acaatggtgtgatttcggcttactgcaacctctgcctcccaggatcaagcgattatcctgcctcagcctcctgagtagctgggactacaggcatgtgccaccatgcctggctaatttttgtatttttagtagagatggggttttgccgcgttggccaggctggtcttgaactcctgacctcaggtgattcacctgctttggcctcccaaagtgctgggattacaggtgtgagccaacgcgcctgacctacaatatgtatttctgagaggacatagcagtcaattgtatgatctctaatataattttctaatcagagacagaaaacttatttaacaattttcctttaagtgtggttaaaaaactgagtgggttttgggaagatattatacttgagaaaggacttggattagttgggttgcctttgttgtcttcatgtctgataagttatcttactgtgcctacctaatgaagattaacattacttatgaaatgtttgattttaacagaaaccattgaccatttactgnnnnnnnnnnnnnnnnnnnnn

SEQ ID NO: 20761 - DNA, 1355 bp, Homo sapiens
  misc_feature 1, 2, 3, 4, 5, 6, 7, 8, 9, 10, 11, 12, 13, 14, 15, 16, 17,18, 19, 20, 21, 22, 23, 1040, 1041, 1042, 1043, 1044, 1045,1046, 1047, 1048, 1049, 1050, 1051, 1052, 1053, 1054, 1055,1056, 1057, 1058, 1059, 1060, 1061, 1062, 1063, 1064: n = A,T,C or G
  misc_feature 1065, 1066, 1067, 1068, 1069, 1070, 1071, 1072, 1073, 1074,1075, 1076, 1077, 1078, 1079, 1080, 1081, 1082, 1083, 1084,1085, 1086, 1087, 1088, 1089, 1090, 1091, 1092, 1093, 1094,1095, 1096, 1097, 1098, 1099, 1100, 1101, 1102, 1103: n = A,T,C or G
  misc_feature 1104, 1105, 1106, 1107, 1108, 1109, 1110, 1111, 1112, 1113,1114, 1115, 1116, 1117, 1118, 1119, 1120, 1121, 1122, 1123,1124, 1125, 1126, 1127, 1128, 1129, 1130, 1131, 1132, 1133,1134, 1135, 1136, 1137, 1138, 1139, 1140, 1141, 1142: n = A,T,C or G
  misc_feature 1143, 1144, 1145, 1146, 1147, 1148, 1149, 1150, 1151, 1152,1153, 1154, 1155, 1156, 1157, 1158, 1159, 1160, 1161, 1162,1163, 1164, 1165, 1211, 1212, 1213, 1214, 1215, 1216, 1217,1218, 1219, 1220, 1221, 1222, 1223, 1224, 1225, 1226: n = A,T,C or G
  misc_feature 1227, 1228, 1229, 1230, 1231, 1232, 1233, 1234, 1350, 1351,1352, 1353, 1354, 1355: n = A,T,C or G
nnnnnnnnnnnnnnnnnnnnnnnctgctctctttctcccagtcgttagccctctctttcacccttttgtcttctctacctttatctgtttgtgtccctttttgtctccagaacttcacatcaatgtagtgctcccaaactttggcagttgcaactgatcgtgtgataaatcattcaggccaagtgagagacagtaagagaaatgcaaaagagcccatggccttgtgacactacttccagttctaccacccacccgggggaacttccttcttgatccccaaaggcaagttgaggcaagtaacagttggatgtcaccctgtttatcctgggaacattggcctgcagtcaacagcagaagtgcatttttaggtggaagatgaatgtctggatagcagtctctgatggagaggcacatgtgtccacatggatctctctctgaattcaggtggaatgaaggaatctgttctatttgggaacttttctgctactggcacttccaagaggagaagcttctcccaaagttccaggcttggaggttcatcctccccattatctttacattctgtgtcatgccaaggaaaaaagacatgccacctattaccttgagaagttcccgtaggtcccttactattcttaaactctacaaagtgggtgtgacccccatccctgtgcatgctcctttgttaactttggccactcattcttcacattcttgaaagcgccagaacccaccaataaatggccgggtcctctgcttaaccagattgtttcctgcaaagcgacatgtcctccaagcttcaatctcacatgccatgttggatctggcctaattccacctccaatacagaggaggcatggagatgtctgggttaatgtgccaggtcataacggcacgagagcgggtgggaccgggcagccagttctcaaaggctgtggggccgactggaggccacagcccctcacccctagacgttgccaaccagaactgacgtgtgacctcctgggtgttgatgccattaaaaccaacgttggtgcccgggnnnnnnnnnnnnnnnnnnnnnnnnnnnnnnnnnnnnnnnnnnnnnnnnnnnnnnnnnnnnnnnnnnnnnnnnnnnnnnnnnnnnnnnnnnnnnnnnnnnnnnnnnnnnnnnnnnnnnnnnnnnnnngggtggctttaaattgtaaaaaaaaaaaaaactttcaaactttccnnnnnnnnnnnnnnnnnnnnnnnntgcactgtttaaataaaaattgtaaatttaaaatttaaaaggaaaaaaaaaaagttctcgttttaaaaatttaaaaaaaaagtttttttttaaattaaattaaaattggggtaaannnnnn

SEQ ID NO: 20762 - DNA, 1212 bp, Homo sapiens
  misc_feature 1, 1212: n = A,T,C or G
nagctatccctacaaacattcccaccatgagtctgtggtcagtcacttctcttctgattctcaggggacagtcatctataatgtggaaaatgattccatgtctcagagcagtgaagatgcaggacacctgactgatagtgaatgtaatcagaaacacacatccaagaaagggtcactgatagagcgcaagaggagctctggtcgggttaggaggaaaggcgatgagccccaggcctcgggataccacagtgaaggagaaacactgaaagagaagcaggctcctagaaatgcctccaaaccatccagcagcaccaacaggctgagagattttaaagagacagtcagcaatatgatccataacagaccatccctggcttctcagaccaatgtaggctctcactgcaggggcagaggaggagaccagcctgacaaaaaacctcctaggaccctgcctttacactctcgtgactgggaaatagagagtaccagcagtgagtcaaaatccagttcttccagcaagtatcgtcccacatggagacccaaacgagaatctctgaatattgacagtatctttagtaaggacaaaaggaagcactgtggctatacccagcttagccccttttctgaggattcagctaaagaatttataccagatgaaccaagcaagccaccttcttacgacattaaatttggtggaccaagcccccagtacaagcgctggggcccagcacggccaggctctcaccttttagagcagcacccccgactaatccagcgaatggaatctggctatgaaagcagtgagaggaacagcagcagccctgtcagcctggatgcagccctgcctgagagctcaaatgtctacagggatccaagtgctaagagatcagctgggttggttccttcctggcgtcatatcccaaagtcgcacagcagtagcatcctggaggtagactccacagcatccatgggtggctggacaaagagtcagcctttctctggtgaggagatatcttctaaaagtgaactggatgaattgcaggaagaggtggccaggagggcgcaggaacaggaacttcgaagaaaacgggagaaggagttagaggcagcgaaagggtttaaccctcatcctagccgcttcatggacttggatgaactgcagaatcaggggaggagtgacggctttgagagtccctgcaagagcagagtcan

SEQ ID NO: 20763 - DNA, 872 bp, Homo sapiens
  misc_feature 867, 868, 869, 870, 871, 872: n = A,T,C or G
gcgtccggcaagaagcacccgtgctgtgtcttatccaatcccgaccagaaggattctggacaatcaggaagtccaagccacaatgatcctgccaagaatcctccaggttaccttgaggatagttttgtaaaatctggagtcttcaatgtatcagaacttgtaagagtatccagaacgcccataacccagggaactggagtcaacttcccaattggagaaatcccaagccaaccatactatcatgacatgaactcgggggtcaatcttcagaggtctctgtcttctccaccaagcagcaaaagacccaaaactatatccatagatgaaaatatggaaccaagtcctacaggagacttttacccctctccaagttcaccagctgctggaagtcgaacatggcacgaaagagatcaaggtgagtaataaggagatgcctctagagaccatgagtaaaatgttggctcgtttcttaagtttcgttgagtcaaaatttcataattaaaccaatatggattgtatatttttttcataaaatgattcctgtagaattatttttgagataatgttagtcaaatgtcgtcaaagttaatttatccaaaatcttatttttacatgtttcgttggagttttttttagacaaaatgatattttagaacccacaattatgtatgtgactgattatggtctgtctacatttgttggttggagtacagcagaaccacaaactgtgattcaattagatccgcctgctcctctctatggagcgttgcagggagccaaactttaagcagtttgcaagtgccaggaactgaaagttgtcatttaaaggaacctgcaattccttttggaagtaagtagaccatatannnnnn

SEQ ID NO: 20764 - DNA, 399 bp, Homo sapiens
  misc_feature 385, 386, 387, 388, 389, 390, 391, 392, 393, 394, 395, 396,397, 398, 399: n = A,T,C or G
acagcaattaaaggttattttatttctccaaacttaagagaaatagtatattctataggttaaaaatgtaaggtctgccgtcttatgatagtctcaaattaaaaaaaaaacaggccaaaactatcacatatttaatatatttcactcctagattgtgcaaatctgaggcttatccaggtccactaccctttgctcattgtctctcaaaaagcatttaggtcagacagagaatatgaacctttttactctgccttctaataaaaagttacacagggaaagaaaacgttatgtacacagtgaaatttggtcagaggaacttctattttcttcttctcttctacctatattgacataaatagagattataccaaacaattaatgatcnnnnnnnnnnnnnnn

SEQ ID NO: 20765 - DNA, 416 bp, Homo sapiens
  misc_feature 1, 2, 24, 416: n = A,T,C or G
nnctgaagactccatttcccttanatgcctgtcttgaacctctcttaaccatagggtctggtttctagcaaaggattgtcagacttggggcaaaatctaattttgaagagtttttatagatttatatttaatatgttatattgggaaaaattaatatatttttcaatgctctttgagccacacatactcaaaattgggttttatcagccgtttattacactgtgcctaagtccatagtaatctgcagtgaatcatttagactggaaaaaatagcttaagaaacatgactaaatcttttgaagaaatacatgaaagcaaaaagtattctaataggatttcttatagagtcaacataaaagatgcattaaaaatcgaatagtcttggtttcaaatactgtgtgatggcagaaaactcn

SEQ ID NO: 20766 - DNA, 1746 bp, Homo sapiens
  misc_feature 1746: n = A,T,C or G
gtgctgggattacaggtggcagtctttatttctgtcatgatgtttttgatttctagcattttcttttgattctttcttagtgtttccatttctctgcttatattacctatctgttcgtgcatattgttctcactttccattaaaaccctttgcatattaatcatagtcttaaaaattcaaggtctgatatttccaacatctctgccataagctcagtttggttcttatgcttgctttttcttttcaaattctgtattttttgtgtgtctagaacgtgtggtaacattttattgaaagtgagacatgatgcactggttaaaaggaactgatagttaggcctttagtgtgaggtttttatctggcccgcggttaggctgcgttttctgtttgctgcagctgtcagtatcagaggctaaaatgtctccagcgcccttgttttggtctcccttgttgcctttgggttatcctagagacttcttgaagtttgagacacacagttctttcagttatattctcccctaactattcgggatctctagtgctggggtaagatatgcagggaggggaaacatcacataatcttatgagtatgtctcagtctttcagtgaaattgtgaccctcacaagtgcttctgagttttgtactggtttatcccccttagatgagacagaaaggctagagcaggttggagttgggtatttccctttccccaggtcagtttgtctctggtaaaacctcagctctggtaaaatagtttctcctgaggttgggctttatgaagaaccatacgctctgggcatatttcagaatggctaatttccccctcccactgctggaagcatgaagggattttttttcttagatcttcactgtgagaacctgttatggcttcaggaggtaaagctcatgaaagtgtgtgggttccgttaaaactgggccatactggcatttttactgtcagtgtgcgtgagcactcagcaggcactaggctcagtgacggggtcagttctgtgccttagcttcctcctgtgtgttctttccctaagcagtcccatggggctgagacacagcatccataaccctgatgaagtgtcatcattgaacatctacaaacactgggccctgaatggagcttagttaaactgccttcatctactacctagctgtgccagggaccactatttaagagacatgaaaagaaatccagaatccccaagtgtctgtattgcctgggggtgatcatggactgttattgacctcttggtgtttggaaggctgcttttagatactcctgaatctgtttgccacataactacatgtattacatatttcatttgattactttcttagttatggttttcttttcttctttttggagatggagttttgctcttgttgcccaggctggagtgcaattgcgcgatcactgcaaccttcacctcccaggttcaaacaattgtcctgcctcagcctcccgagtagctgggattacagatgcctgccgccacgcccagctaatttttgtatttttagaagagacggtgtttcaccatgttgaccaggctggtctcgaactcctgacctcatgatctgctcaccttggcctcccaaagtgctgggattacaggcatgagccactgcacctggccatatttttttttggagatagggtctcactctgctgccccaacttgaatgcagtaaagtgatcatagctcactgcagcctcaaactcttgggctcan

SEQ ID NO: 20767 - DNA, 331 bp, Homo sapiens
  misc_feature 331: n = A,T,C or G
acttcctccattcagcaccaaagtctcaggggcctacctgtcactcctacgggcactcgacaatggcatgggtgaacctcaacaatcggggggcatacggaatttcagataccaccgtggaggaggtatacctcaatatttcttttttttcttcaagctgatataacttgctgttccctttgaagaaatatgtgccatttttctaaaaaaatttttaaaatagttcacaaaattagaaaagcttaacattttttcagcactattcttatgtaagactgagaataaaatgttgccccaactagacagcacgtatcttttacatacagaaatn

SEQ ID NO: 20768 - DNA, 663 bp, Homo sapiens
  misc_feature 660, 661, 662, 663: n = A,T,C or G
tccaccgcggtggccgagcggccgcccgggcaggtacgcgggtgactttgagtcaacagttattcacgttttgctgaattttattttgtatttatatgtatttatgtgtattttattttgtatttatgtgtttatgtatgagtcgtgtgtatattttgttgaacaatttgaaagttacttaacactttgaatgtttatataacaaatacatgtcctatcattgttcttgacattcgtgagacccttgataataatatttgtttaggatgtaagaaaatccaggcttctatcttggtggctatttccactttgtgagaaggacaatctgcctttgcatgtttatttcttcctcgttttagggtcagagtaggcagatattggtatcatgtatcaattattgttaactggtcttctgcagctagaacagaaagaaatacattgacttatctctatttgctaggtcttgtgctgagtcatgttgcattataccatttagttcttttgttgagctcctttatttccattttgtagatgaggagactgaggcttagaggtagtatggtgcacctaaggtcaagcagcatcaggatttgtaccttgttaactttatgtacctgtttctgtgctcataacaagcacatagttgatgatcaataaaannnn

SEQ ID NO: 20769 - DNA, 562 bp, Homo sapiens
  misc_feature 561, 562: n = A,T,C or G
acttcttattagtgaataatgattctctagtcataataacttagacattacatataaattttaagttaaaactactataacaatattgggaaaaatgaaaaaggggagtagatagtgtaaaagggccatatccttctctaccacagcaggaagtgaacagataacgtctcaaatcaaaaaactgtagtataggctttccaccccagctctgccccgcccatatagatacctattacagaaggagggaaatagcttttaaaaaaggagagttaaatgaaattgcctgtaggaagtaggaggaatacttccgattttgtcataagcattgtaataccattttactttttcaaccatgtgtatgtattaatttgattttaaaaatttaaaacagaaaatgtagaaaaattttttgtgactgggaataaatataagatctcaaatcacaagcataaggtgaaaatattcgtgggctttatatcaaaattaaaaatgcttttacagtgaaagcattgttaacagatgatgacagactagtggaagatatctgcaatgtttaccacnn

SEQ ID NO: 20770 - DNA, 661 bp, Homo sapiens
  misc_feature 1, 2, 3, 144, 659, 660, 661: n = A,T,C or G
nnncctgaactgcctggacttataaatgtatgaaaatgccgaaccagacaccatggcaaaggcagactcgaagctaccagcagagatttaccaagagccacagccagagaccgaggaagaggacttaaagagtttactctttgnggctaagaacgtgcagctgaaacctggcgggacgtcccaggaaggaattgccaaggagtccaagagagacgtaccaagcgaaactgaaccagggatacaccaagaggtaaagtcggaaacatccagagagatgggagagtttttcaaagatttggaggcccctatggatgaaacgcataaagagtcagacctagagccaccagaggaggctaaaccaaatgttacagaggatgtgttcctagagtcagctatggaaacagatccagatccagtgccaccaacggaaaccatgtctgaggtttcgggggccacagtcagagagagaaatttagaattactagaggaggagactgaaccgggggttccagaggaatcacttagagtgcaacatgaagagacaggtctagagcctccagagcagacccgacaagattttccatagtgagaaatctaggagaatcacttgaagagacagatcttcagccaccaaagatgaccaaccagatacctccgannn

SEQ ID NO: 20771 - DNA, 399 bp, Homo sapiens
  misc_feature 399: n = A,T,C or G
acgcggggaagcaagcctgggcaatggcgggcgccctctgctaaccttgctgccgccttgcagtttgatctcagactgctgtgctagcaatcagcgagattccgtgggcgtaggaccctccgagccaggtgtgggatatagtctcgtggtgcaccgttttttaagctggtctgaaaagcgcaatattcgggtgggagtgacccgattttccaggaaggcactggaggagtttgcagaaatgaaagaaagagaagagaagaaggctaacctcgaaagggaagagaagaaaagagattaccaagcccgaaagatgcattacctcctcagcacaaagcagattccaggaatatacaattcacccttcagaaaagagcctgatccatgggagctgcaattacn

SEQ ID NO: 20772 - DNA, 397 bp, Homo sapiens
acgcgggcatcaacctatattttttgacaaaccctcttaataagttacatttcttttttaaaagagcatgataaagatattttcagtcagtaaaaacaaatttttctaactgcagacccaatttagagatataattcaggcagaaacagttatcagatgaaagaattgagctgtaaaaagaaaataattgaaaaaaaacccagaaaatatgtcagtaaaaccaaataattattgaatatacaaagcaataataaaaatttacgaggcttaaaattgagaaaaatctaaaatataaaaataatgtataagtcagaaataggttgatcagggttaacgtgttacaaaattcttgtattgttcaagaggagggtaaagataagaattgactttaaacttt

SEQ ID NO: 20773 - DNA, 1682 bp, Homo sapiens
  misc_feature 1, 1681, 1682: n = A,T,C or G
ncgtccggatgctaaagggaatttttcttaaaacatgattttcatcttatagatgataagtaactgtatctcttcatttggaattgttgcatcccagtttttctccataatggataaaattacttttgtgtccttttctattctaatgtagaagtggcttttccttttttctcttgagtcacaacttgaattaaaaagggcttcagcaggactctagcgctttttaaagaagaatttggtgtattccactatgtaacgtagtctctgtccaggaaccaggaggatgagtgtcctcagttttcctaatacttggtaacatttaataatagattgagttttgcttttgtttttcatagagactgtatagactctgtacttccatgtaactttctgccttaacctaaaaaggcattccctggaaggagatcttgtaacaggaagaaaaagcgaaaccaggaaaagagccagaaaggatcaacttggagatgggctgtggctaaatagtgggttttcctgaaaagtaactgcaaccttgcttttcgtgcttcttcaaacccaaaagaacctaaagggaatttttaaaaatcctgattttcttcttaattgtaaaacctagaggatgccttagggagaagaaagataacctggaatttggttttaaatggatttaagtaaactttgaattaagtagcttattccatttttgagagatttctttttaagattttagattcacttaatgtaatgttgaattgccatgaatgtaacctggagtttgatttgagacattctgtgggataaggaatagttttctattgaactgtggtggcttttgccactaatcaggatttagggctgtgcacctccatctgttaagtgaaatggaacttggcttcctaaacactatattagaccaacttgagtcaatacttttattaagtttaatcagggattctcaaaatatttaggattcaaattagcccaattagaaagcagtgcattaaatgttaccaaaatatctgaagatactttagaactattttacacaaagcttatgtctttcctatggaaagtatcatacataaaattttacattcttttaaaaaacagaatctaatgtcttcagatacctagagcttggaaattataatagagttgggctttgacccgaagtcagcagttcttttcattttagattttcaggcaagtttcagtagttggagacttcttcagtagtgaccccagcttaacctacatataatcactttgcacacattttaagttaatcagatgcttccagagtcttggatttggttacccctttgttagataaggagacagattctaggttgggacaaacatcttaatttattctctaataataaagtactgattaaagagcaagttctcagagaattcacaaaatttctagaatccatgaaagatctagagacataacaatgaaatctagaatttggaaaaaaaaaaaaaaaaagggggggtctaaaatttccctgggggccaagttagggttccagctttttccaagggcctaggggcgttttaagaaggagggggtttaactcgggggaaatggtttggtttgggagacttttggggggtttgggactccgcataagtcagaataatttggtaggtagtttgggattgtgtatatacnn

SEQ ID NO: 20774 - DNA, 470 bp, Homo sapiens
  misc_feature 1, 2, 3, 4: n = A,T,C or G
nnnngcctgagctattgtgaagtccttaggaaacacacgagtttggaatggagggaatctggagttcaactctgcacaagttaactttaaggagatgtcatgtcaacacaatgggatgtgaatctatagtaagattggaggttggggctgtggaagtatacatttcagagttatcagtatgtatctggcatttacagtcagaaggctacgtgatgtcacctagagataaatgtgtagagaaggatgagttctgggaaaggatctctagacctgccaatatttatagatcagaaaatgatgaggactttgggaagatccagccaatgacttgataggacaataggaagatttcagagtcctagaagccaagtaaaaaaaaaaaaagtttttcaagaacgatagggggaaaaaaaaaaattgttttgaaagatccaccaattttttgaaattctttttggggatttaaaacc

SEQ ID NO: 20775 - DNA, 2327 bp, Homo sapiens
  misc_feature 2324, 2325, 2326, 2327: n = A,T,C or G
gtccgcgcccccgcgacctgtagggccttggctggcccctcaccctcctcccgccccgggctgaggctgccgccggtttcgcgcccagtgccgaggcagcggcggagccggggaaggtcggagggagggtggtttcctaccgccccacacccagtctccgagccggatatatagagtgtcacgtttgggagccgaaagactggagccgtttccttgtggctggagcgcttcccgtagcctcggggaaggagcaggatttagaggaccactagttggaccccatcctcgtgctggaggaacaggaacctctttcaggagctataaaagaaagggaggaatcatgtccacaattgcagctttctatggcggcaagtccattctcatcacgggggccacaggctttctgggcaaagtgctgatggagaagctgtttcgcaccagcccagacctgaaagtcatttacatccttgtgaggcccaaggctggccagacactgcagcagagggttttccagatcctagacagtaagctatttgagaaagtcaaagaagtttgtccaaatgtgcatgagaagatcagagctatttatgcagatctcaatcagaatgactttgccatcagcaaagaggacatgcaggagcttctctcctgtacaaacataatatttcactgtgcagccactgtacgctttgacgacactctcagacatgctgtgcaacttaacgtcactgccacccggcagctcttgcttatggctagtcagatgccaaagctggaagcctttatacatatctctactgcctattcaaattgtaacctgaagcacatcgatgaagttatctatccgtgccctgtggagccaaaaaaaatcattgattcccttgagtggttagacgatgctattattgacgagattacacccaagctgatcagagattggcccaatatttatacctacaccaaggccttgggagaaatggtggtgcagcaagagagcaggaacctgaacattgccatcataaggccctccattgtgggagcaacttggcaggagcctttcccaggttgggttgataatataaatggacctaatggaatcattattgcgactgggaaagggtttcttcgggccataaaagctactccaatggctgtggcagacgtaattccagttgatacagtcgtcaatctcatgctagctgtaggatggtatactgcagttcacagacctaagtcaacattagtctaccacattacatctggtaacatgaatccctgcaattggcacaaaatgggagtccaagtcttggcaacctttgaaaaaatcccatttgagagacctttcaggaggccaaatgctaattttaccagcaacagcttcacatcacagtactggaatgcggtcagccaccgggcccctgccattatctatgactgctatctgcggctcactggaaggaagcccaggatgacaaagctcatgaatcggcttttaagaactgtttccatgttggagtatttcatcaaccggagttgggaatggagcacgtacaatacagaaatgctgatgtctgagctgagtcctgaagaccagagagtattcaactttgacgtgcgccagttgaactggttggaatacattgaaaattatgttttgggagttaaaaaatacttattgaaagaggatatggctgggatcccaaaagcaaagcaacgcttaaaaaggctccgaaatattcactacctctttaatactgccctcttccttatcgcctggcgccttctcattgcaagatctcagatggctcggaatgtctggttcttcattgtaagcttctgttataaattcctctcctactttagagcatccagcacgctcaaagtttaagagcatttagccatcgctttttatctggaacctctcagatacctctaaaacagcaaactgtgattctcaagattagaaagtaacaaggaatatgcccaaactgtcaaatgtcacctgttatgtattcgtccctattccttaactatgtatttttatttcagtgagagaaggaaagttgtaaactagcccatagtcacctatattttagggaaaaaaatccaaattgtttcctaacattctattttatgcccttgcgtattaaacgtgaaagtactcccacttttctatatttagtttttcttttctctctgagatgattcatttaaactcagtaaatatggaaagatgcatggcagaagctgaaatgagctcaagcagtactaaccttggaaccattctgggtacccaaaagaaaaatttaaaatcaagatgagtnnnn

SEQ ID NO: 20776 - DNA, 1402 bp, Homo sapiens
  misc_feature 1399, 1400, 1401, 1402: n = A,T,C or G
tccgcgcagctgagtttgggagatgtctaagtgattttttttttttcccggaaggcaaatggctggcgtggaagcacaacccgctttcactcttcgaatttgtgcttagctcttttcttgtaccttgcgactcgtgaccaacatgctgtgatgtgtgccgagggaggaattggtcagctacacaacctggatcttaccacagtttggatatgactgaggctctccaatgggccagatatcactggcgacggctgatcagaggtgcaaccagggatgatgattcagggccatacaactattcctcgttgctcgcctgtgggcgcaagtcctctcagacccctaaactgtcaggaaggcaccggattgttgttccccacatccagcccttcaaggatgagtatgagaagttctccggagcctatgtgaacaatcgaatacgaacaacaaagtacacacttctgaattttgtgccaagaaatttatttgaacaatttcacaggaaagagaaaaaatacattgaccgatgctggaaagacgttactgttggggactttattcgcctctcctgcaacgaggtcatccctgcagacatgggactactcttttccactgatccagatggaatctgtcacattgagacttctggtcttgatggagagagcaatttaaaacagaggcaggtggttcggggatatgcagaacaggactctgaagttgatcctgagaagttttccagtaggatagaatgtgaaagcccaaacaatgacctcagcagattccgaggcttcctagaacattccaacaaagaacgcgtgggtctcagtaaagaaaatttgttgcttagaggatgcaccattagaaacacagaggctgttgtgggcattgtggtttatgcaggccatgaaaccaaagcaatgctgaacaacagtgggccacggtataagcgcagcaaattagaaagaagagcaaacacagatgtcctctggtgtgtcatgcttctggtcataatgtgcttaactggcgcagtaggtcatggaatctggctgagcaggtatgaaaagatgcattttttcaatgttcccgagcctgatggacatatcatatcaccactgttggcaggattttatatgttttggaccatgatcattttgttacaggtcttgattcctatttctctctatgtttccatcgaaattgtgaagcttggacaaatatatttcattcaaagtgatgtggatttctacaatgaaaaaatggattctattgttcagtgccgagccctgaacatcgccgaggatctgggacagattcagtactcttttccgataagacaggaaccctcactgagaataagatggtttttcgaagatgtagtgtggcaggatttgattactgccannnn

SEQ ID NO: 20777 - DNA, 706 bp, Homo sapiens
  misc_feature 693, 694, 695, 696, 697, 698, 699, 700, 701, 702, 703, 704,705, 706: n = A,T,C or G
actcattttatacaggcaaaaatatttttgcaaaaatgaaaaaatattttgaggattgttatattccagatatatttttatatttttagctaccattttgatactgaaatctggataaaaaattaggcttcatgttttccatttaagtctccatacctgtcctcaaaaatcacattaatccaggtgtaattgaatatgaatttatagaagcacatgggaaatgaaattttatgtctaattagatatttttcacagttggatgagaagccagtgtttcagtgtttcctgccaggaacctcaattttctaagccaaaatatgtttgacattaacccaggttgctattaccattagacgtcagtctgagcagtagtccttacttgtctgtgaagtctacaagtatggaaatctcttgtttagcctgtatcttcatctactatgttcacttaaagtttccacgaattgtttatttcattaactgaatatagaaatacccccagacaattttgtgtgtctgtatgacctcacacaaatgcattattttgttggttcacatgtttttcttgagtagaagcttccttgtttagtactttttatccataggcacagatgacttcagtgtgtgctgaactgggaatcagaagaaagttatagccttgactctgttacttggaaccactctctttgccctgannnnnnnnnnnnnn

SEQ ID NO: 20778 - DNA, 609 bp, Homo sapiens
  misc_feature 1, 2, 3, 606, 607, 608, 609: n = A,T,C or G
nnngatggtgagaatagagctcgcttccttccagggaaagatctgaccgaaaaagaaatgatccaaatattagacaaggtaaacattattgcttaaaattgcatctgttagctcctcgttgatgtagtttcacagatacctatggtactgtttcatgttatgctgacagacctatccttcattattctagtcactaatatagtccttttgttgtaatctagtcatacattctaagcttgatttagacacttgccaaaagaagttccaatccagtggtttcgagattccaaaggcacctttctctcatgacccaaaggagtaattttggcatcttaaatggattaatttgtcttcctgatgggagcacatcagaagaatggtgatgtggatgttagatagagctgagggggccatactcgaactcccagaggtatctgcaggggctggggcagggaaagtcttaacccagctctaaacactttccagaggtattttgtggggggtagggggagatactgctctaattaggaaataagattttgtcttagatgactttttttttattcctctggaaccaattttcaaacatagctggaactaccaacnnnn

SEQ ID NO: 20779 - DNA, 2578 bp, Homo sapiens
  misc_feature 2564, 2565, 2566, 2567, 2568, 2569, 2570, 2571, 2572, 2573,2574, 2575, 2576, 2577, 2578: n = A,T,C or G
actatcagaacaaatacataaaataacttcccatagagaacgggatatagcaataatagctccttagatactcagtggcttctgactccaatcaaggtcttgttgatattatatagtaaaaataaaaccaaaaataaatattattcaagtggctcttctaagcatgtgaatcatgaagcactgaaatatgtattttaatgatgatcttatttattcccatttttgcccttagttaacatttactggtgctcacctaggattggctattctgagggattgcatagaaaccaagctccacttgctgtccttgggaaggttataactgaatgcagctctttatttggactaaagtgtcaggatatgcattagattctctcctgaaccaaaaacacaacagtcattatctgtgaaccataatttaaaaatctttctagaataacaacagcagactccactcttgtttgtctaaaagagccctactgggtatggatcattctgatgacagatttatacaaaatgattcaaaccagtaacttagtaaaattgaccttcgcaaaacctcactgggggagtgccttgtagagctgtgggtgggactgcacattcttctcctcttagtaaaagataggcccactttattccaagaataacacttagcacataaactcttcttccagctcgttagcagcattagcaccttctgaattccaccctctcagaagaatccacagtgtttgaacaatttgcataaaggtcagctagcatcctgctgccaagccactgcatagcatttgtgataagaaggaccaactctaggctcaatatgaagggatttagttctgtaagcagcaaaaaagcttctttatcaagtcatcttacctctaattcttttccagtgtgccaactccaaagtcaacattaaaaatgtaaatggacctgtgtaaatatcacagagagcttttccttatacatctcaatgctgagagttaaaatattcccaggttaaaatttttttaaagtaccaataatagagctaaatacaatgacatttgcttttaaaaggtggatattttatttctgctttttgaaaatacttatttagtattgacttggaagccaatttggtcctttaataagtaaagaaaataatatgtttaaaaatgtaaatgttttacaaatttgaaactttcataattgtattaatcagaaaacaagcacattgccattctttgaaactcatgtttctagacatgacagcagtaataaaaggatgaaaacaagtgtcttcactaagcgtatggccaataaatgggacccaaacgttcaatctgttcagtttaccaaggttcagaaatacgtaatttagcaggaaactataaataccagtgctatcacagccacacatacacacacacagacataaaataaccaaacatctcatttctaggaaagagataacactaaaggcatcataggtttaactgaaatacgttatatgaagttttacaaaaaggtcaacagaaagctcatttgtgaaaacatactctcatgggagcttctttaacattagttcagaggttaatatatttcctggaggtgttttcctagaattgattgcactattgcatggtaataacatttaattgttaaggaaacattatatataggttcaaattatcccttaatgttgatttctccccttttccatggattttgatactaagaaacaaaatgctttgagattttggtaactattttgattttgataaaacatgttaaaatagaaggacatgatatttttctatagtttccatcaggaagagtacatcagaaacttctccataaggaaagaaaactgactctctcttgaactagtgttgataaaatacactaatgtctttcttaattttattttattaggagaaaaatcagaatattaaatttgcaaacttttgaacagcagtaatagctccttagacactcagtatctttcttccctatctttcaagcacatttaatttctttcccctggtatttgtttgctttgtgttttttcaatattttgtttgctaaagaacaataacaacaacaaagctggtccagccctgacacctacttttgctttttttctttctttcttttaatttgttgaactataggtttctttctgagatgtatttttcattcttccaataatgctctctttttcatttcaaaaccattaccactttcaatatgtaattaacatcctcattcatcagaaagctggtaagtccacacagcatttgtgcagtatcccttctgtgtaaaatgttaaggctttcagatgaaagaaaaaagaacttcctgcaaaagatcaaaagcatcatactaaataaaatgatgacaatatgtgccttgatttttctctcaatggaggttcaacattgacatttaagatgtaaaaaaaattactttgatggtttaattaagaataataagtcaaatatcacatgtatgtagttcttttggatgaccgaataccttaaaatgaactaaataactgaaataaagtgttaaaatgnnnnnnnnnnnnnnn

SEQ ID NO: 20780 - DNA, 3981 bp, Homo sapiens
  misc_feature 1, 2, 3, 4, 5, 6, 7, 3655, 3656, 3686, 3687, 3975, 3976,3977, 3978, 3979, 3980, 3981: n = A,T,C or G
nnnnnnncagctccgggggaaagagggtggcgtcccggggaagcccgcagccgccgccgatgtcgctgggactcggaagtgccgaaagaggggtgttgggaactcgcggcgcgcgtgaacgttgccgtcgccgccgcccgggacagcccggagaaactctcagcgtaggcatcgggaaccttcgtgccaaggagccatgccgccccgatgggaactggcactttacctacttgcctcactaggcttccacttctattccttctatgaagtttacaaagtctccagagaacacgaagaggagctggaccaggaatttgagctggagactgacactttatttggaggattaaagaaggatgcgaccgactttgagtggagcttctggatggaatgggggaagcagtggctggtgtggcttctccttggccacatggtagtgtctcaaatggccacactgctggcaagaaagcacagaccctggattctcatgctctatgggatgtgggcctgctggtgtgtgctggggacccctggtgtggctatggttttgctccataccaccatctctttctgcgtggcccagttccggtctcagctcctgacgtggctctgttctctcctcctcctctccacactgaggctgcagggtgtggaagaagttaagagaaggtggtacaagacagaaaacgagtactacctgctgcagttcacgctgaccgttcgctgcctctactacaccagcttcagcctggagctctgctggcagcagctgcctgctgcatcgacctcctactcctttccctggatgctggcctatgtcttttattatccagtcttacacaatgggcccatcctcagcttctcggagttcatcaaacagatgcagcagcaggagcatgactccctgaaggccagcctgtgtgtcctggccctggggctgggccgccttctttgctggtggtggctggccgagctgatggctcacctgatgtacatgcatgccatctacagcagcatccccctcctggagactgtctcttgttggaccttaggaggactggcgttagcccaggtgctctttttctacgtgaagtacttggtgctctttggcgtgcctgctctgctcatgcgcctggatggactcactccacccgccctcccccgctgcgtgagcaccatgttcagtttcaccgggatgtggaggtattttgatgttggactgcataatttcttaatcaggtatgtgtacattccagtgggcgggtcccagcatggcctgctggggacactgttttccacggcgatgacatttgcatttgtgagctactggcatggcggctacgactacctctggtgctgggcagcgctcaactggctgggagtcactgtggagaatggagtccggaggctggtggagactccctgcatccaggacagtctggcccgatacttctccccacaagctcgccgtcgattccacgctgcccttgcttcttgttccacctcgatgctgatcctgtccaacctggtatttcttgggggcaatgaggttgggaaaacctactggaataggatcttcatacaaggctggccttgggtgaccctctctgtcctgggattcctgtactgctactcccacgtgggcattgcctgggcccagacctacgccacggactaatgctgttgggcccaggccagtccttgttgctggcctccaaggcaaatagtgcttcaccctgacctctcactccaggacagcctctaagggatttgatctgctcatcttcagttgaatgccctcactccaagactggatgctggatctcatagaaaattcacagccagacaatcttctaatctggagtctttgagatcttctaccccaactcatcattttcctattgaggaaacgggtccagggcagtcgtgtgtcttacccagctacacagggtgacattttggtctagaacctagtctcatgagccctttgcattctttccccttaagcaagaatagaatgtagtggaaatttattgattgagacacagaaatcctgattagtgataggcctgtcttctgggcaatatttctaaaatatttgagtgacattgatgtttaagtgacctccttcatcacatcctgcagtatctccagaagcagcactagggtttgagtttcatgcttcagcccctctgtaggaatgagaccaagccacagctgtcttttgaattacgtagtcgaagaagacggtagcagccctgtagcattctaaggcatctatacccaaggagtcctgtgatttgagcttcagcagggtgatctacatttgggtgcttgtttctgagatttgcagagaagtataacatggtagttcctctaccttacagttaatcgtttcttaataaagaagcagaatttagaaaccacaggatagtgtacccacagatgggtgttatcaaggccagtcatgaggatggtgtcctggagtcttgtccaccctctccatacaagtctcaaaagtcatcctcctactcagtgattcacgtttagtggtttatattattaaggtttgattcaaacagagccttttctgtcctgtagataatctacatgtttgtagaattattttgaatatgtttgaggaaaatgtttaaaatctaaatatactcacataacttgattattcactcctctgaaaagatgctggataggctaccaaagttcccaagtggtagataattcagaagacttgtttgaatttggattttttctttttgggagtggggaagggtataaaggaggcttaaaatttgaatccataatatatctaattacaggagaatttacaacatctcaagtacgtaaattaagttgtcattgagtgaaaggttcacttggacctagtgctgcctcctgtttattacatagcatggcccttatgtcttgagttgaggttatcatctcaatgaggcttaagctcctagagtacaggaccattttgttgattgtctttcttcatagcttctctgcttggcaaagagatgggagggggccagatactgactacctggggtaggcacattatgtgttaaagcaagacagaggccagagaggggcaggtagacctgcatagcagcagcctcagcagctgtcttggtaaaggagagagagagacatggggccagtaattccggggtgctcagaagttttaggagggaatgagcctcagggaggagtgagcacctaaatgaacgcagtaaaccttcatggaccaacagtgattgaggatttgtgggcagccagagggagtctgactgaagtttacttggaaagaaagggcttgctaagaaaaaagggagtaaaaatgatgatagggaagtgtctaatgtatgtgcacatataagtaatacaaaagttttgagctcttccaagtataccatttatatacaaacaaataggtttattcattcattaaactactttggaagcgtcagtggatatatttgaaagtggtaatcctgaatctcttttaaactattatatgattcataatggttctcaggaattaataaatgattactgtgtttagctcaaaaaaaaaaaaaaaaaaaaaaaaaaaaaaaaaaaaaaaaaaaaaaaaaaaaaaaaaaaaaannttttaaaaaaaaaaaaaaaaaaaaaaaaanncctttgttggcccctttggcccaattaatttttaacttgaaaaagttttttttttgggcccaaatttgggtttatttggccaattcccccttatgggaggggtttaaaattacagggccgggttttaaaaaatgtaaattggaaaaccctggggtccccatttaatagcctttggaaatatcccttttgcaggtgggaatataaaaaaagccccccacatacccttccaaaattgtgcaccctgatgggaaaggaaattgaaccttaaattttggaaaacccgtaaannnnnnn

SEQ ID NO: 20781 - DNA, 1550 bp, Homo sapiens
  misc_feature 1, 24, 1550: n = A,T,C or G
nagcctcccaaagtgctgggatancaggtgtgagccaccacagccggcctataattttttttttgtagagacagggtcttgccatgttgcccctgtgtctctaatacctcgcctggctggttattagagaatctcctatgttactctttaatcctctgtgtattttcctgcctttcctctggaattcctaagaactcttgaggagagaattagccctgatgctgtaggcatccactgtatgtaatgcattgttgtgccttgtctgtaacccatagcctcatgtgacatccactgtatgtatgtaatgaagtcatttctctcctgtgcatctcgctggtgttttcctgtacagctgctctgtacctgccttgggccaactgaaaagggggtcacccagatgattttttatgtggcacttcattctcctgtggcatcccaattgggaaaggccacaccagatgctggcagtgtgggtgatcagtacatttatgggtcgatgaatggatgagttatgatgttccattgagagcctctggagttaccttttaaactaatgagctgttgtaggagaaaccaaagcacaggactgaagttgatgccacgtgttgacatctttttctattttaaacgttaaaagaggggctaggtctagggaagtccccgtttggaatgaaggactaggagctacacctttgatgtgcccctgaatgcagaggttacttggaaaagagtcagccaggtgtgcggtggttgggctgtcatcctcctgtggtagacacgctcctgaattgctcctgaatggctcagctctgctttggttaggaaggaaaagctacactgactgtactttgcggctttttatcaccacctgccacccgccccgcagatgtttaggggaaccacttttgggcttttgttacggtttgcatcatactgttttatttgctgcctcttaaaatccaggttacctctggaacctccaagtgaaacttgagcccatagtaaatctcttaccagacaaaggaagactcatggactttctcctccagagaaaggaatgcaagatggtcatcctgtctgtctgttcacagagtaagttgaatccttcccccttgctctgattccagtgtgaggcctgtgctgcccaacactttttatcgggatgtgggctacattgttgtgtcttgtctgtgacccacagcctcattctttatgtgaggggtggctatgtgaccccctaggaaaggctgctaaatggaaagatgatttgtagagatactggtagaaaagaacaataaatgggatggttctgaatgaaagtgggcacacaggaggggagtgggccaccacccctggccttcacacacacctctttcaaaatccaagccactcactgcatatgtgtcttctttaagaatcccctactgaggccaggcatggtggctcatgcttataatcccggcactctgggaggctgaagcaggaggattgcctgagcctaggagttcgagaccagcctggacgacaacatggcaaaaccctgtctctan

SEQ ID NO: 20782 - DNA, 1656 bp, Homo sapiens
  misc_feature 1, 2, 3, 4, 5, 1655, 1656: n = A,T,C or G
nnnnnagactctgcccaaactaccaataacaaaactgaacttcattgctatattcaggttacttttggaaaaacagaatcatgatatatatttcattccctttgttaaaaattttcttaagataatttagatatggctgtaaaataagacctttcaaagattttaaattttttgtccccctcaaagaactaacattgtagagttattcaacttatcacctcctgaaaacatttttgaacttttgtttttctaaatgtttctgaagccaacatccaaatctactctgatagtggatttattttttaaaacagtcaaaagttaccagatgccatctgtaggctaagatggataatcaaattgcatcaatttagttttggtcagaaattatttcatggatagcataccttgaaccagaatttatcatgacaaaaaaaataataaatttaccatttcaacagcagagaccttgtcaaaattcagaatttctcaattatgatttactagccattagtaaagaggttctgagtcgataatactagcaatgaccaataagcaagtcactgtggcttttttattatatttttttttttttttaccagtggtttgcaagcatggtttcctggatctcacagacgttgggcttttcaactgcagacttcaatgctttgtttccaggtggcaggagaaacatcacatctcattaccaacaattatttccctcaaaggtaagtaattgtatctaacttcaatattcctttccctggccaaaaattttacacattgttataaaaatcttctttgtattcatcactgtctttatattaattttctaagtttcttcatttcctaaaatgtaaccttcaaccatcattctcatcctcatcattctcagcggtaacagcccatttaaacaaacttttggacgtttaaaatatcagtggccttgtaaataactggataatttcttgaccaatcatcacatttatctttttacttcctctaaatttgttgcacatatcaaaaagctttgttcttgatttttctttgtcactgtagaagtattttaatgtgtcaaaactttcatctgcatgtttctttaatttgcagtggattgattattagctctttgttccaaataactgtcactcattttaaaatctttcccaaacacaggtactatttctattctacataatgggagaatgtgccagtaggagactgcctggccaactctgaaaaaaatgctttaacaatatgccccagctagaatcacttttcctttatttccacaaatcaaattcaaaatcaaactcattatggtataccttatataactcgatcatgtttataaaattagcattctttggatagtaaaacaccagttaatacttaatttgtttacccatgcacaaaactacctcccgagattagactaagtccctttaaggattttaggtctccattttgagatgttttgatttatagaagaaactgaaaaaaaaatctagaagaagtcgttttcctcctttgtaaacctgctgcccagaggccgacgacgcatgcaccagcaaggacaagcccagtcttttcaagcgacacctgtcgcctggccttttccgtgccggagggcgcgagtctcaggcggtcttttaaann

SEQ ID NO: 20783 - DNA, 450 bp, Homo sapiens
actctagaaatgtgaagacattctatcaaccatgcttgagagtgttcgatgctccacactttggccaatctgaagcattttctgtattcttcacaattcccctgggtaaccaataagatgattttaaactaaaagatagcttgttgttaggtcatcacaaccatcccacaagtgtttgccttggtgttttcaaaggatctctgaagatgctttatgaatcatttcttgttgttagatgcctaagtgcagttgtcaaggctgtagaactgccaaggaggaagggaaggcagtgccagctgaaacagcagagagattcaggagagtgatgcagaaatactcgtggagactctcatttctgacctggatctcaaataataaatgatgatttattcctttatcattcagacagtcttgtgtacctactgcaaccagacccctgctggatcctga

SEQ ID NO: 20784 - DNA, 1710 bp, Homo sapiens
  misc_feature 1, 2, 3, 4, 5, 6, 7, 8, 9, 10, 11, 12, 13, 14, 1710: n = A,T,C or G
nnnnnnnnnnnnnnatacagggggaactgaagaaagcgaccacggatgcgcccttgagaaggtggtacgcctgcaggaccagggcggcaatgcctgggccgtccacggacgcgtgggcggacgcgtgggcttcagccaaactgagcgtgcgggacgctctcggggctcagaacgcgagtggggagcgcattaagatccagggatggattcgttctgtccgatcccagaaggaagtcttgttcctgcatgtaaatgatgggtcatctttggaaagccttcaggttgttgcagattcaggccttgacagtagagaattaacttttgggagttctgtggaagaagggcgaattcgtttaaaagtccatccaaaaggcaaaatgtggaactgaaggcagaagagaggcatcctctggagtacctgcgacaatatcctcactttaggtgtaggactaacgttctgggttctatattgaggattcgcagtgaagcgacagctgctattcattctttctttaaggacagtggctttgtacatattcatactccaataatcacatccaatgactctgagggagctggagaactttttcaacttgaaccttcaggcaaacttaaggtacctgaggagaatttcttcaatgttcctgctttcttaactgtctcaggacaacttcatctagaagtgatgtcaggagcttttactcaagtgtttacctttggtccgaccttccgagctgaaaattctcagagccggaggcacctggcagagttttatatgatagaagcagagatttcttttgttgacagccttcaagatcttatgcaggttatagaggaactgttcaaggctacaacaatgatggttctctcaaaatgtcctgaagatgttgaactctgtcacaaattcatagcacctggccaaaaggacagattagaacatatgctaaaaaacaactttttaatcatttcttatactgaagcagtggagatcttaaagcaagcatcccagaacttcacctttaccccagagtggggtgctgacctacggactgaacatgaaaagtacctggtgaagcactgtggcaacatacctgtcttcgttattaattatccattaacactcaagcctttctacatgagggataatgaagatggccctcagcacacggttgctgctgttgatcttctggttcctggagttggggaactctttggaggaggcctcagagaagaacgataccatttcttagaggagcgcttagccagatcgggacttacagaagtctaccaatggtatctggaccttcgtcgatttggatctgtgccacatggaggttttgggatgggatttgaacgctacctgcagtgcatcttgggtgttgacaatatcaaagatgttatccctttcccaaggtttcctcattcatgccttttatagctggaagattgcgttaaggaaaagcaccccccatgggcagagacactgcacatgattgtgcatacagcagaatgcatgtttggattttagtagtgcagatttcaatatgtaattgttgtcccctagcgggatggtgagcgggacaattttcttttaggagaccgaggctttttaggagatcttgtgccactcctgcttcttcctcactcactcctctttgctcatttttctgccaacgattcgtcatgtatttctaggactatctgctcacn

SEQ ID NO: 20785 - DNA, 1206 bp, Homo sapiens
gcgtccgaatggcgctggccatgctggtcttggtggtttcgccgtggtctgcggcccggggagtgcttcgaaactactgggagcgactgctacggaagcttccgcagagccggccgggctttcccagtcctccgtggggaccagcattagcagtacagggcccagccatgtttacagagccagcaaatgataccagtggaagtaaagagaattccagccttttggacagtatcttttggatgacagctcccaaaaatagacgcaccattgaagttaaccggtgtaggagaagaaatccgcagaagcttattaaagttaaggtaatgcattgatttttgtgggtgtgcttttcctcaagtcctccattgaataagctcatggtagattcctatagcctaggaataaattattctcagattatatgtgtctactttcctctggcctaaatgaaatacagtattctcattatatacataatgagaaggctagagcctgctgtcctctagcctgagtattagaaacacagtcaaggaaggagtgagtttggagactgggcaaggaacgaggctgtgaggtgcctacatgacttctgaattgtgagctgtgtcagtcttgagctgtgtgagttttgaactacagatgagtaaacatcctaactatggcagagcctagaattaaagctagaagcagtaggtatactgaatcttgggttttacaagcccttacatatttgttttatttttttatcatttccaacaaaataccatgaaggaaaaccctaagataagtaatataatagctaacaacaattaagtgtctatgatgtatctcagtgccttatgtttattatatctcatcatgtcttatagccctccaaagcaaataagatattcttcattattaggatgaaaaaactgaggcaaaagaatttgcctgtggtcacacagctatgaagcagtagattttcgagctctgatttttgacctcatgttcttttaaagattttctttgtgttctcctatcctcagacaatttcagattctcctcgctgacaacatggatgtactgtcttcatagatctagtacagaaaaatcaccgtgtgtattcacctctgatctgttcatgtatggtataaacagttaggataacagttactgtacacttcatggcgttcacaacgcaaccgtcgaggtcaacggggtacc

SEQ ID NO: 20786 - DNA, 584 bp, Homo sapiens
  misc_feature 1, 583, 584: n = A,T,C or G
nttctagaattaattaacgcgggggaaatgactgcagtgttcatggagacagtgttttcgcttggctgacattaatgacaacccaatgctatgtgctcactgagtgttttcatttcagaagagcatcaaaaccactgagtcctttcaagtcgtcttcttttcctgtgaaaccagaaaccatgccgacgactactttcagtaataacctgtgtcccaactgcaggctgaagtaaacttcttctcatataattttctaatttctgtgtaggggtagttgtagcaaacaacttagtttctttcagagcgtgacttcagaaagcgtattttcatgcagcagtgatgggtaatgaaatcagaatttccacaaagtctgccctaattgaacagcattatcaggaaaaataaaacatgagactcagagttttctcccaaagtcatttatgttattaggtaatgaagctgattttattttagcaaacgtactaggaggtatacttccacgtgaacattgccccttcaaagcagtcaactggaaaggctgaatgtccgtgcccataacgctgtcactgccaaaagctaatann

SEQ ID NO: 20787 - DNA, 1841 bp, Homo sapiens
  misc_feature 1, 2, 1789, 1833, 1838, 1839, 1840, 1841: n = A,T,C or G
nnatagggagtcgacccacgcgtccgaagtaactgatgttttcagactgattttatggtatgactttgtctcagggaaatagaaaacaaagcaaaatgtgaggccattaagtattacattcatctcaggtctatgcgggtaaatctttttttgttgttttataagccattctttgctagttttctaattgaatagatgactggatttctattcttatttctcttacccagaatcctttaaaattttttgttacttgtggaatcttataaattctgattatcatttggttctactgagccaaataatgtttgtacattgtttattctgatagaagttcttaagtttctaacataattgaaatattatttgttttggtagataattagtattctttctttggttattcaagataatatgcatcattttcccaaaatttttttgttttctttagtttctgattattatttttaattatgtattacctttctcatttctaattaccgttttcctgtccttttctgtagaacaaacgtttaaagaaaaaggtgaggctttaagtgtggtgaaatcttgggaatttaaaatatgttgtgagagcactatttagaggatatgattttgttattctgaatagttttgtaattgaatgttgtgtttggttaccttcagaatgaacaactttgtcaggatattattgactaccagaaacaaatagattcacagaaagaaacacttttatcaagaagaggggaagacagtgactaccgatcacagttgtctaaaaaaaactatgagcttatccaatatcttgatgaaattcagactttaacagaagctaatgagaaaattgaagttcagaatcaagaaatgagaaaaaatttagaagagtctgtacaggaaatggagaagatgactgatgaatataatagaatgaaagctattgtgcatcagacagataatgtaatagatcagttaaaaaaagaaaacgatcattatcaacttcaagtgcaggagcttacagatcttctgaaatcaaaaaatgaagaagatgatccaattatggtagctgtcaatgcaaaagtagaagaatggaagctaattttgtcttctaaagatgatgaaattattgagtatcagcaaatgttacataacctaagggagaaacttaagaatgctcagcttgatgctgataaaagtaatgttatggctctacagcagggtatacaggaacgagacagtcaaattaagatgctcaccgaacaagtagaacaatatacaaaagaaatggaaaagaatacttgtattattgaagatttgaaaaatgagctccaaagaaacaaaggtgcttcaaccctttctcaacagactcatatgaaaattcagtcaacgttagacattttaaaagagaaaactaaagaggctgagagaacagctgaactggctgaggctgatgctagggaaaaggataaagaattagttgaggctctgaagaggttaaaagattatgaatcgggagtatatggtttagaagatgctgtcgttgaaataaagaattgtaaaaaccaaattaaaataagagatcgagagattgaaatattaacaaaggaaatcaataaacttgaattgaagatcagtgatttccttgatgaaaatgaggcacttagagagcgtgtgggccttgaaccaaagacaatgattgatttaactgaatttagaaatagcaaacacttaaacagcagcagtacagagctgaaaaacaagattcctttgaaagaagattgaaagtccnagaaggaagaaccgaccttgattcggaaaaaaaaaaaattccgncaaannnn

SEQ ID NO: 20788 - DNA, 1383 bp, Homo sapiens
  misc_feature 1, 2, 3, 4, 5, 6, 7, 8, 9, 1383: n = A,T,C or G
nnnnnnnnngacatttgtattagaaaatttatcagtttacaaataattcacagtaggattcctttaacttatgaacaccccatccacctaagggatgatttaatcttcaaacttttgattcattcataacttctgcaggatcacattgaaagatgcttttcatggtctagctgaagaaaatgacaggcatttttcttgaagcaatttccagctgctatctctgattcttagtgaacgtatgactttgccagatcctcaatctgttccctaatattggttattggcagtattgatttggtcacctcatacacatacatagagaaatcagggtcagagggaggacaccattctttgtcagagcttccttcaccaacaaattttggggaccccataacctcttcctcctctttcacatttttcctcttctttttttcctttgcttttcctccatcctttttctttggtggcgcttttgctgagaacagtatttcgtccagaagctggctctgatttgtcttctatgggagatccaaatccagcactaaaatgataactattttttttattcttttctttacttgatcttcttaaggaagatgaagaagaaatacttcgtccataaccaacatctgatttatcttccatagatgaaggtggagaaacgtaagatttactgttgattaagagtacagcccgtaggtcacttggttcttgtaagcagagctccttcaaaggcaacagtttggtgccgggatttatccgaccataatcatagaatccatcgttaattatgttacttgatgacaaatagccagtctggctgtatttcagggaaagattgttattgagcaacttattataagctgcctcactgaatttatttttccgagttcctgatacgttaacttcttcaaggatatctaaagccccgagcctgcataattcattggccgtcagctcgtcaccagcacagaccatcactgcccaactggcgtgcttcctcacttcatcattcttggagcgtagcagctctaccaggggctccaatccaccagaatttcttaactcagtccgggcttcaacgtcacacgcagttgcggtgacagcgagagcagctttgctctgcacgactgtgtttgcagaacgcagtgggctgatgatggcatgcatgatgtcgtgattctgtatgctcaggcgcaggggctcctgcatggccatgtttgttaatactgtagcagcgttggcaatggctccatctcgtttccttgacagcaggtttattaatggatcaataccatcagcttcagcagcagcgtttgcattagcacggccgcaagtggttaggtttgacagtgctagagttggtgcttacagtgcccgtcn

SEQ ID NO: 20789 - DNA, 1188 bp, Homo sapiens
  misc_feature 1170, 1171, 1172, 1173, 1174, 1175, 1176, 1177, 1178, 1179,1180, 1181, 1182, 1183, 1184, 1185, 1186, 1187, 1188: n = A,T,C or G
gcgtccggaatggtaagtatatacctcttataaaatcttcgaatggcttcctctttcttggactgaaaaatgtccattttcctaccacctgcaacattactcttctcttgcttactctagtactgcaaacatggattctttattgttctttaaacagacaagctcctggctcagggcctttgctttcttggttcctgttttttcccacatacctacatggatccatctttgtctttcacctccttttcatttctgcacaattgagttttcaatcagaactttccgacagcccgttttaacattgtaaattctttccatccctggccttttcaattcctccatgctctgattttctccatcgcgcattttatcatctgatataccaaatattttacttattttctctactttgctcatgcattacaatgacatctccatggaggaagatgtttttggattttttttttaactgctgttatcctcagtgctcaatagtaggtacgcggatgaaattcattgtataggtgattcgtgcaacagcttctgaattttttcctccctcacccaccttacagccattagtcctataataatttaatttgggtttgtgggtatagaaactgtatttgcacaataatgataaagccactcaggctcatctagtcatttcctgaatttatgtgtgtaggagtaccacagagcacaaaagatgggcacccccagctgcagccgactgtcagaggtgcaggcctccctgcatggatagtcctgggccagccacaccaccgagactatgaaatccctggagaatttttggtgacatgcactgagccaaggtgatggactgtatatttgaggaaagacaaacaaagaaacaaaattaaaatggaattggaggccgaacgctgcacagctgccctctctctcacccagtaaatgcagaaagctcttaggacagacagaaaacctgccatggggctgcttcccaccaccagccacctctcaggagaagccagaggccctggccaaagataggaggaagaaagagaactctccatagaatgtaatttatagatgcgtgtatatgtatatatatctatttatatgtaaataggcatatatgaagatatatatatatagtctactttttaaactctgcagggatttggnnnnnnnnnnnnnnnnnnn

SEQ ID NO: 20790 - DNA, 2145 bp, Homo sapiens
  misc_feature 1, 2, 2114, 2130, 2138, 2144, 2145: n = A,T,C or G
nnacccacgcgtccggaccagtccttcagcggccgggttcgcgccgcggtcgccggctgcttacgtgggcgggcctagtgtggggctgagggtgcgggtcgctatggcggtggacatcacgctgctattccgggccagcgtcaagaccgtgaagacgcggaacaaggcgctgggagtggcggtgggcggcggggtcgatggcagccgggacgagctgttccgccggagcccccggcccaagggcgacttctccagccgggcccgcgaagtgatttctcacattggcaaactgagagattttcttctggaacacaggaaagattatattaatgcttatagccataccatgtctgaatatgggaggatgacagacacagaacgagaccagatagaccaggatgcccagatattcatgaggacctgttcagaagcaattcagcaactacgaacagaagctcacaaggagatacattcccagcaagtgaaggagcacaggaccgctgttttggatttcattgaagattacttgaaaagagtatgtaaactttactcagaacagagagccatccgagttaaaagagtggtggataagaaaagattatctaagctggaaccagaaccaaatacaaagacaagagaatccacatcttctgagaaagtttcacagagtccttcaaaagactctgaagaaaaccctgccactgaagaacgtccagaaaaaattttggctgaaacacaacctgaattgggaacgtggggagatggcaaaggcgaagatgagttatccccagaagaaatacaaatgtttgaacaggaaaatcagcgactaattggtgaaatgaacagcttgtttgatgaagtgaggcaaatcgaagggagagtggttgagatttccagactccaagagatattcacggaaaaggttttgcaacaggaagctgagattgacagcattcaccagttagttgtgggggcaactgaaaatatcaaggaaggcaacgaagacataagagaggccattaaaaacaacgctggcttccgcgtgtggatcctcttcttcctcgtgatgtgctccttctccttgctcttcctcgactggtacgacagctagccagggccacgggggcccagcacgagagtcctcatgggcactcacagactgcgtgctttcatgtacttccagtgctggagcatggtatgaccagattttatcacagtgccatttgaagggaaaggagttcagacagacagacgtattccccaaaaagggataccccaggccgatggtgttcagcccatttagcagctgaaaaaggaaacagtgcacaccaatgggaggcagcctgcgtagccctcatcaggcaagacagactgaatgcaggagtgggtgattagctgctccttgaacttgaggctgccttggcagcaggggcacagcaggcctcaagagcccctaattgtctcagggttcaaaggaagacactgacctttcccatcccggtagcttcagggaagatcatagttaataacgtctctcaacaaatgattacttctttgtttccttgtggcttcttgtctgtctgagtcaacgaatacacagacttactggattatagaagagaaaattcacatctgccttgttaatctaataaatataattacagccccttaatgtgttgtcaatgagtctaagttgacaaattcagtggcagcccagccacctcctatcaatcaatcagggaagaaatgcaggggagactggggccctcagtgaggggctgcctggcattactcctccaaagactgctgcccccagaacaggcagggggtgtgggagggccagtttcccgccactgggtccaaggagcctttgttcaaaggaagaagtgggccacggaagaacgggcctgcttctctcgtgcctgtgcttctgacctccaggaactgtaaacaggaacacctatgtgtaactgaaggcatgagacatctgttacagggaagcatcccagcgcccacatgggcatgagacagtttgcactgcgcctggtgagatgcgtaaatgtcgttgttgttgttaccaggacagttccacttggggcaagcacaaggttttncttcatgtttcttttnatttttgncaccann

SEQ ID NO: 20791 - DNA, 312 bp, Homo sapiens
  misc_feature 308, 309, 310, 311, 312: n = A,T,C or G
accatctggtttagcattttagcactctcaaaagtgtcctggtttagacaataaactctatagtcccccaattatgaggcaggtgcctggctgcagaggctgaggagcactggggtggtcctaagctaagtgtgggtctgtttgagaaattggtgatgctggtgacccagagatgtctgcttgttttgcgtgcagagaagggcatagaggagaaacttagacaccgagggccaagggcagaatcagtggaggagagtaaggagggtctccaagactacacctaaactctagaagaagagggctcctcnnnnn

SEQ ID NO: 20792 - DNA, 727 bp, Homo sapiens
aaataagttattttttggtaattttatgatttaaacttaagatgaagtcttacggaggagtatgtaactgagcaactttattaagttctaaaggctcagatgaacaagtaaaggagtctaaaattcttagaacagcaagtctgaactaaaggaactttaaaaattggcagaaactctttatacaatgaggccccagagaacataagctctctgacagcttgggctgtccttgtccccttcacaaaggtctccccagcagttacacaacccacagcaggagtgcacatctgcagaatgaatcactgaaagcaaagtaaatggtacaaaaacccagaaaaaacagtcctgcctacacgtactgagatccaatgagacataaaacagctaacatcttgatttctctatatcaagtgtgttttaaatacagtcatttgaatgcaaaaacaaaaacagacacatacaccttcatgcctgaatattaagagacaaaactcacactagagaaatttattttatggtccatttgctgcttcacttctattttacagaacaaaggctctttaggaagatgcttagaagtttctttaatattaggtttcttgaaggggggattaccaaattgcttttctagtttatgaatgactatgtaacttgccagataggcacatttatgcagtatcttgtcacaggactgtaagttaccttaaatcccacacattcaggcggg

SEQ ID NO: 20793 - DNA, 4033 bp, Homo sapiens
  misc_feature 1, 2, 4030, 4031, 4032, 4033: n = A,T,C or G
nncggcaccaggctgctgcggggggactctttctgaggttactgtggagcacccaaagtctgtcagcctctggccgtgcaaacaggcacccagaggaaccagaccttgcttattcacccacagcctgggactgtcttctccagagtctccatcagctttgctaatcgactgattggaaataattcctcaaacaccaccaagtcaaggatacaggcagcagcggctcccctgttgtatggacattctgcacccgaaactgatagctgagtcctgaagttttatgttatgaaacagaagaactttcatcccagcacatgatttgggaattacactttgtgacatggatgaatctgcactgacccttggtacaatagatgtttcttatctgccacattcatcagaatacagtgttggtcgatgtaagcacacaagtgaggaatggggtgagtgtggctttagacccaccgtcttcagatctgcaactttaaaatggaaagaaagcctaatgagtcggaaaaggccatttgttggaagatgttgttactcctgcactccccagagctgggacaaatttttcaaccccagtatcccgtctttgggtttgcggaatgttatttatatcaatgaaactcacacaagacaccgcggatggcttgcaagacgcctttcttacgttctttttattcaagagcgagatgtgcataagggcatgtttgccaccaatgtgactgaaaatgtgctgaacagcagtagagtacaagaggcaattgcagaagtggctgctgaattaaaccctgatggttctgcccagcagcaatcaaaagccgttaacaaagtgaaaaagaaagctaaaaggattcttcaagaaatggttgccactgtctcaccggcaatgatcagactgactgggtgggtgctgctaaaactgttcaacagcttcttttggaacattcaaattcacaaaggtcaacttgagatggttaaagctgcaactgagacgaatttgccgcttctgtttctaccagttcatagatcccatattgactatctgctgctcactttcattctcttctgccataacatcaaagcaccatacattgcttcaggcaataatctcaacatcccaatcttcagtaccttgatccataagcttgggggcttcttcatacgacgaaggctcgatgaaacaccagatggacggaaagatgttctctatagagctttgctccatgggcatatagttgaattacttcgacagcagcaattcttggagatcttcctggaaggcacacgttctaggagtggaaaaacctcttgtgctcgggcaggacttttgtcagttgtggtagatactctgtctaccaatgtcatcccagacatcttgataatacctgttggaatctcctatgatcgcattatcgaaggtcactacaatggtgaacaactgggcaaacctaagaagaatgagagcctgtggagtgtagcaagaggtgttattagaatgttacgaaaaaactatggttgtgtccgagtggattttgcacagccattttccttaaaggaatatttagaaagccaaagtcagaaaccggtgtctgctctactttccctggagcaagcgttgttaccagctatacttccttcaagacccagtgatgctgctgatgaaggtagagacacgtccattaatgagtccagaaatgcaacagatgaatccctacgaaggaggttgattgcaaatctggctgagcatattctattcactgctagcaagtcctgtgccattatgtccacacacattgtggcttgcctgctcctctacagacacaggcagggaattgatctctccacattggtcgaagacttctttgtgatgaaagaggaagtcctggctcgtgattttgacctggggttctcaggaaattcagaagatgtagtaatgcatgccatacagctgctgggaaattgtgtcacaatcacccacactagcaggaacgatgagttttttatcacccccagcacaactgtcccatcagtcttcgaactcaacttctacagcaatggggtacttcatgtctttatcatggaggccatcatagcttgcagcctttatgcagttctgaacaagaggggactggggggtcccactagcaccccacctaacctgatcagccaggagcagctggtgcggaaggcggccagcctgtgctaccttctctccaatgaaggcaccatctcactgccttgccagacattttaccaagtctgccatgaaacagtaggaaagtttatccagtatggcattcttacagtggcagagcacgatgaccaggaagatatcagtcctagtcttgctgagcagcagtgggacaagaagcttccagaacctttgtcttggagaagtgatgaagaagatgaagacagtgactttggggaggaacagcgagattgctacctgaaggtgagccaatccaaggagcaccagcagtttatcaccttcttacagagactccttgggcctttgctggaggcctacagctctgctgccatctttgttcacaacttcagtggtcctgttccagaacctgagtatctgcaaaagttgcacaaatacctaataaccagaacagaaagaaatgttgcagtatatgctgagagtgccacatattgtcttgtgaagaatgctgtgaaaatgtttaaggatattggggttttcaaggagaccaaacaaaagagagtgtctgttttagaactgagcagcacttttctacctcaatgcaaccgacaaaaacttctagaatatattctgagttttgtggtgctgtaggtaacgtgtggcactgctggcaaatgaaggtcatgagatgagttccttgtaggtaccagcttctggctcaagagttgaaggtgccgtcgcagggtcaggcctgccctgtcccgaagtgatctcctggaagacaagtgccttctccctccatggatctgtgatcttcccagctctgcatcaacacagcagcctgcagataacacttggggggacctcagcctctattcgcaactcataatccgtagactacaagatgaaatctcaataaattatttttgagtttattaaagattgacattttaagtacaacttttaaggactaattactgtgatggacacagaaatgtagctgtgttctggaactgaatcttacatggtatacttagtgctgctgggtaatttgttggtatattatctggttagtggttaatgcttcctttaaaaataattgagtcatccattcactctttttcagttttatctgtcaatagtagctacatttttaatggggagcaccttttatcccaaagtgctttattaaattgagtgggacttgatattatatccacacccgggtattcactgtggctgtcctttgctgttcaggttttaggaaatgttttttaaggagctatgtggaaaacagacaatattagtttaggtcgggaactgagatattgtaatcaaatagttaacatcaggaagttaatttggctggcaaaattctagggaaacttggccagaaaactggtgttgaaggcttttgctcatataaacaagtgccattgagtttcaaatgaccagcaaatatatttagaacccttcctgttttatgtctgtacctcgtccacccctcaggtaatacctgcctctcacaggtacagctgtttcttggaaatcctccaaccaaatagcagttttcctaacttgattagcttgagctgacagactgttagaatacagttctctggccacagctgatgagggctttctgtactgcacacagattgtgtactgcaccccagtccaggtgactgggtacccactcgagttgtgccgtgcacaacctgtccagtatatgcatgtggtggccctactgactggtaatggttagaggcatttatggatttttagctttgaggacaaaaaactgacttttacaaattttatgggtatatgcctaccctatgcacatagtggtannnn

SEQ ID NO: 20794 - DNA, 996 bp, Homo sapiens
  misc_feature 1, 2: n = A,T,C or G
nnactactactaaattagcggccgcgtcgactttttttggtggtactaatttgtgtgtggttctagttgtctgggaaacactactctaggcatttataatcattacatatacatagttgagaaaaactaaaagcttattttaaattagaaattgaagaatcaacttttaaaataaggccttaaacatacctgagaacaattatttgttatagtattatgtacaaattaataataaacacattttaatctcaatgtggtacactcttgtgtccttttaaagattttaaaatttttaaagaatttcaaagtgtacttaagtaaacttaaaaatgcatcacaaatattttgcacaggctgtaatctcaataagaatttgatcaaacactcaaatgaactatataggcctctcagatttccaaagctagagtactacaaagtttttagttaccctactgattgagtcttttacatcatgcccattttaagataatctatgtattttcttagtcacatccatgtagtagcaacctataactttaaaaaccaaaagcaattgctgacacagttttccctttaggcagaatgtggaagagaatggttaaaccatgaggaggcatcactggtgatgtaaaatgtagaatctattcctttttgtcctacagtactgacaggttttctactgaatgcaaagtattcttttatggtcttctgttttcatttattttcctcctccgatcccccataattcttataatttaagggctctttgcgggtttcagcaattcattacttaccccagtcatgtgctgggaaattttattattgcttactaaggcaattttaccagggatttaaatccagactcttgctttcttgagtcaacttttgttctcactgaatgattctacaatgttatcttgtgaaagcccctctcgcaacgatctgaaagtcatatcctttctaaatatgtaacacctatgattcataatagtgatc

SEQ ID NO: 20795 - DNA, 819 bp, Homo sapiens
  misc_feature 1, 2, 3, 4, 818, 819: n = A,T,C or G
nnnngatgggcgtcccccagtgtacaccattgggatgtttcgaacccatctgcagaaagttggcacagagcggcccaattgccagaatgccaccaatttaaacagcccatgacctctttcacatgctcttgatcccacactctggtttccaacaaatttagcacttgtacctatattaggaaggtatattctgggccttctccttccctgcctggactccggaagactcctgtcccagtctctctcacatgttctgaaggacttaaggggcaagtgtcagagtgaaaggccctagtctgagtttaatgtctgggccagcttgaaacacagctagtattttgagctctaagctaacactctggactttcacgtcatgttttctttccccagtgaaatagaaaagtttgatttcaaagaggaaaagtgtgcaatacctgcaacatacataaaacctatttaattttactcaggagtgggaatcaagaaacctgggttctgtttctgactcacttcggatagagaagggtagttaagctgtccttatgtttcttatcaatgaggaaaatactgtggtagttcatagcatttggggagttttagagtctatggaaaatggaagtgctatttgtaacttagatctgaatgttgaaacttgtgtttgtttttcaggcacttacggaacttaactggatgttctatgtgtctacgtaatcagctgatagtagatattattctactcctatattgggatgcaaaatagcagaaatcatacaggtctatgctggtactgtcagccaagactttacacagtcatcagnn

SEQ ID NO: 20796 - DNA, 1484 bp, Homo sapiens
  misc_feature 1482, 1483, 1484: n = A,T,C or G
acaagcaaaatatctccatgaacattctgagcagttctaaaggtgatgggagatgctttgactcagggacccaattcaaagattcccaggcacagacagagcctctgttttctgccctcagtcatgacagcagggcccagtctggacataggtgggcaccagagcttgtcaacatgacggaaggaagagatgaaccatagcatctttccggatctctatgtattagcctgaaacccctttggatcacatctccctactaaagaaggacatttgagcaaagacccagtgcacaaagcttagtgcctgtttgacatccagcggaggtagcttgtggcagttgtcacagatagaaatgccatggaaggcggccagtagcttatggaggcagcattccctggtgggtcaaactgagcctgtgaggtctgtgggattgcagggctggtgatttgattttgtcagaacacacatattgttcaggcacagagagaccacctcctgttaaccaactctccattgtgggtaaagctcaatgtcaaggcattcatttacaaatgggagctgttgattcttgtgaccaggatctggtgtctgataatcggtaacagggtgtatgagagcccatattaaaaatcagccgttgttggtgaccacacaatcagaacaaaggaacacattttccaggttaataaaattgtggaaacaatattcccagggcctgagagtcccggccccagccccaggagtggatcaacgtaaggcgttttcacccgccctgatgcagaatgagcgcctctgttcaggtggtgagtgagtgccactgttcagatgacagttgtgcatctccatcctctttgctggaaagcaacagcaaaattgaccccggctcaattaagtgaaaggagttactgcattgatgggaaagctgaggaccctggctaggaacgggcaggactagaggaccaggaagcaggaagcacggcagtggtctcgcaacatggccggtctggcctggacaccaaccccagtgctgcgcctctcactcaggtttcaaatcctagggaggcgtatctcattttcaagctaaggtacatgcctgaccttggcctacaagaggcccagatatgagtcttcctagactggcatccaattcaaagcaagtcagggcacttttcagaagtagaaatcagcgctgggctgctccaaagcaacagacacccacagcaagttaaaggtcatgagtcaaagaccatcactcgtgcacctgtaataacccgaagttagaattaggaggcactgcagaggaaccatggggtgttgcataaggagggagttgagatgggcttaataggacttggggttttgcttggtgattctaaagaggatttgaggaagagagggtcagtctggattggatattggctggaagtgggtgcaattaatgactagttaccttaatcatttgtatctaggaggcaaagagannn

SEQ ID NO: 20797 - DNA, 554 bp, Homo sapiens
  misc_feature 1, 2, 3, 4: n = A,T,C or G
nnnncgtccgagcagacagaactcttgagggaaagctcagcagagaggttaagtaccatagtagacatgtataatattgtcttgagtttagtcaggcaaatgggtatatatgtcttttcagatttattgtagtggacgggagcatgctgattgctgggggagaaatgagaagacaagcttgattcaggactgtttttataagggatcaaatgaaaaaatttacttaaaagtcacaaactataaaatgtagtgtacaaaggctagctatctttatagaactaagaactgtgaatttcagtgactcagcaatcaataaaaagtcaataacacacacatcttgtagatgatggtcattttaaattttctcaatgaatagtaaagagagattaacttagttatatttaaagcaaatagaatcaattaagtataaagaatgaatattataaattgatatatagaacgactattagaaaataaaaatgttgggctgggtgaggtggctcttgcttataatcccagcactttgggaggctgaggtgggcagttcacttgcg

SEQ ID NO: 20798 - DNA, 1353 bp, Homo sapiens
  misc_feature 1, 2, 3, 4, 5, 6, 7, 8, 9, 10, 11, 12, 13, 28, 1340, 1341,1342, 1343, 1344, 1345, 1346, 1347, 1348, 1349, 1350, 1351,1352, 1353: n = A,T,C or G
nnnnnnnnnnnnncggaagtcttctagnattaattaacgcgggatccacaatcaaataagcagctaagcagggggaaacctatcactgttaatgtcataatcacatcaccactgaattaccagatgtggtcaggaactaggcaaagtaggtgggaccaatcctaggactggggccataccacaacctcagctcagccccttgtcggatacggtttctgaatttagtacaatgccagaagtattttttttctttcagctgtgaaccagcctgttttgtttgacaagcctttccagattcatgcagctcaatcacgtgcttgttgccagtttgagagtgaacctattatttcaaacttgttggccgtgaccaatttttacaaaactgaaagtagcactgtgaggtggattggacctagtgatgaggtgtctacacttgcatccttttcttccaagagaatattctgacactccaactctagaagtcatgtcattagtaaaatgaaaataataattgcttaatcactgtttagaattagttcatacttcttcagagcttgaagcctccacgactcaacatcagatccatggatagtattactatacctttacccaaagactggatttattttgtaaaaatatcagaatgggtctgggtccctttaaagcaactgacaaggtatttaacaacattttaaaacaatgaagaaaggatgattctgcagaggctgctgggttacagaggagggcagagcttttgtcagactctcttgatgttttgctcttcctggtaagtttttatctatcatggttcccagtggaatattctccatacacattctgtgggaggatattgacatggctctagactctgccttttattttctaattctccttggagaattagaacaggcattccagaacttgtaatatagaggggaagaaagaaaaaatggcagatgcctcattgatggatccacaagttttgtacaaaagcacacaccattctgattgtctctatattaacattgtactcaccaaacagctttctaaaggtgactggaacaagataaatatcaactggataattacctaaggaaaaagaataaaaaagaaatcaaaccaaaaaaaaagcaaaaaattggtcagtttagcaagcgtgttttccaggatcataggctcataaactatacagtcaagagagtgaaacaattttaaaatcaaaagttagagccttttatatttcttcagatatacaatttcataaatcaagcatttattttgtgcaaagtattatattaggtaccctaaatggtatataaagaaattcaaaacagagtaannnnnnnnnnnnnn

SEQ ID NO: 20799 - DNA, 737 bp, Homo sapiens
  misc_feature 737: n = A,T,C or G
acgcgggcagttgaatttgaggcacttgaggtgtccaagagacaactgaatgatctagaactcaaaatagagatctaggccagagatagaaagagagcatacggggataactgaatccatggggttggatgaaggtagccatgaagactgcataggaagggcagagccctaaacaatcatatttaggcaatagagtatgagctgctcacagaggagattaagaaggaacagctagagagatgaaaggaaaacaaggagaatgtgctgtattggcaccgagggaaatgagtgtttaaaagaatggcagagtggttaaattccacaaagtaaacaaatagaataaagactaaaaggtgtgttcagataaagcaacaaggaggtccccagttacctcatcaaggctgatgtctgtgcagtgcgggggcagagacgtccagggtgatagtgagcatggatgccatttcctacagcttagctaagacggaaaggagagaatgtgggaattggggagaaagagccagtaaaagggaatgttgaagagagagagagatgtttaaaggagcaaaggtcgtgtggaggcaggagagaaaagattctaagaagtggggtttgggtaatagtctgggacagaagagggatatcctttccatgggataaatagagaaacggaagccgggttcggtggctcacgcctgtaactccaacaccttcgggagccaagacagttgatccttagn

SEQ ID NO: 20800 - DNA, 896 bp, Homo sapiens
  misc_feature 1, 2, 896: n = A,T,C or G
nncgtccgaagtattcaggtagtttatatgctttcctgagaagtctgctgggcataaaggggcaaagggcagggtaccagccataattcctacagaaggtcacttaacaaaatgtgcagtgtgtgtgttttcttagaggttttggtctagccatgtcttttactagaaatctattatgtcatggtttttcaagttgtatgcagctgataaaggatcttacatgtctaatagttaaagataaaatactgagtcactaagtcaactatatatactgctgttttctcagagactgtcagatttggtgagtttatgagctcacttcataaatagcatttccatttatggtaagcctgatgcatattcagtgacctattggattctaattctttggttgaattgctccgtaactggaattgcagtagagttgaacttcaagcaccttataatgggggactatgtgagctgccacagattttaaagatcagatgagggagttttgacatcagcataaaaggaagtgtgtcctcttatattcctaacgaccaaacaagattagagaaaaaatcttctgtcatagctaagaagaagaagcgcctaggtagatatgatcagaaggataagtggaggaggcagaacttaagctggccttgaaggatagaagttactgaagcagagaggagtggtgaagccaccctaggcagggagaacagtatgtggacaagaaatgtgtgtgttataaaccaggtagttgcaatgggtgtcataatttggtacactgggcatctgcacagaatgctctcttcctggtgggatctccctagagagtcaactcgtttatcatatagctatttggcaagcaaagaaacagaaccaagaaaaaaaaaaaagggcggccn

SEQ ID NO: 20801 - DNA, 590 bp, Homo sapiens
  misc_feature 68: n = A,T,C or G
acttctaccaaaatcaaaagtaaaagttgagattttgttgtgctaacatttgtcgttagaatgtatcnaccaagtgtgtagaatcagagtatgtgtttttattttagttagtaatgtgggttcatgcacatcttcagagtatttctttaatctttttgtgtttaatttaattttttgagtatttaaagtatttacatgttcaaaactcaaaattaagtgaaaagtagtagtcttgcttcaattttactccatcactctctacctatccaccaaatatataataaatatgttcattagcatcttgttttctcacttttttagcatttacattatatcctataattcactccatatcagctaagaaataatatcttcattccttttattaacattctcttttgaggtagttattgaattacatgtagtggcaataaataatcagataaatcctatatagttttacccagtttcccccaatggtaacaccttgcataactattttacattgtcatgactaaaaaatagaaattgatacactctatctattcatattttaccagtgttacacacagtcattgagtcacccgcgt

SEQ ID NO: 20802 - DNA, 658 bp, Homo sapiens
actgttttgatattgtagctctgcaggctgttggggtagctacacatggtgatgttctcattttctagtaaatcagaaagaataagatttagtatagagaaaaataatagttaacaacattttataattgttttatctagaatttttgacatatttgtcattcttaaaggcattataagaaattcctgttgtatttgtctagcaacataatgaaagaatgatgcacatttctgtttattattttataaatatggcctaaatgcagtatctttgttatttagtttatctgtattagtgtagattttattattaatattgtggttacatggttacaatctggatctcaggcacagtatggtttgcagttaaaatacgtcacttggtttcacttagtctaggaagcacttttaaaaaattagtctgacatattgactttgctaacaatacatgaaatgacattatcatctcacatgtatagaacatttacatttctggccgggcgcagaggctcatgcctgtaatcccagcactttgggaggccgaggcgggtggatcacctgaggtcgggagtttgagaccagcctgacaaacatggaggaagcccatctctactaaaaatacaaaaaattagccaggcgcggacgcgtgggtcgactcc

SEQ ID NO: 20803 - DNA, 568 bp, Homo sapiens
  misc_feature 568: n = A,T,C or G
accaaggcagttttcctgcagtcctttcaggttgaggggtaagagaggcaaatttaggtctggtttatccttaatttgcatgtgtattaatttgggaagaatacccagtaagactctccagtttctgtgggccgcacttgactagtatccatttggcccatagtgactacagcagtattgacagatacttctaaggattttgatcattcagtagtcttcttactattttggtagcaggattttatccaaatgttgacctggaagttcttaattgtgttttcaaatatttgattattttaaggtagtggtgtttgtttaaatatatgttatcagtatttttgttgttgttttcagcaagagtgttgacctgaataacctagcctgctattgccagaaaccagaagcctctgagggagtttataattgagtcttaataaaagcattttaaagatgaaagacaataatagcggtaagttattctgatttagagtagatgaaagaggtcaaggcttaattggcaaggaactgcataatggaatagtagctacattttaaaaggaagtgagan

SEQ ID NO: 20804 - DNA, 765 bp, Homo sapiens
  misc_feature 765: n = A,T,C or G
acaatactgttaagtgattaaaaagatttgatgaaaaagtgcagttctgtgttgactttaggaaacattttctcccagctaatgtcctaatactcagcaagcaaaattggaaaacagtttatattgctgtcaatatgtataagccatgtctcccaccattacttttccatattaaatatagaaaaaagcagaatcccatgtgtcccagtgactgtcagaaatcttccctcttcattaaataaaaatgtaaataccacattagggcattgtactgagtgttattatacaaacaggttccttttggagttcctaggcattcacaataactgtaaaacaataggactgtagcaatcttttgtcctacctcagtgacttgatgtatatactaggaacagccctcagtttgagtaaggtcagttgaagcccttactgtgtaagtccagaatttaagaaaaatgaatcccacgatgagcttcctcatgcttcggccgtgcgtggaccagtcagcttctgggtgtgactggagcagggcttgtcgtcttcctcagggtcactctgcaagggtcgtctgggcttggtcttgcctcccaggtttcaggtgctgcaggttttacacggctgtggtggatccaggctgggattccctctaccttcacagcggtgggagtggtcaggacgacagactacggtctttccaccgtgggcacaaagaagttacgttccagtccttgatccacactcgattacctccacactttggcatcn

SEQ ID NO: 20805 - DNA, 483 bp, Homo sapiens
  misc_feature 1: n = A,T,C or G
ngaaagattatttctggaagatcagttgaaaaatcttaagattaggaccaacagaatacaaagattcattcagaatacatgtaatgaagtggaacacaaggtaaagttttgcagacaattccatgaaaaaacatcagcgcttcaggaggaggctgacagtatacagcgcaatgaactattacttaatcaagaagtaaataaaggtgttaaagaggagatctataatcttaaagacagactcaccgctattaagtgttgcatcttacaggtattgaaacttaaaaaagtgtttgactatattggactaaactgggatttttcacaacttgaccaattacaaacccaagtatttgaaaaagaaaaggaacttgaagaaaaaattaagcagttggacacatttgaggaagaacatggcaaatatcaggcattattaagtaaaatgagagctattgatttgcaaattaagaaaatgactgaagtagt

SEQ ID NO: 20806 - DNA, 561 bp, Homo sapiens
  misc_feature 561: n = A,T,C or G
acctagcttttattcattttattattcatctttattgctttcattgcacatgctgttaacttcttatgaactctttgttctaataaataagcatatccaggtttttcataaataaatgaggagtctataaattcttactagttttaatagaaacattgccactaaaatggtgtattctagctgtgtgagcttttggaaaatgttttcatttcctttatgtttgaatgttccttccaggtctttgaaaatatacattctgagttgaaaagctttataataggtaaaactcattaacccatatactttccatgctgggcacagcaggtgtggtaggtagaaatataagatgactcccaagatttttgcaccctggcatacacatatgcttttccagttgttgaaacactaatttaggtgctgctgtgaagggattttgtagatgtgaataatgttccaaatcaggtggccttaagatagaaagatgatcctggatgggccagaatctatcagttgagtccttaaagggaacagcaccctttctgacaaagagattcaaagcan

SEQ ID NO: 20807 - DNA, 1168 bp, Homo sapiens
  misc_feature 1, 2: n = A,T,C or G
nncgtccggaaaaacaaattttatctaaataaactatttggacttcattcaaagagaaattgtttccttgggcagttttgctcccaacattagatcccgcattctcaggacagctgtcatctttttaatttagttttctgattttatttttatttattttgttactccaacctttgctttggcctttaacaactcagtgttttggtctaatcttcaagaggaatttgaggttcacttgaataagttagactagtttgaggtgggtgtagctagaggattgaagtcgtaccaaaaaaaaaatgtatgtatatgtatatgtggtgatcgtgggtggggggaaagaattcagagggaagaagcttggggacgtctttgcctggacgatttctaaaaactagctgactcgtcatctttaaaacaacaacaataaaagctatcatatgcatatgttactttgtttaatatttacaacaaccctttgtggtaaatattttcatttttcagatgaggaaattcaggcacagaatgattaataatttgctaatgagtcacagcagtgatggggatgtggagatttaaatcaatgcattttgagttgcctgagcaaagaattccaaaatttaggaagtcactatttctgtatttccttctaaggaaaaccatctaaagtatatttttatctccagtaggcgtggtcattgtcaagagaaggaaaggttggtgattttattggggtgatgggattgggacttaatttctctttgctttttctgtgtattccagattttatatagtgaacttattttaaaaaccaaccaagttgatgtttgatgtataatttatatacaatatgaggcacacgttttatgtatagttggatgaattttggcaaatgtgtctgtccatgcagttagcaccccaatcaggacataaaacattccatcactctagaaagttcctttgtgctcttttgccatcagccacccacatctcctgcctcaggcaactactcatctgatttttgacatcatagatgagttttctttgttttagaatttcatgtaagtagtagtattattactcttgtgtttgatactctgctcatcaaatgttttccctttagcattttattatgcaaaattgcaaacagaaaagatgaaagaattgt

SEQ ID NO: 20808 - DNA, 661 bp, Homo sapiens
  misc_feature 660, 661: n = A,T,C or G
aaaaaaaaaaacatctgttcataaatgatcatttttgtttaagtattagtaatataactgttagatccaattttcatatatgatgcgacgtttatttagagcttatgtcagggacctggaaatctgggaaacttccatgttcttaaaatctatcaagaagttggatttacttttatgtgtactgaatcatatgtagtgtcaaaactggaagattccaatggcctattccaacatttcccaaaatgtgttccacacaatactagttccaagagatagacagtgttagctcccattgaagaggggcagggggagggatttattcattcaacaagtattttggttaaaaatttgggaaacagttcatactgtattccatcctggaaaatcataatgtatatcaatattttaaaggcttagagaagtcttatagtaaactgtcttagtttactttagtcaactgaacatttcccacactttttgatataggaactgtgtgtgtgggacacatgtatgtcaaatgttaacccacagggcaaattttggaaaacagtcatctgttctatggtatttatatacattaacactaaaaaaagtgaattagctcttacatttgtgtcacccaatatgaatatgttgaaaccctaatcccagtgtgatgann

SEQ ID NO: 20809 - DNA, 973 bp, Homo sapiens
  misc_feature 1, 2, 969, 970, 971, 972, 973: n = A,T,C or G
nngctggaattcttttttagcgtggtcgcggaacaaagaatccttaaaacaattacaatgttaataacaaagataagtaatcacagagcactatgtcagatataatactaatttaaaaagtttgaaatataatgacaattaacaaaatgtgactaggaggctcaaagtgagcacatgctgttggtaaaatgatgctaacagacttgcttaatgtagggttgccacaaacagaagtaaaaagtgcttatttgccgacaaccttgccaaatattgactctataaaatggtttaaaattatttatattacagatactttgctttgctatttctaattctcttattttgtaaacagtgttattttagccacatatgtatttctttcgctctggatttctcatttcattttaattttgtgtgtatgtccttgatggattctttgaatttttgttttcattgcatctttctgtataattattcctgggatattgtgtcatttttaaaaattgcatttcgtaggatggattcctaatactttctttgcatgtgcttttatgttattttatttccttgtcttattactaaaaagtgattttatacttgccatgattttcaggtttcccagcttaagatggacagttcttacactttgatgtagcatgggcaaatttgtctctactttttcacatcaagctatagtttaagcattgagttttgaaatgtgcccactttttccctagcctgagtgtgtagagaataagcagatgagctcaattggtgtgcaatttaggtaaaagacctggactctttctcttgcctaaaattttattaagtatctaatcccatagcttgctctctttccaggaggcagttttactgccgccagggaaatagccttgctttcaaatctcttccttaattcagcgcagagccaccaaggctttgcttgtatcaatgagccatctcatgtcnnnnn

SEQ ID NO: 20810 - DNA, 1386 bp, Homo sapiens
  misc_feature 1383, 1384, 1385, 1386: n = A,T,C or G
acaacgtgggcaagcatctgtgcatatgaaatgctgtttttctaaaagttggtctcattccgcatatgacaatgctggctttccattccacaagaccatagaccttagacggaggcacctgtgaatacattctctctggacagaggcatattacctccttacattcttgtgtcttggaagatttctcacattggcaaactgagagattttcttctggaacacaggaaagattatattaatgcttatagccataccatgtctgaatatgggaggatgacagacacagaacgagaccagatagaccaggatgcccagatattcatgaggacctgttcagaagcaattcagcaactacgaacagaagctcacaaggagatacattcccagcaagtgaaggagcacaggaccgctgttttggatttcattgaagattacttgaaaagagtatgtaaactttactcagaacagagagccatccgagttaaaagagtggtggataagaaaagattatctaagctggaaccagaaccaaatacaaagacaagagaatccacatcttctgagaaagtttcacagagtccttcaaaagactctgaagaaaaccctgccactgaagaacgtccagaaaaaattttggctgaaacacaacctgaattgggaacgtggggagatggcaaaggcgaagatgagttatccccagaagaaatacaaatgtttgaacaggaaaatcagcgactaattggtgaaatgaacagcttgtttgatgaagtgaggcaaatcgaagggagagtggttgagatttccagactccaagagatattcacggaaaaggtttgcaacaggaagctgagattgacagcattcaccagttagttgtgggggcaactgaaaatatcaaggaaggcaacgaagacataagagaggccattaaaaaacaacgctggttccgcgtgtggatcctcttcttcctcgtgatggtgctccttctccttggtccttcctcgagtggtgacgaaagttagccaaggccacggggggcccaggacgagaagtctccatgtggacctcacagaagcgcggcgtcaaggtacttccaggtcgggacatgtggttgacccacattatccaccagggcctgcgagcgaaagagaagctacacaaagagtatttctcacagggcaccagccgaggttaaccaccaactacgaaagaaagggtcgcccagaggcggcgggattcaatcggaaaaagtacgcgaggagaggcaatccaaagatggcagaagagcacacacactcttagaaaagccacctggcgaagaaaaactcgcttgactagagagaacttagtcaacaatttttctgtatatttactgatgatgannnn

SEQ ID NO: 20811 - DNA, 338 bp, Homo sapiens
  misc_feature 1, 337, 338: n = A,T,C or G
nacctaagaatattcccctaactttctgatctcggtgagggcaggcagggatcacttgctaataagatgtaacacagtaagccaaatctttaaggataaaccagaaaagggaaaaaagcagataaatgcattattgtcaaaaagcagtcctacattcaaggagtcatgagataaaatgaagtgcctgggggaaactttgagaagcttagtttgaatgaacagaggagaattgggacttcttaaagagcgataacactggaaatgtgtggaagagtccaaaccacatactatccaaggacaatccactgtctgacatactcaactttttaactgtgtnn

SEQ ID NO: 20812 - DNA, 1148 bp, Homo sapiens
  misc_feature 1140, 1141, 1142, 1143, 1144, 1145, 1146, 1147, 1148: n = A,T,C or G
acgcgggtatttggtatttaaacagaatttcagtggaaatctttcaaaaacttaaacctttttatacagaaatccatattgaatatataaggcaacgctttgttagtttgctttttgagttattattatgtttgttacttgtaagtttgtagcagctcttcctgttttcaaacagatgagtttttaaacagataacccagcatgtttcaattttttgtggaataatagatgactcacagtaaagttacaacatattttcttttaagtaaaaaacttaaggaataatgatacttgctttgccattcaagggcctttttttatctgtttactgtgtggatcttacacatacaccagatacgagttttggtgagataaggtggttataattatttacttattgtcagcaattgctttgtggcctattcatttgacagtaggtgatttcaaatcggagaagtccaacggggagctaagtgaatctcctggagctggaaaaggagcatctggctcaactcgaatcatcaccagattgcggaatccagatagcaaacttagtcagctgaagagccagcaggtggcagccgctgcacatgaagcaaataaattatttaaggagggcaaagaggtactggtagttaactctcaaggagaaatttcacggttgagcaccgaaaaggaagtggtcatgaaaggaagtatcaacaattatcttaaattgggtcaagaagggaagtatcgcgtctaccacaatcaatactccaccaattcatttgctttgaataagcaccagcacagagaagaccatgataagagaaggcatcttgcacataagttctgtctgactccagcaggagagttcaaatggaacggttctgtccatgggtccaaagttcttaccatatctactctgagactgactatcacccaattagactggatcaaggcagttcagatgtgtagcaaactcagagaatttgcattggctttagccattttggagtgtgcagttaaaccagttgtgatgctaccaatatggcgagaatctttaggacataccagctttctccctttgtctcataaccatgtccaccaatgagaatgctaatacacaagctgcccatcttcacagatctaagaacnnnnnnnnn

SEQ ID NO: 20813 - DNA, 1490 bp, Homo sapiens
  misc_feature 1488, 1489, 1490: n = A,T,C or G
actatgaataaggtattgaaatccttttatattttagagcatgacagtgataattttctgaggtaatattttctactttaaaatagtctctgttaaccattataaactatgtagtttaaaaatattctatgcttgttattgagttaaatccaaacaataactgataaacaaggtaagacagatattatcatcaccattggatataggaggatttctcatcctcagcagactcttgagactttgggccagataaatgtctgtcgtaagggctgtcctgcacatggtagggtattttgcagcatcactggcttctacttactgcatgcagtggcatccccattcctcagttgtgataacccaaaatgtttccagacactgccacatgttccctgagtgacaaaatcaccctctgttacctacttaatgtaatgtcagtaaatctacagtgattaatgttttataccttcaatcaatgaatgttaattgggcacatactatgtgtcatgtgttgttctaggcttttgccatataatactgtcttactatatggaatttacattcaagttggggagcggaaagcaatataggtatagattttaggaaaggcctctctgaggagatgacatttaatcagcaaccttgatatgatgtccagaagtaatccaagcaaagggcaattcagatagaggacacagcagtagaaacaccccagcgcaggaagatgattgaggaacagcaagaatgttggtgtggctagagtacagggagcaaaggagagtcacagaaaataaagttgtagaggaagtcaggagccaaaacatgtaatgtcttttagcccatgaaaagaaacttgaaatttattttaaatgttatgtgaagttatttgtaacttttggacagataattaatttatgttttaagcaaatcaccggctattgtgtggaaaatagggaacagagactagcaatgaaaatggaaggcggggggctgatagatggaggcattagaagtaatgagaattgatagaagttgacgaggttgagccagcaagacttgctgatgaaagaatcaggcttttggccttagcagctactaaggcagggaggactgcgagaggaacaggttgggaggatagtgaatcagtgtctttggtggcaggttagattttagatatctagtaggcatccagatgaaggtggctagtgggcaattggggatccgtgtctacagttcaagtgtaaggataagaatgccgaacccatttgggatcatcagcttaataggtaaatttcttgaggatggttgagtgattcggtcagatggctaaaagttagctattttcaatagctcagtgttgtaaaatcaaagaagggaagcactggcagtcattgtcagtcgcacactgagagaagtcaaagaaaattactaattgaaaagctgttcaatttacctaaaaaaaaaagtaatagtcacctaagagctaagtcnnn

SEQ ID NO: 20814 - DNA, 529 bp, Homo sapiens
  misc_feature 1, 527, 528, 529: n = A,T,C or G
ngtactggttaaggaagagtattgttgaagatacacttagttttgtaagatatattaatttgatcacttgcacgtgtagttgaattattgcaaagaattgtccagtatagaaatggcttccagagacactgcaatctctactgtgctgattcacactgcatcatatgatatagaggttgtatcttaatttagcatggtcctactggatttgctttttattactaaattactaaataaccttagagactaaagacaatacagcattgtgagataattagggggtattgtctttagcctctagggttgtggtaaatctgggcatcgtctcactggattctcgactcaggatctcataaggctaaactcaaggtgttggcttggttgcatcctcatctggcattcagagttcctttccaagcttacatagtgtggccagattcatctccttggagtcattatttccctggtgggctcttacctgggagctgctcttaacaactagaggccacttaaacgacttaccacgnnn

SEQ ID NO: 20815 - DNA, 1135 bp, Homo sapiens
accatcttcaccactccaggatttaaggcgtaaatcctcttaccaattagtcattcgttcaacagaacttcatggctaggaagtcacacttcaagttgcactagcacactattactttggggatgaaaagtttacatttcctaaaatgtgctacacaaaaacatttccataagtgtttttcagagagtcagttgcactacagcctgatgaaactttttcaaccataaaaagactcgagttccataaaccgtcacaaagatgtgaacaggagaaactgcagactctccatcagatatatttattgaataagctgaatggaaaaagcaatgtgcacagaacacacattagcaagggagaatatgttacttcatttactcaacaatctattttttcaaacacagccaggaatgcagaaaggaagagcagcctcaaaggagccaaagagtaggtcatgagtgcacacgctaggcctgatcagtgacaaagcctctgagctctctcacagagatgatgtgctcttagctcacaaaccagaagctataaggttggaagaaacagacaaagcaatggaaaaaaaaatgttagctagaaattaagtccacaagttacttttgcttctgctctctgattctttgaaacagtaaatacataaacaaaagcaagtaaatatgattatttactacattttcaaaaatctttggcgaagttctacacaaataaactgaaaaaattcagctctggaaaataaggacagacttaaaggcaacagataaagatgtataggagataaagtacctcacagacaatataaagaacaatccttttaaatattttagattacttagtggaaaaaaatggtgcaaaatcttcaggattgcaaataacaaatacactttgagagagtgaaacagaaaaccagaacagtaagaacaaagtacaagacattttataaagagtgtgagtgcaggcaagccgtagaggatccagtgtgcacaatgaaatgctctacactgaaaaagtgatcaaatgcacagagcatttaacattatactcaacaacaggttctcagctttcagttaaaagttattaataaaaacgaaatctttgaatgcattagcacagcaagatgcttaca

SEQ ID NO: 20816 - DNA, 6946 bp, Homo sapiens
  misc_feature 6932, 6933, 6934, 6935, 6936, 6937, 6938, 6939, 6940, 6941,6942, 6943, 6944, 6945, 6946: n = A,T,C or G
cgacccacgcgtccgggcccggcggtgatttccgcggcggtctctcctgcgcccggcctctgcggcgcaggcccagcccccgaacctcgcacgttcggcagccccggcctggccccggcccctcctgcccatggcggtggccgagctgtacacgcagtacaacagggtctggattcccgatcctgaagaagtttggaagtctgctgaaatagccaaggactacagagttggtgacaaggtcctgcgactcctgctggaggatggaacggagctggattattctgtcaatccagaatctctgcctccacttcggaatcctgacatcctcgtgggcgagaatgacctcacggctctcagctatcttcacgagcccgcggtgctccacaacctcagaatccgctttgcagaatccaaactcatttacacctacagtggaatcattttggtggccatgaatccttacaagcagttgccaatatacggagatgccatcatccacgcctacagcgggcagaacatgggcgatatggacccacacatatttgccgtggcagaagaggcatacaagcagatggccagaaacaacagaaaccagtccataattgtaagtggggagtcaggtgctggaaagacagtgtcggctcgctatgccatgaggtactttgccaccgtcagcaaatcgggcagcaacgctcacgtggaagacaaggtcctggcatccaatcccatcaccgaggccgttggaaatgccaagaccacccgcaatgacaatagtagtcggtttgggaaatacacagaaatcagttttgatgaacaaaatcaaattataggagccaacatgagcacttacctcctggagaaatccagagttgtctttcaatcggaaaatgaacgaaattaccacattttctatcagctttgtgcatctgcacagcagtcggaatttaaacatcttaaattggggagtgccgaagaatttaattatacaagaatgggaggcaatactgtcattgagggtgtgaatgatcgagctgaaatggtagagactcaaaagaccttcacgcttctgggtttcaaggaggattttcagatggacgtttttaaaatcctggcagccatcctacatctgggcaacgtgcagatcaccgcggtgggcaacgagaggtcctcagttagtgaggatgacagtcacctgaaggtgttctgtgagctcctgggcctggagagtggcagagttgctcagtggctgtgcaatcgcaaaatcgtcacaagctctgagacggtggtaaaacccatgaccaggcctcaggctgtcaacgccagggatgcactggccaaaaagatctatgctcacctgttcgacttcattgtggagagaattaaccaagcgttgcagttttcaggcaagcagcacacttttattggtgttttggacatttatggttttgaaacctttgatgtgaacagctttgaacaattttgcatcaattacgctaatgaaaaactgcaacaacagtttaacatgcatgtcttcaaactggaacaagaagaatacatgaaggaagatataccttggacgctgatagatttttatgacaatcaaccagttattgacctgattgaagcaaaaatgggaattctggagttactggatgaagaatgtttgttaccacatggaactgatgaaaactggcctcaaaagctgtataataattttgtcaacaggaaccctttgtttgaaaagcctagaatgtcaaacacatcctttgtcatccagcactttgctgataaggtagagtataaatgtgaaggtttcctggagaaaaacagagacaccgtctatgacatgctggttgaaatcctgagagcaagcaagtttcatctctgtgccaacttttttcaagaaaatccaactcctccttctccttttggttcaatgattacagttaaatctgcaaagcaagtcatcaagccaaacagcaagcatttccgaaccacagttgggagcaagttccgcagctctctgtacttgctcatggagaccctcaatgcgacgacgccccactacgttcgatgcatcaagccaaatgatgagaagttaccctttgaatttgactccaaaagaattgttcagcagctgcgagcctgcggcgttttagaaacgattcgcattagtgcacagagctacccttccaggtggacatacatcgagttctacagtcgctacggcattctcatgaccaagcaagagctttccttcagcgataaaaaggaggtgtgcaaggtggttttacacagactcatccaggattctaatcagtaccagtttggtaaaaccaaaattttcttcagagcaggacaagtggcttatttagagaaacttcgattggataaactgaggcagagttgtgttatggtacaaaagcacatgcgtggctggctccagaggaaaaaattcctccgagagagacgagccgccctgataatccagcagtacttccggggtcagcaaactgtgaggaaagctattactgcagtggccttaaaagaagcttgggcagccataatcattcagaagcactgccgtgggtatcttgttcgcagcctgtatcagttgattcgcatggccaccatcacaatgcaggcctacagccgaggattcctggcaaggaggaggtatcgaaagatgctggaggaacataaggctgtgatcctacagaaatacgcacgggcgtggctggccagacgcagattccagagtatccgacgattcgtgcttaatattcagcttacttacagggtccagcgtttgcagaaaaagctggaagatcagaacaaagaaaaccatgggctggtggagaagctgactagcctggctgctcttcgagctggggatgtggaaaagattcagaagctggaagcagaactagaaaaagcagccactcacaggcgaaattacgaggagaaggggcaagagatacagggatgctgtggaagagaaattggcaaagcttcagaagcataattcagaactggaaacacagaaagaacaaatacagctgaagcttcaagagaagactgaagagttaaaagaaaaaatggacaacctcaccaagcagctctttgatgatgtacaaaaggaagaacggcaaagaatgcttcttgaaaaaagttttgaactgaaaacacaagactatgagaagcagattcagtctttgaaagaagaaattaaagctctcaaggatgagaagatgcaactccaacacctggtggagggggagcacgtcacttctgatggcttgaaggcggaagtggcccgcctgagcaagcaggtcaagacaatctctgagttcgaaaaagagatagaactacttcaggcacagaagatagatgtggagaaacatgtgcagtcacaaaaacgggaaatgagagaaaagatgtcagagatcaccaaacaacttctcgaaagctatgacattgaagatgtaagaagcaggctctctgtggaagatctggaacatttaaatgaggatggagaactttggtttgcttatgaaggactaaagaaagcaacacgtgttttggagagccatttccagtctcagaaggattgctatgaaaaggagattgaagctttgaacttcaaagtggtgcatctcagtcaagaaatcaaccacctgcagaagttattcagagaagaaaatgacatcaatgaaagcatccgtcatgaagttaccaggctaacatcagagaacatgatgatcccagactttaaacagcaaatttcagaattggagaaacagaagcaagatcttgaaatccgcctgaatgaacaagctgagaaaatgaaaggaaaactagaagaattgtctaatcagttacatcgcagtcaagaggaggaaggaacacaaagaaaggccttggaagcccaaaatgaaatacataccaaagagaaggagaagctgattgataagattcaagaaatgcaggaggccagtgaccacttgaagaaacaatttgaaactgaaagtgaagtcaagtgtaacttccggcaggaagcatcccggctcactttggaaaacagggatcttgaagaagaattagacatgaaagacagagtgattaaaaagctacaagatcaagtcaagacactaagcaagacaattggaaaagccaatgatgtgcactcgtcctcaggacccaaggagtaccttggaatgctgcaatacaagagagaagacgaggccaagctcattcagaacctcattcttgacttgaagccccgtggcgtggtggtgaacatgatccccgggctgccggctcatatcctgttcatgtgtgtgcgctacgcagactctctgaatgatgccaacatgctgaagtccctcatgaacagcaccattaatggcatcaagcaggtggttaaggaacatttagaagactttgaaatgctgtccttttggctttccaacacttgtcattttctcaattgcctgaagcagtacagcggagaagaggaattcatgaagcataatagtccacagcagaataagaattgcttgaacaattttgacctttcagaatacagacagattctcagtgatgtggctatacgaatatatcatcaatttattatcataatggaaaagaatatccaaccgataatagttccgggaatgctggagtatgagagcctgcagggcatttccggcctgaagcccacaggcttccggaagcgctcctctagcatagacgacacggacggctacaccatgacctccgtcctgcaacagctgagctacttttacaccaccatgtgccagaacggcctggaccccgagcttgtgaggcaggcggtgaagcagctcttcttcttgatcggggcggtcacgctgaacagcctcttcctgcgcaaggacatgtgctcctgcagaaaagggatgcagatcaggtgcaatatcagctacttagaagaatggcttaaagataagaacttgcagaacagcttagcaaaggaaactttggagcccctctctcaggcagcctggttgcttcaggtcaagaagaccacagacagtgatgccaaggagatctacgaacgctgcacctcactgtctgctgtgcagatcataaagatccttaattcatacacacctatagatgactttgagaagagagtgactccatcctttgttcgcaaagtacaggctctcctaaatagccgggaggattcatcacagctgatgttggataccaaatatctctttcaagtcacatttccttttaccccctctccacatgctctggaaatgattcagatccccagcagtttcaagctaggctttctgaataggttatagcaggagaaaaagtcaatgcactttttcttcaaaagctaagtgaaggttcaatatgagggatgtgttttattaattggcagtggaaattgggaatgtgatttaaggaagaaaacagacttttgctcaaatggaccacatcatctctcactcacagtgacaatgctgctcctgtaattttgtaagaattcacacacaccagctgtatttggaaaagccatgtctcactctcgaatctcagctggttttcactgaaattcctggagggctcatattttcttccacgtgcctcttgatctgttctgtcttgtggcagggctctaccaggagggagtgagatctggggacacagtggcttccaagttttctaaggttcatgtgaaacctgagtacatttacaaagctgcaagtggattctagtgctgagtcttccaggaaaaaatcccgtttggccaccgtgacctgccaaaagttctcttgccccatgcctgctggggacagaaggttttcatgaactctttttactgaaaatgccctgcatttaaaaatgtttattttagacccttctaaatttttttttttttttgagactccggagtctcgctctatcgccaggctggagtgtagtggcatgatctcggcttattgcaacctccgcttcctgggttcaaacaattctcctgcctcagcctcctgagtagctgggactacaggcacctgccaccacgcccagctaatttttgtatttttagtggagacaggtttcaccatgttggccaggatggcctcgatctcttgacctcgtgatccgcccacctcagcctcccaaagtgctaggattacaggcgtgtgccaccgcgcctggctgacccttttaatttttaagagtgttcaatccgagatgaatcatttgaagtatttttatatgtatatctatttaaaactaatatattattaaagcttaattgccatgccgtttatcttctctgaaagaacttcaaatcttacctgccaacatattcaccataattattttttaatacctttcatacaataacttttttaaaaaaacctcagattgaaaaagcaacctaaattactttcgctctctaatcagcatttcaatgtatttatttttaaatgttctcaaaaagtaactaaaaaattgtgtcggaccctacttttgagaaatctacgtttcccaagttttatgggaactggctattccttgtcccggcacaccttctcattccttcctttcagagcctaaaacctcatttgataagcactcctagtctctggcctgtggatccagtgctattctgtcaccaacctaagaatcccaattgcaccttctgtttctgacagtcacaggtgacagctgtgattctataatacagactggtgtcttagaggtaggaataatacatgattatgaagcatcaccctgctaatacataataatgtctttttatattataagtgattgagtttagttcatttcaatacattgtacatgaaaaaatgaaaagtagaactttgtaatactttaatcaataaaattaattaccaaannnnnnnnnnnnnnn

SEQ ID NO: 20817 - DNA, 554 bp, Homo sapiens
  misc_feature 551, 552, 553, 554: n = A,T,C or G
ccggaagaaacagtaaaataaagcaggtggacagcgtactgaagcatgtgaagaagcatctgcccaaagcacatgtgaaggagcttatcagttggctcgtgggtcaggaattcgaattagaaaaaatggagtccatatgccaggctcgagcaaaggagcttgaagactccttgcagcagctactgagactccaggatgaccatagaaacctgaggaagtggttgactaatcaagaagagaaatggaaaggaacggaagaaccaggggagaaaactgagctgttctgccaagctttagctagaaagagggaacagtttgaatctgtggcccaattgaacaactctttgaaggaatatgggtttactgaagaagaagaaataataatggaagcaacatgtttgatggatagataccagacattactgagacaactaagtgaaatcgaggaagaggataagttactacccacagaggaccagagctttaatgatcttgcacatgatgtaattcattggataaaagagattaaagagtcccttatggttttgaannnn

SEQ ID NO: 20818 - DNA, 849 bp, Homo sapiens
  misc_feature 849: n = A,T,C or G
acacgtttacaaaaatcgttctgcgtgcctagtattcttgctgtccggtggcctagaaacaagcataaggggctagagaataaggcacaaaatgtgcaacggagagaatctttgtcttatactagggttcttataaatatgaccaagagaatcatcaaaacaaaatgaaacagcctggggataacagcaagatggagggttcccaggagcagcacgggatgggagatggaaaaggacatcagtcagtgcctgtggtctgtcggctgcttgacatgggccatctcattcaacttccttaacacttgagaattaggtattggcatccctgctttagatgaagaaaaccaaggcacagcatgattaaattgtgcaactggtatgctgcagaaccaagatttttcatactggtgtgtacatcaaagttttcattatgtagaaaattatacagaagctgtatattgagaagtaaataggtaaccaatcaactgttgagaattaggatacctgagttattaagagatgtgaaaaggattcaggatacaactaatacttattgaatactgctatgcttttaataccctctaccagaaaggagttaggtagagttcaagttcttagaacagtacctgatacataatgtaacaaaatcttactcatcaattactactattaatgttaccactccactaaatcctgccaacaatcctgtgaggcacatacagttacagttatccccattttagaaataagaatgatgcttagggaagtgaaggtaatacactcaaggacacggaactgggtaaaggaggatcaattttgtgtataagaactaaaatggggctgagcgcn

SEQ ID NO: 20819 - DNA, 595 bp, Homo sapiens
  misc_feature 1, 2, 3, 4, 5, 6, 595: n = A,T,C or G
nnnnnncatcaaagtattagagattttattatgcaaatcatgctcttgagttgggtgggattcaggaagaatatggcatcacgcaaagtaaggtagagggtgcttgaagatcaatttcatcttcataagggattctccttgccttgggctctgaggaatgttgggatgccttaatcccttcagcacaggtcactgttgatttagagagttgggtgcagctaccatggcctgagttgttttctcagctgaatcagattcagacagggcttcttctgagacggtgggatgttcttctaacaggtgtgaggaataattatctcactgtgtctctctgagtttcacttacctttccttaactctgttattgccacaggctgtaatgccagaaatgagggtttttggaaagtcgctgcatgtctgcttggttgtgagtctgggcagctgatgaatgggttgctgttatggtgtttacttttctgaatcaggtgttcctttgcagaggcagggggcttccagccattatgtaagctttcagaaaatacccaatgatcttcttagagaaagagcaccatttaaatagaagctactaaaatcn

SEQ ID NO: 20820 - DNA, 372 bp, Homo sapiens
  misc_feature 1, 372: n = A,T,C or G
nacattttctgagaaaaagggtggcgttgggagggcaaatgacttaaaacttcttttaattacccaaggcaaaagattgtctattgaaagcttggaagggctatatgtccatttggaggggaaaaaaaatttatcttacctccagcaagaagagatttctaaaatattgtgctgaaacacagtgtacctaggattagacacttttagatagttaaatataagaaatgctaggcaagcataatttgtatatgtataatacaccctgaaaattttattctcaacttcacttctgtttagatctgagacactaaaaatatttcctttagcagaaaattcttcaatgattatagaaagaaaatttgctgtatagtn

SEQ ID NO: 20821 - DNA, 634 bp, Homo sapiens
  misc_feature 1, 2, 634: n = A,T,C or G
nncgtccgctgcgatgaaacaaagctgtaaattatctaatccccttactttttttttctcctcaagggattgaaaaatgctatgacatcctttatgagaaaaataaatgccatattatgcttcttgttcacttgggggctcatgttgattcataagcatttattgatgcttcagcataccttttcagactaacagatgcctgatattgtacttactttacagaattaggatgatgagtctttcttccgaggttttataaaagtcagagaacccagaaggcccataattaggttttttgcacttctgcctttcaggcacggtgtgtaggaaattccagtttggatgatatttgcacattttgatgtgtctcctgagttgagtatatgatactcttgtgggaactacaggtgtgttttcctctaagaaggaacagtgcttctgtgtttgggaaggcctttccaagacaccatgtgccatcattattacatctttttttatgtgtgtcttgggatctttccatcactaatttaataagcatagcttattatagtgagcagccatttttggacctgccctccttttcagtttcattattttcttgccttttgttgcccttgtcattcctctacttgan

SEQ ID NO: 20822 - DNA, 536 bp, Homo sapiens
  misc_feature 1, 2, 3: n = A,T,C or G
nnnatcccctgtgagagcacacccgaggttcacaaatctacttcatcacagatcaagagtaactctggttagcaactgttaaatcagcggaaagttaatgaacatggaggatgaagtccacaaagtgctgtctgcagtgttggtgggcaggcattcgcattaggaaaccctctgtggtacaggctctctcagtggccaactatttggtgatctgcacatttttagcatagaaccttgaaatgatacagctgtgctggtcattacggaattctctttttgtgtgacagaattgtgacaggctcccaggacctaaacccagaaggaagcaggaccatattgctgcctagagaaggggatggagcagattccaggacaccgatgaaacagaagcttccatcacagtgctttctgctaccttatgagacagttcgcatctcaacagctctaggatacaaaggaagcacatacatttatactttataaggtggccaaggaatcctactgtgaacaaagaatttctaagataataaaatccc

SEQ ID NO: 20823 - DNA, 688 bp, Homo sapiens
acagttaacaagaggataactttttttattatctctgtccttctccctcaggaagcagagaattatcagattggtgagagaaaggaaataaaggtctgaacatgtgtctcaagtcacctcttttgggagcactctgttctcagtttattttaattctgtttctcaatttaatgagtttactagagcagggtccactattaccctgtggagatccttaatgatacatggatatgtttaattctgggaataaagtagttaaactggctagtgattatgccacattgttagagtcatctttgtcaataagaaagttgttcatatttatgacatctgtatccatttcttcagaagtgtgactattattcatatatccccaatacacacaaaatatatagttttaactaaatttttaatctgttacatatttttctaggttactagctagagacatcctggttgtttccaatttgttgtaaactggaaatttgatgctaaacaagtagtgttatgacaagccttcttattcataacttgacatgcttttgccagtatattttagatgaaattttgagattatggtggagtcaaatcatatgaacactttaaattttgctccgttattacccatattcctgtgcaaaagtgacaccaatttacaatgccatattgtatagacgtgtttcatggt

SEQ ID NO: 20824 - DNA, 461 bp, Homo sapiens
  misc_feature 461: n = A,T,C or G
actgggcttgcaaggtagacagcactgtgagaaaaggaatcatagaaaattagtgctgagatgaactactgagataatagaatctaacatcctcattttagagaaaagaaacctgttgtttataaggagttgactgatgtgcctagggtcacacagctagagccctttaagccaaattgttactctattatcctacacatttcctcataaataagttcatgggcaggaggtgagagatgaagaaaatagatacaccagtcacaatgttaagagaaaagctctaagagccaggaagagaataaacaaaaatgaggggaataaaagaatcaagaaagaagtaaatctttctttgttcaaagacaagttccagacagaactgggaacatttaaagcagagaaggcagaaaaaaaaaaaaagatagattggcccctagaagcacaggtaaagcatgaaaaatgan

SEQ ID NO: 20825 - DNA, 314 bp, Homo sapiens
  misc_feature 314: n = A,T,C or G
accacacatatacacttctggtagttttctttcttcattttctaactattttgtgagtatgttaaatatttattgcaccttcatttttaatgaatttatctcccagtgcgtagctatagcaatgcttttagataagtaaccttgcacattttcattattttcaatatttcactgttacataaaataagggtgaccatcaaggttgattttgacttgagaaccaaaagttctcactggaggcaccaggaaaaaaaaatgtagtattgcccatagtttttcatatcatatacaatattatatacaatatattatan

SEQ ID NO: 20826 - DNA, 1850 bp, Homo sapiens
  misc_feature 1, 2, 1846, 1847, 1848, 1849, 1850: n = A,T,C or G
nnactaccatcagagatactatgacacctctatgcacataaactagaaaacctagaagaaatggataaattcttggacacatacaacttcccaagactaaaccaggaagaaggtgaatccctgcataggattagacttcatcctgcatgaaacatggcttcagtgaactgtactttatcttttacattacaggtaatttcttctctagatttttctctttgccctcaactcttgacatttctctaacattctgttggccacacaatcccttttctttgataaatttggcaaattccatggcttcaagtatcaaccacatatagtactataaactcgaaattctctttggttcatcagcctcaaattttccacctgtctcctacatgtctctgtcaaaaacataacacacacacacacgtcagttactacaagtaaaataaacttagtgaatcattgactattattggatataacccacttttctgtgctctttaaacttggcataagtaatataggagacagcattggaataatcaagagtaccttgcaagtcacattggtaaggtgcgctagactaaacatgtgacaaggctagcgttagaaccgcagtttggtgtctaagtttagaagcaggttagcaactgtcaacatgaaaaatgtatcatattttcttctggaaaatgatttttgaagaaatcatatagctgcatatctatctgttaaaaggttaataaactcagaagtagaaagacttcagatgctgaggaaaacatataatctatagcattcttgagagattttccatttgctttttatttgctagataattacatttggcttaatctgattttatggttatttagatttctcccttgagcaaaataacataattttcagtatctaagattcatcgattttttgttgaaaacaaatagatgtgacatgttaagggagaccaagttgaaccatccctcagacccagtacaaatatacctagtaagtgcccccctttcaatacattctaattgggaagaagaagagactagtggcttaaaaggagaaagcagaagctcctggtagtgttacctgatagcagaacttaccaggcagttggaattcacgagtgttattcttgaatgactatgtctagggggaatattgtttaaccttcgtgcctcagattacccattagactattgggtataatcatattcacctacctcccagggatatcagagactttactatttcaaaaatattttgagtttttgtaaaatgtcctatataattaaaaatagtattatcatcttcctgcagaggctaaaaaatgttttccttataatgagtataaaaagcaccctatggtttttaaatttaaaaaaatcactggaattttaatttagatacatatttgttatttaaacattatctttgaggtgggataaaatgtttagtttcaggttaacaagggagagaaataacactaagtttaagtagttttttttagccttttacggtgttactgtgatttttcgtcaaggttgtggagctaaagttagataaagttatgatgcttggttattggagttgataaatgatcctggaagttttaactgtctcacttttccatcttctcagtctaatttccttttattgcttgtttgaggacggatagctaagctttttaactttctaagaatgagtatgatgtctcattcttgcaaatcagagattgtgtactaattccattaactggggggtgtttccagctctgcactgaaggggtgagcactacacacagtcagctggatacttttgtagccattgcaccttttgaattcatgcnnnnn

SEQ ID NO: 20827 - DNA, 761 bp, Homo sapiens
  misc_feature 760, 761: n = A,T,C or G
actgtgggaaaataccatgggaacggcgctaagcccttggctttccgattgaagggagcactagctattagctgctcatctcaacatatgtatttttttattttaatggataaaaatgttatatggctgatatgattgatgactaagataaattttcacactgggacattttctgcctgaaggtcaggcttaggtggcctggtcccagagttgctgtttctactaggacccgacctggtaaaaatagaagatacagggtagtgaggcagatttgaaaagaatgcagcatgtgcaaattcttactagctgtaatataaatgataaattaaaacatgcatttagtggaatgcactcccataaactattctagattgcatatttgtatacatccatctagtatattttttctgtgttaaataggtacatatttatccttttattccataaaggtaccacacatatacacttctggtagtcttctttcttcatttactaactattttgtgagtatgttaaatatttattgcaccttcatttttaatgaatctatctcccagtgcgtagctatagcaatgcttttagataagtgaccttgcacattttcattattttcaatatttcactgttacataaaataagggtgaccatcaaggttgattttgacttgagaaccaaaagttctcactggaggcaccaggaaaaaatattatataccatattatatagaggtattactcttaggttttgcttactcaaatann

SEQ ID NO: 20828 - DNA, 886 bp, Homo sapiens
  misc_feature 879, 880, 881, 882, 883, 884, 885, 886: n = A,T,C or G
gcgtccgcggacgcgtggggggaggagcaggtgctctgcctggcggctgtgtctgcatttctggacgccccagagcacagaagttgccggcactttgaggtcttcctcggcatgtgccagattacatgagtgacggctgggaatatgttttcttttttgtaatggaggcgtgtttcacaagagcaagaactgcaccaaatagtgctcagtttgttgtgttttgacaaacatctaaactacataaccatgaaacaaatcaagacacgcagcgtttccgtcacagctgaaagcgtctgtgcccctttccaggccgtgccgccattcaggggatacaagtgctcttagttctgtcatctgaatttggtttttacagaactttctacaaatggactctacagtaggccttcttctgtatctggctgtattcagacagcaggatgtttatagtattcatcgctgacgttctgagtatcaatatcaatagctcgttccttctcgcagggtaatagtccattgtgtgcatatggaacatgctcatccttcccctgccccaagtgggcactgggttcactctgcttaactgtttgaaaaaccgtcagactgttttctgaagtggcggcagcagcttccatgccacccgcagtctcaggcttcatttcttcacatcctcacccaaactggttctcacctgtttttactgacaccgtccccgcgggagtgaagtggcgtcttgtggtttggatctgtggctccctcatggctgatggtgctgagcactctgtcgtgtgcccggtgcccgctgacgcctccctgggagcagcgcctgtgcaggcccctgcccactgttccgctcactttcagggccggtagcgacgtggnnnnnnnn

SEQ ID NO: 20829 - DNA, 3139 bp, Homo sapiens
  misc_feature 1, 2, 3137, 3138, 3139: n = A,T,C or G
nnacccacgcgtccgcaacctaactttacctaagcagtatgttgtgggtactctcactataaccaatggcagtgaagagtttatctttttcctctggagtcataaggtcatcaatagtgagagtacccacaacctaactttacctaagcagtatgttgcccatattatgaccctgaagttagtaagcacctctgttacgataagagaaaacaagaatattccagaaatactaaaaattcagataattggcctgggcactcaagtatctcagcgaccaggagcacaagcacttaaggtagaagcgaaattagaacactggtatataacaggtttgagacagcaggatattgtgccatcacttgtggcttcaattggtgacactacatcatccttgcttaaaattaaatttgaaaccaatccggaggatagtcctgctgaccagactctgattgttcagtcccagcctgtggaggtcatctatgatgctaaaactgtcaatgcagtggttgaattctttcaatcaaataagggattggatcttgagcaaataacatcagcaacattgatgaagctggaagaaattaaggagagaacagctacaggacttacacatattattgaaactcgaaaagtccttgatttaaggataaatctgaagccttcttatctagtagttccacagacgggtttccaccatgaaaagtcagatcttctgattttagattttggtacatttcagctcaacagtaaagatcaaggtttacagaagactactaattcatctctggaagaaataatggataaggcatatgacaagtttgatgttgaaataaaaaatgtacaactactttttgcaagagcagaggaaacctggaaaaagtgtcgatttcagcatccatcaactatgcatatattgcaacccatggatattcatgttgagttggctaaggccatggtagaaaaagacattagaatggccagatttaaagtgtcaggaggacttcctttgatgcatgtgagaatttctgaccagaagatgaaagatgtgctatatttgatgaacagtatacctttgccacagaaatcatcagcccagtctccagagagacaggtatcctcaattcctattatttcaggtggtacaaaaggtctacttggtacttcactattgctagacactgtggaatcagagtctgatgatgagtattttgatgctgaagatggagaaccacagacttgtaaaagtatgaaaggatcagaacttaaaaaagctgcagaggtcccaaatgaggagctcatcaatcttctactcaagtttgaaattaaagaagtgattttggaatttactaaacagcagaaagaagaagatacaattctagtatttaatgttactcagttaggaacagaggccacaatgagaacatttgacttaactgtggtatcttatttaaagaaaatcagcttggattatcatgaaattgaaggatccaaaaggaagccccttcacttgattagctcttctgacaaacctggattagatcttttgaaagtggagtatattaaggctgataagaatggacctagttttcaaactgcttttggaaaaactgaacaaacagttaaggtggccttttcatctttaaatctgttgctgcaaacacaagctcttgtcgcttctattaattacctcacaaccattattccatctgatgatcaaagcataagtgttgctaaggaggtacaaatttcaactgaaaaacaacaaaaaaattcaactctgccaaaagcgattgtatcctccagagatagtgacattattgatttcaggctatttgccaagttgaatgctttctgtgtcattgtttgcaacgaaaagaacaatatcgccgaaatcaagattcaaggactggattcctccctttctctccagtcaagaaagcagtcactttttgcccgactagaaaatattattgtcacagatgttgatccaaagacagttcataagaaagctgtgtcaataatgggaaatgaagttttccgttttaatttggatttgtatccagatgctactgagggggatttgtatactgacatgtccaaagtggatggtgtgctgtctctgaatgttggctgtattcagattgtctatcttcataaattccttatgtcacttctgaacttcctgaataatttccagacagccaaagagtctctgagtgctgccactgcccaggctgcagaaagggctgccacaagtgtgaaagatcttgcccagaggagttttcgtgtttccatcaatattgatttgaaagcaccggttatagtcatcccacagtcttctatttccaccaatgcagtagtggtagatcttgggttaatcagagttcataatcagttcagtctggtgtctgatgaagactacttaaatcctccagtaattgatagaatggatgtgcagctaacaaagcttacactttataggacagtgatccagccaggcatctaccatcctgatattcagctgttgcacccaattaacttggaatttcttgtaaatcggaatctagctgcatcttggtaccacaaggtgcctgttgtggaaattaaaggacatcttgattcaatgaatgttagtctaaatcaagaagatcttaatcttttatttaggatactaacagaaaatctctgtgagggtactgaagacttggataaagtgaaaccaagagtacaagagacaggtgaaattaaagagccccttgaaatctctatatcacaagatgtacatgattcaaaaaatactttaacaactggagtggaagaaattaggtctgtagacatcattaatatgctgctgaattttgaaattaaagaggttgtggttactttgatgaaaaaatcagaaaagaaaggaaggcctttacatgagctaaatgtcctgcaacttggaatggaagctaaagttaaaacctatgacatgactgctaaagcttatctaaaaaaaattagtatgcagtgctttgatttcactgactctaaaggggaacctcttcacattattaactcttctaatgtgactgacgaaccccttctgaaaatgttactgacaaaggcagacagtgatggaccagaatttgacnnn

SEQ ID NO: 20830 - DNA, 813 bp, Homo sapiens
  misc_feature 812, 813: n = A,T,C or G
actcaaatatagtgagctctttcagttctacatttgaggaaaccttactctcaaagtgccttttacataatacttagatttgtcaatgaatatttctatgcatctaggcatcatgacaatggaagttaaaaataatgtcctggagacatttcaaaaccattaggtatcatctgaatcatcaagatacaattatgcttactatagtgttatcattaaacattaacatttacttttttcaaaatcagtgatctgtattgatacatatttagtagcactctattaataagaatatgtaattaaccacagcactccactgcttgaccatatcagatgttagagaatttgcttaagagttctgtttagccccctacttctaacagcttcccgtctctctactgagagataaaagagtaatagaaaatagagtaatagaaactacttttatattcatcaaagccttaggatcatataaactctcgaactaaaatatcttctgagggtaaataaaaaagcccttctcttatttctcacctgctgctaccacacatgtgcacacacacatgcaatgaatttctcccattctaagtatggagtccagcctactctttctagttatgttgatgtagtaaaatgataataaattctgagcatctggcataacaaaaaactcctactctctgatccaacttttaatggtcatccatcctgttagaaatataaatataatgcccattcttgaaatttagcaatttctttaaaggtgggaagaataatattattgaaaaatatagcacttcttactcatacttacnn

SEQ ID NO: 20831 - DNA, 438 bp, Homo sapiens
  misc_feature 430, 431, 432, 433, 434, 435, 436, 437, 438: n = A,T,C or G
acgagtaatttaaatttaaggtattttgcataggaattttacccctacataagcaattctacttcagaagatatagccactggatatatacagtatatcttcatggaatattgattttccctgaaaactttgggggaaatccatttttacattaaatagataaaaggggacccaaaggtgcctcatttaaggaaggctaccttgcctctactctcaaaaccttctggggcgaaattatattccccattggtgtttagaaaacttgggaagaaaagctgaaaagagcactataattcgtaataaaaaacacatatggggccggcttggtgattcaccgcctgtaatcccagcactttgggaggccgaggtggggcagatcacttgaggtcaggagtttgagaccagcctgtccaacgtggtgaaaccccannnnnnnnn

SEQ ID NO: 20832 - DNA, 1911 bp, Homo sapiens
  misc_feature 1906, 1907, 1908, 1909, 1910, 1911: n = A,T,C or G
gtcgacccacgcgtccgcgtctttgcagtggctttgcttagatccggtgccgccttgaaggcggggctgggtcccagccgtagccaatggagccccgggtgagggttgaggggtggaaggtgcctactagccggtgcaggtttcttctagcgcgtgtgctggggtacctggtcgtcatggaggcggtattgaccgaagagcttgatgaggaagagcagctgctgagaaggcatcgcaaagagaagaaggagttgcaagccaaaattcagggcatgaagaatgctgttcccaagaatgacaagaagaggaggaagcagctcaccgaagatgtggccaagttggaaaaagaaatggaacagaaacatagagaggaactggagcaattgaagctgactactaaggagaataagatagattctgttgctgttaacatttcaaacttggtgcttgagaatcagccacctcggatatcaaaagcacaaaagagacgggaaaagaaagctgcattggaaaaggagcgagaagaacggatagctgaagctgaaattgaaaacttaacaggagccagacatatggaaagtgagaaacttgctcaaatattggcagctagacagttagaaattaaacagattccatctgatggccactgtatgtataaagccattgaagatcaactgaaagaaaaggattgtgctctgactgtggttgccttgagaagtcagaccgctgagtatatgcaaagccatgtggaagactttctgccatttttaacaaaccctaatacaggagatatgtatactccagaagaatttcagaagtactgtgaagatattgtaaacacagctgcatggggaggtcagcttgagctaagagctctgtctcacattttacaaacaccaatagagataatacaggcagattctcctcccattatagttggtgaagaatattcaaaaaaaccactaatacttgtatatatgagacatgcatatggcttaggagaacattataattcggttacacggttggtaaacatagttactgaaaattgcagctaatttatacaatgttgtacaattatgttttaatacagtgtgctgaactgagtatttctaccaagtgttgggttgttctaaatgctactgaaaaacacaactaccttatatcagttttatggcaaagctactaacaggtgtttttagaaatatgtcagagataaactttaaccagtgtcttcttagtggaattttaaaaatttgttaagttcattgtagagaacaccattcatagaccaagatggtcccctattagctgatattttcatttatgtaagatcctggacattctgttttgtgttggaacaaattttcaatgtttttaattctcccttttctgcctgttcctaaaaactttcaaaataaccatttcaatgtaatttgtcttgaagaagtttacccaatatctttgtcattgcaataatgtagtatggtgatggtcaatttaattattgcttataaaatgaacttgattgcagtaaccatggtatcgatgagactaatgcagtgaagctttattactaatatatatagccttatcaaagcaagctaagaagctggtttataatataatttaaaatattatcagatggatcgtgtaaagagggataatccacgggtaatgggttctctcgggcatttaactcttagaatagaaatagttcttcggggtatttacagacgacctagagtaggggtaaaggttggattctgcgtttaaaccgggggttaacatttttgtctaaacactttattctggttctggttgagcatggggtacgcaagagaggaacgaaaacttagaaaaattcgtgagaaatatcttcaaatgaaggatggaaataaaatannnnnn

SEQ ID NO: 20833 - DNA, 653 bp, Homo sapiens
  misc_feature 1, 2, 3, 4, 5, 619, 653: n = A,T,C or G
nnnnnaagaaaaagatggagagagccttaaaatgcagcagaaaacaaaagcaagaattatggcggtgtctggacttttctaataactataaccaattctgaatacttcctttctattctaaagctatagatagcattcttcttcctctggccttcgtagagttttttcaattgacaaaatgaggtgggttaaaaaaggtgactaaatattggtggtaccaaatatagagacaccattaaattattcagttttcatgtcctttccccttaacttgggaattctgggtaagcagcaaaaccctgcctagccatccatgggtaacaagaagtcatgcttgggccagactatacagctgatgtccagtgtgtgactccctaagtaaaacaggttagatcccatccatatgagagaaacagtttttcagaatatggggaaagaaaagtaatgttattagaaaaatcaaatatggtaatcgtgggaaaatgtaaaattactgatttgtcaatcttgtcttcaaatacaagatcatcttggggacaagactaaatattttactcagcatctgaacattaccaagaaaaataaatactgccctactgaagaacaccatttatagctntaactttgtccagcacacatttcagcccatcacn

SEQ ID NO: 20834 - DNA, 4841 bp, Homo sapiens
  misc_feature 1, 2, 4840, 4841: n = A,T,C or G
nncgacccacgcgtccgcagcaacaggaagcccagctgtaaattcctctctttgtactctttctctttatttctcagaccagccgacacttagggaaaatagaacctacgctgaaattttgggggcaggttctcttgctaggttttgaggttttgctgaagatattcctgaagaatcatcccaggtgccacactaaaaaaatgatccagttgacagctacccctgtgagtgcacttgttgatgagccagtgcatatccgagctacaggcctgattccctttcagatggtgagttttcaggcatcactggaagatgaaaacggagacatgttttattctcaagcccactatagggccaatgaattcggtgaggtggacctgaatcatgcttcttcacttggaggggattatatgggagtccaccccatgggtctcttctggtctctgaaacctgaaaagctattaacaagactgttgaaaagagatgtgatgaataggcctttccaggtccaagtaaaactttatgacttagagttaatagtgaacaataaagttgccagtgctccaaaggccagcctgactttggagaggtggtatgtggcacctggtgtcacacgaattaaggttcgagaaggccgccttcgaggagctctctttctccctccaggagagggtctcttcccaggggtaattgatttgtttggtggtttgggtgggctgcttgaatttcgggccagcctcctagccagtcgtggcttcgcctccttggccttggcttaccataactatgaagacctgccccgcaaaccagaagtaacagatttggaatattttgaggaggctgccaactttctcctgagacatccaaaggtctttggctcaggcgttggggtagtctctgtatgtcaaggagtacagattggactatctatggctatttacctaaagcaagtcacagccacggtacttattaatgggaccaactttccttttggcattccacaggtatatcatggtcagatccatcagccccttccccattctgcacaattaatatccaccaatgccttggggttactagagctctatcgcacttttgagacaactcaagttggggccagtcaatatttgtttcctattgaagaggcccaggggcaattcctcttcattgtaggagaaggtgataagactatcaacagcaaagcacacgctgaacaagccataggacagctgaagagacatgggaagaacaactggaccctgctatcttaccctggggcaggccacctgatagaacctccctattctcctctgtgctgtgcctcaacgacccacgatttgaggttacactggggaggagaggtgatcccacacgcagctgcacaggaacatgcttggaaggagatccagagatttctcaggaagcacctcattccagatgtgaccagtcaactctaagaagactagatattcctagaaaataaagaagcaaatctctttaccgggaccttctctcaattttcatggcggaatgtctcccccagctgccacacacacattttgtattaattttaatgattaaaaagagcatagggtaaaaacctgatatttcacttatactgcataacaagctaaccaaactggacatggtgaataaatcataaaacaaatcattttacttattatttacatgacttttctttccatcaggtcttctaaataggactgaggtatagtacactggcaaaaataagaaaaggcaaacaagaatagcaccaaagtaacagatataaaaccaaataccatgtcagaaaacactatatagtaagaatttatcagattagagcagcaggagaaaattaatactaaattataatcattttagtgatatttttcaacttcaccacagtaactttgcaacatcatttttcatttgtggggtagtaaaattcatgtcaaaaaggaaagaaggaatggaggaggtcagttagttcattgcaataaattacctcttcagttcttaaaaacatgcccattggcacataactgagacataataactaagactggaagagccttggtttaagttatgaagcaaattaaaatggaaaatacaagaaaatagaaccaattaggttgaaaatgccccttactgaaaatctgtattaaaaataaaattaataaaagtaaaaaataaaaatagaaacacaactctactagtacaggctagcctggggagtttgataaactgagtgattgggtcaactatcactgtacttccataatgaatttcttcagtcatgttagagtagcacatgaatgtgagctctataaggacaggtactatatttccgtaagacccaatagttactgtacatcccataaataaaaaatactttagtttgataaccaactgaatatatgaggactgcatgtaattcaaccacatggttgtttgctgtacagtcctttgcaaatattaaaaaattttttttgctataaggctttgatcatatagtcctcatagcaacataactaccatctagcatgtaccacattttgcaagactttaagttcaacattccaaactgccaatttgtattatgtccaaatgcagtatccttgaggaatatagtgggtcagttaaatatctagagacatacaaacatctgctaattcatctcattgagatggatcattctgatctccatcatccacccacttttcatcagcttctcctacttcatttctcctcatagtctttatcatgagggattctgtatcctgtctctcatctacacttgctggccttcctggctgtgatttattggaacagtctacacaaacaccataacgtcgagatccatgtcttattccaacactggctgctaacatgaagatcttacacaccatacatttgtattttttatcctttttatgcaccagggaatgtctttttacatgttctcttcgagtaaacagttttccacaaatatcacagctaaatgatctcactcctgtgtgaatgagcaagtgcctttttagtgttcgtctgtatttggctacatagctacaatgagggcattttaacttgttcatgattagagatgattcaccattttcccaggtttcttgttttggccaagattctggcaataatccatacttgaaatcatttgaagcacctggtatcaatccatacttgaaatcatttgaagtacctggtatcaatccatacttgaaatcatttgaaggaccaggcatcaaaccatacttgaaatcatgtgaagtaccagcatcacctccatcttgactagtgccagcttcagccaataaatttgcattcacattcctatcaccatctggccccgagagtagagcaccatctaaatctggttcttccttgatgagtagtgtattttcttctggataggcaacaggtggctgcattactgagcaatcttctaaattcgtttcattattaggtggaatattataaataaatctttttgtagtttggtttttcctccttgttttgccagtctcttgaattccctgggagcccatattattccaaataaacacttttgtttgaccttcagattcattttcagccatttcaggagatccatcctggacccaactactgtcattcatttggtagttttctatttggccctcgtcgacattacaaccatcattttcaatctttacattacttgccaaattggtaagattccgtgttgcccaaaaactggcaattttttgatcccgtgatgaagacagaccatctctattaactggttttctattattatagtccacaactacagactctggagcttctgatttaatgcttatatttaaggcatctttaatgaaatttcggcaagtttgaacaacttcactcatttgaagatagctggccacggtcataacttcaatggcattttggcttgtgagcaccaggttaccagaatacaagaagtccaagatgactgaaaaaccttgaactgcagcaatatctaagtgggtagtattgttttggttagggctttctttgtttgaaaagcaatataaagtcttaaagaaacggctgcctgcaaccaggatgttcttatgagctttgaagatttttccgcttaccacaatgctgacatcacaaagaatacctttctttctctgttcatttagttgtcgcagaagttgatagcaataagagttctcatttggcctactattaaagtcacagtacccctcctctgatggtatttctgactcctggggcgttggcttcgtggagtttgtgctcggtagagacgtggtgcctcaggaggagggttttcttgtagttgcgggtccctcgcgaaagctcatcatgccccactgggggaaggtccacgcttcccccatctgcaggggtcttttggcaccagccgcaagacataagaccagtatccttggaatagcgcagccagggaaagtccttgagccaggaggtctggaaggagcattggagcttctgcattagagacttgggccgcgcgagcgggaagtgctggacagtctctccttcgccagctcccacaccgctgccctccacttcgtccccgccatcgccgcccgaccgcctgctgctgctgcagctgccgccttccgccccgctgccgtcgcccaggctcgccccctcctcctcgtcctcggtgctgtcgctcagggacgcgccgtcctgcatcaactccttcccctccagcgcgtccagctccagatccacagtcgccggccctcgcccattgaaatgcctcaagggccacaccgaggtctcggggcggccgcaagcnn

SEQ ID NO: 20835 - DNA, 888 bp, Homo sapiens
  misc_feature 867, 868, 869, 870, 871, 872, 873, 874, 875, 876, 877, 878,879, 880, 881, 882, 883, 884, 885, 886, 887, 888: n = A,T,C or G
acaaaatcatgtggatagatgtgcatttgtgggtatctgtgaatacaaatacacaattttcagatagaagtagtataagaaaaagaaatcaaacaaagtcaaacattttaagtgtagctcttggtgcactttaaaaaaattattaaattgaagctgtagtttattctcatcattgtcatcctatattagtgattttctttagcttttgaaattaaattcataatattacaattctgaattcctatgtatgtatatgttaagaatcctttaatgggactgactttcatatgtgtgtggctgcattctgaaatagttgtctaggtgatacataaagcagtgagtgctatttgtaagatatatttatatttaaagtcttcatacagttattaactagctccaatattactgaaatgatttctccaaatatcctatatttaattatcatgctggcaaatttattataactttgggttgaaaaaatatattatgatacatatccactgattaatgccacctatctgctttcctgaattcaaagtttatgattatttccataaatgtatttatcagtataatcaaaaataaaaataacataaataaaatttctgtgagctttacacatctaatgtgcaatgattataaatctggtcttatacacatggtaaaaaacatttaagtcacaaaagtatacttcaggtttaagtataaatctgaaattaaattctcagatttaagtataatttttaaaaactttggtaattgtgtccctactgttaaatttattgtatagttttcactatatcatctgaccttttaatgtttctagaaacttgtgtgaggtctcatacttcatggctaataaagtannnnnnnnnnnnnnnnnnnnnn

SEQ ID NO: 20836 - DNA, 770 bp, Homo sapiens
  misc_feature 1, 444, 445, 446, 447, 448, 449, 450, 451, 452, 453, 454,455, 456, 457, 458, 459, 460, 461, 462, 463, 464, 465, 466,467, 468, 469, 470, 471, 472, 473, 474, 475, 476, 477, 478,484, 513, 514, 515, 520: n = A,T,C or G
nctagacacagggtgctgattggtgtgtttacaaaccttgagctagatacagagtgacaatttgtgtatttacaatcccttagctagacataaaggttctcaaagtccccaccagactcaggagcccagctggcttcagcaagtgggtcccacatgggggccgcaggtgagctgcctgccagtcccgtgccctgtgctggcactcctcaggtggtaactttctcacaggccttggccacagatctgatcattacaattgcgtcagcagtggagggcaatgtctctattctgcctgcccgatctttaccaaaattcaaggcacctgttacagagggaaggccaagtgctgcaagtgagctgggagtgaccagaagaaatgacgcagaagtgaaatgaactttttataagcattcttttaataaaggaaaattgcttttgaggtannnnnnnnnnnnnnnnnnnnnnnnnnnnnnnnnnncaaaanccccggaaaaaaaaaaaaaaaaaaaaaannnaagtncaaagagtatattcaatttgttacataaaagaatactcaaagaagactgaagccacctccagttagcaagttctttgccattcaggtaacaattcatcacagtttgacaagatcactttttaaatttaggcttaagaaggacggcagaaatagctctgggcagagaggaaaggttcacatggatgtatataatgcattgtggtttgatattttaccccacacccatattataaataaacacgactgaagt

SEQ ID NO: 20837 - DNA, 845 bp, Homo sapiens
caaagaggtaaaagcttaaaaataaaaagctaagttgttaaaaaaaaatcactgttcaaatagtttatgctgtacctacttccaaaattattttgaacgttagatgagatgaggaaaagacttatgctgaaaggatgagaatagtttatgctcagcataaactattacagcataaactattacagcataaactatcacagcataaactattacagcataaactattacagcataaactattacagcataaaccatggaagtccagaaggtttccatagtttatactgtaatacagcataaactattaaaaacatgtgctttacaaagtcaggcactgagccagtttttatttaccattgtgtgtgtgtcccttccctacaagtcccaagcatactgtcagtgaacataagacaaatggctaagtttggagataattttaagggctaatttttaaaaagatttattttcttttgaaataaggaaagtgatttttttccatggtcccttctgtcagtaagctcattttccaaacttgtaatatgacacatatgccaaatatagaagcataaagggtaacttcaaaatctgccctcaatgtttgagtacagagacttgccccacccctgctcatcagagactccatgggagtcagtatctttatctcttgccagaataacagagatccagtcatggcatacaaatttggaaatgaaactgtaagtattaattgtcagtggaccttgagcaatacagggatatgggcccctgccctccaatagtcaaaaatcccatttaattcagatccccaaaatcagtaatattagcgggggaccctaaatgactga

SEQ ID NO: 20838 - DNA, 1148 bp, Homo sapiens
  misc_feature 1139, 1140, 1141, 1142, 1143, 1144, 1145, 1146, 1147, 1148: n = A,T,C or G
ccacgcgtccgcgtggaggaagagggggaagttggcgcatgcgcctaaagctgacgggtttgaaatggcttcgatgttagccgggacccgactcagatcgatgctatagaagacaaacaagggaaggttttttttccttttgcatcatggctcaatttggaggacagaagaatccgccatgggctactcagtttacagccactgcagtatcacagccagctgcactgggtgttcaacagccatcactccttggagcatctcctaccatttatacacagcaaactgcattggcagcagcaggccttaccacacaaactccagcaaactatcagttaacacaaactgctgcattgcagcaacaagccgcagctgcagcagctgcattacaacagcaatattcacaacctcagcaggccctgtatagtgtgcaacaacagttacagcaaccccagcaaaccctcttaacacagccagctgttgcactgcctacaagccttagcctgtctactcctcagccaacagcacaaataactgtatcatatccaacaccaaggtccagtcaacagcaaacccagcctcagaagcagcgtgttttcacaggggtggttacaaaactacatgatacatttggatttgtggatgaagatgtattctttcagcttagtgctgtcaaagggaaaaccccccaagtaggtgacagagtattggttgaagctacttataatcctaatatgccttttaaatggaatgcacagagaattcaaacactaccaaatcagaatcagtcgcaaacccagccattactgaagactcctcctgctgtacttgagccaattgcaccacagacaacatttggtcgcaagatacgcaagccaaactgttgggacgaattataggacttttatacccactgtgtggctacagggcattaattgcagcagtaacaacgaggatatatgaactaatggtaggtataacaaccagggaagaagaaaccacgattgagaaaagaaagccgtggtaaacaacaggacgaagagacagagtcacacagtactgtgatagtgtgctgtctctcgtatcaatagacttacgtcctccttctatcttctctcatctttaacatttactggtagaannnnnnnnnn

SEQ ID NO: 20839 - DNA, 795 bp, Homo sapiens
  misc_feature 1: n = A,T,C or G
nccaagattaaggacagagttccctccattgttcattgatttgtaaaccaaaatgtatctgtgacaggtattaatcaattgagaagagttttttatttttatttatttatttatttttttgccaaggttcaggacagatccaggtgtctttctccaaagatgattatgatggtgttaatatttaaaggggaaagtggcctagaggggaacaagggagggtatgatcatattactgtatccacatgttgcaggagaaatggagcaggtacttgttactcttacagatgtctcaattaattttaacctctatccctaatggtgtttaaattttggtaaagaaaaattcattttttctttattttccaagaaatggtaagctatctttgtccctatgggagatgtggacagagaaaactttctgtctctgatgtcttttgtgtgagacaagattttaggaaataaataagtggtgcagggaattgtgagattacatttcacctccttttctgtctcctctctcttttatataatctttatctctgcttctaacaatctccttatcagaatttctaacatatgtaatgatgagagagagaaaaactgccaccacaggatcaaatttcatttctaatctggagaaacaggagtctagttttccaaacatttttattctaaaaaagaaaagctattaaaagggtaagtatattctccaaaaagtaaaattatatctcagggctcctattaaaaaatctgtaaggttaattcaggtttgtggcaagaaaaattgctgtgccc

SEQ ID NO: 20840 - DNA, 456 bp, Homo sapiens
actcattctgttgatatgtaaacagattttatttatcatctgattaaagccacaaataagaatgctaagtgaaatttttctaattcattaacattaggaagtaaacagttggcctctgaaataaacactaatctttagtattgtgaagtcccagtttaaggtttctcagaatgtttgtctttcagtgttaacgtttgttctaatgcccagcttttattgtatgctttttctgaaggctgtgaaattctggtattactgggatattggggctggagggaggagtggcaaatgagatatctgtatctcaaatgcctttctggaatccttttctgttccatttcccagaatgtggctgttttcatttgatcgttacaaagagtggttgtttaactttggtgttaatgtcatttatgtgacatttcaaactgtcttttcaaactaacttgatcaatattg

SEQ ID NO: 20841 - DNA, 813 bp, Homo sapiens
  misc_feature 800, 801, 802, 803, 804, 805, 806, 807, 808, 809, 810, 811,812, 813: n = A,T,C or G
acaaacattagccatgcatggtggcatgcgcctgtagttccagctactcagaaggctcaggcaagagaatgcttgaacctgggaggcggaggttgcagtgggctggtatggtgccactgcactccagtctgggcaacagagcaagactctgtctcaaaaacaaaaacaaaaaaaaaaaaacactttcttctataaaatggctcccatgagtagtaaaatgacacagtagttaggtttatgtccagtcacagcctcttcccatttccactgggaatgccttacctaatgagttaagacaatgaaaaaagtaaaccagttagaatacttacactttctgatttaaaactcagtaaaactatagtaataaagacagtatgttactgacataagaacagacatacagaccaatggaaccaaattgagaattcagcaataaatcttcacatttatgatccactgatttccaacaagggtatcaagataattcagtgtaaaaaatagtcttttcaacgaatggtgctgggacactgggtctacacaagccaaaaggaatgaaattggactctaatctcataccacatacaaaaattcactgaaaaaggatcagaaaccaaaatgtaaaagctacaactgtaaaattcttaggaaaaaatacagatgtacatcttcgtggtcttggattaggcacatggtttctaagatatgacaccaaatgcacaaacaacaaaagaaaaaacagatatttagacttcacaaaaagcaaaaacttctatgtttcaaaggtcactatcaagcaaagnnnnnnnnnnnnnn

SEQ ID NO: 20842 - DNA, 645 bp, Homo sapiens
  misc_feature 1, 2, 3: n = A,T,C or G
nnntttcttcttttctttttattctttccctctctttctgtccttccctatctctctctcccaaccccctcactggccgccagctttccaccccccaccacatacacaccaacacacacacagagcttagcctcgttagttcctcttctttgcttctagccttttccactctacctctccaaaaacatccacgtccttctccttttcagggagagcagatgccttcttcttcagagcttctggttgccagtctgacactcagtcctagtcactaccctccaccttacagccgggttgtcatagcgttttcttaacaaaggctgccttctccctcttccaaggaattcttgcactgcttacaaaaaaagacaatttttttttcaattaggttttctatggtttgaatgtgctccctctaaaattcagatgttggtgagcctttaagagatgatcaagccatgagggctcctccctcattaatgagattaagttcttcataaaaaggcttcaggcaacactgggctctgttacttttctgccttctgctatgtgaggacacagcattggtttcccctgcaggatgcaacaaaaagtgtgatctgggaagcaaagagcaactctcatcagacaactgaaactgctagt

SEQ ID NO: 20843 - DNA, 2251 bp, Homo sapiens
  misc_feature 1, 2, 3, 2245, 2246, 2247, 2248, 2249, 2250, 2251: n = A,T,C or G
nnnaaagcctgcacaaatgaattcctcaccctaagccccctgaccgccagcgagtaaagaagcagatttgctctccctcccgcttcctccctcccatcttcccacccgggctgtgcccaggccacagagcagctgcaggccttgggagaggacccacacagcctcctgtaggtggcaacagtgccacctgtttgactcatagggctgaaccgaggactgaaaaagggaggaggcagaccactcggagaggagctgggaagcagtgcagagaggagagcggagcggagctgccgctgagcaaaggccttcaccatggccgagtcccccggctgctgctccgtctgggcccgctgcctccactgcctgtatagctgccactggaggaaatgccccagagagaggatgcaaaccagcaagtgcgactgtatctggtttggcctgctcttcctcaccttcctcctttccctgagctggctgtacatcgggctcgtccttctcaatgacctgcacaacttcaatgaattcctcttccgccgctggggacactggatggactggtccctggcattcctgctggtcatctctctactggtcacatatgcatccttgctattggtcctggccctgctcctgcggctttgtagacagcccctgcatctgcacagcctccacaaggtgctgctgctcctcattatgctgcttgtggcggctggccttgtgggactggacatccaatggcagcaggagtggcatagcttgcgtgtgtcactgcaggccacagccccattccttcatattggagcagccgctggaattgccctcctggcctggcctgtggctgataccttctaccgtatccaccgaagaggtcccaagattctgctactgctcctattttttggagttgtcctggtcatctacttggcccccctatgcatctcctcaccctgcatcatggaacccagagacttaccacccaagcctgggctggtgggacaccgaggggcccccatgctggctcccgagaacaccctgatgtccttgcggaagacagctgaatgcggagctaccgtgtttgagactgatgtgatggtcagctccgatggggtccccttcctcatgcatgatgagcacctcagcaggaccacgaatgtagcctctgtattcccaacccgaatcacagcccacagcagtgacttctcctggactgaactgaagagactcaatgctggatcctggttcctagagaggcgacccttctggggggccaaaccgctggcaggccctgatcagaaagaggctgagagtcagacggtaccagcattagaagagctattggaggaagctgcagccctcaacctttccatcatgttcgacttgcgccgacccccacagaaccacacatactatgacacttttgtgatccagacattggagactgtgctgaatgcaagggtgccccaagccatggtcttttggctaccagatgaagatcgggctatgtccaacgacgggcacctggaatgcgccagatatatggacgtcagggaggcaacagaacggggaggccccagtttcttaacctcccctatcaagatctgccactattggatatcaaggcattgcataaggataatgtctcggtgaacctatttgtagtgaacaagccctggctcttctctctgctttggtgtgcaggggtggattcggtcaccaccaacgactgccagctgctgcagcagatgcgttaccctatctggcttattacccctcaaacctacctaatcatatgggtcattaccaattgtgtttccaccatgctgcttttgtggaccttcctcctccaaaggagatttgttaagaagagagggaaaactggcttagaaacagcagtgctgctgacaaggatcaacaatttcatgatggagtgaatgccctgccctgcttccccacccaagccagtctacattgcccaaacagcaagggttggagagtggcttaagtggaatgcttcaggggtggtgggttgcaagtggggggagctttgccaacaggaggttttgaaccatgagggccctctgcccaggtgatgggcattccctaagctgctatggaatctgctccctttggggttttgacctgagatgtttgggaagagagtgagtaatgagaagtttctcctcaaatgaaactagaacagaggaagtaaaagggagattgctcggataatgtctcagacttgtgnnnnnnn

SEQ ID NO: 20844 - DNA, 442 bp, Homo sapiens
  misc_feature 439, 440, 441, 442: n = A,T,C or G
acaacttcctgacttatgctatttcagtgtttgcttagagatgaaatatgcatttatctaattcaagcataaatctgccttaccaattcatgcatttttatttctgtagctctttgtgatgtatagagttaggcagccaaaggacacagggaaatgggagctgggagctgggaagggacggggcatattgagagatcctagagagcccatgctcagatgccttcaggtaaaatcgggccagtgaaagctggggcctggagggaagttactggaggttctggttcgtcttttgtttcttatatttagaaagcctaagtcagaggtttgtggttttgttgtgactgtggttatttttaaaccatgcttgcttctcagcaaatgtgtcaataattaattcagcactgcaaaattccaaattatgttgaggtcacttttaccnnnn

SEQ ID NO: 20845 - DNA, 1687 bp, Homo sapiens
  misc_feature 1665, 1681, 1682, 1683, 1684, 1685, 1686, 1687: n = A,T,C or G
actctaaaaggagaatactgtaattgcaacataaaatttcaagcctctaagctaccaccagaaaaaaatgcagactagcaggaaacagaactttccttatgttgtttgttttgtatttttaatctgactcatgtaagaaaggttttgcaaaatttaggtggctttataatcacaataatacaaaagaaagtgaccctcgaaatgggttttaccactaattttcgattcttgaagatcacttcgaaacattaccagcccaaacatttttactgctcctcagaatacataacacctgttttttgatactacttttgtaatcatggtaataacagagtatggatatgtatcattcttgtgcaatttacaatgtattggactgattttctttctgactttgggcttggggtaacatatagcttttctatttagctataagaattatatttttacttcatttggcttttgacaggtcttttttaggagacctttccctcttgtcgtaccctaatctatttttgaggtaaatggactatttcttagtatctcagaagtaggaaaaaattgtttctcccagaagttattggactggtctagtctcattgagtatattaaacttgaatctagcctgaacataaagttttctgattgctaacttttaaatatgtattcataaagtctagaggtgagggtggggggaaaatgaatatttatttgtcatgtgccaataagtttggtcagtacaattatctttatctcatttaatttttacaactaccctgaaaaataattcttacaggaaaaaagaaaaaaaacgtacagagcatgaagaggggtagagtaggaatgcttgttggggatacataggttgttaatagcaaccttagatctagatctggcttggtcttataggagaataacactgactttgtttttgtggtgtttttttttttttttaaaaatccagcagccaaaaccagatttatctcatgggtggattacttaactcataaggctgatatattaagctaaatataccaaaaaaaaaaatcttggattaggttatttgaattccaaatggtgggtacgtttttgctctatatccagatgtgaagtaggaaatagtttataatgttgaacatggaatcagaaccagggagtcagaaggatttttggtttaatggacgatgacataatctgatgcttctgttctgtgataagttaatgatgggggtagttaatattgactctctctaatccatccacatgggccgattagattgagcattataacaccagatatgatagctaaagataagagcatcaaccatctgccctgccattttcccactttatcccaacatcctccactataaaaatcaattataattagaacatggacattcccagtattcaccctgtggatgcctggctggtagcaagtaccatgatttgagtgcttttacctggagaaagcctacagagttaggttggattttcaggctgctgcttaaatggtgagatatgacatatcaaccacgtcagtcctactcagtcactggagctcagtctatttacagtattctcatgcctccatcagcacttctcctctcccatgactgcctgttacttcccctggctaacttcactgccccgcgttaattaatnctagaagacttccgannnnnnn

SEQ ID NO: 20846 - DNA, 366 bp, Homo sapiens
  misc_feature 1, 114, 117, 119, 259, 362, 363, 364, 365, 366: n = A,T,C or G
natgattgtagaaaagttttagagggatgaaggcaagctgatagaagaaaataagcgattacagaaggaacttagtatgtgtgaaatggagcgagagaaaaaaaatttaaaaanagnanagtacacatcaatctacctcattcttacctctgcataagagagtagtgtgtagttgtataatagtttaacttggcgattggttattgattttgtaactagccagttactgaattattctaaaggttttgctgttgttatnttctttcgcctttttcagttgggtatagttctgggtaggttgataattttattcccatatttgtaatcttatttcactttctcaactcatcacattgactggnnnnn

SEQ ID NO: 20847 - DNA, 748 bp, Homo sapiens
tctgtgctttgtgaatagtgctgcaataaacatgcaagcgcaagtgtctttttggtataacaatttattttgactacatggtttgatctatagcataaccacattcattttataataggtattcactttaataattacatattacagtacttgtgagcccagtatacaaaagataagctccagacccctcaggatactgtaaagttcacaaatacaatgatgaaaacatctagattgcttcatgaccccctcacacccccaaagcaggaagcaaacagcccgactgagataacaaagaatactccgcatcaagatgggaccaaatactctaataaacccacacccagttagcctcagggaattttaaatttttgatctgaaaaagacaaggatctcaaccctgagttccccttttccttcattataggaaacaaatatttcatagatatgcctgctatgtatatagggaatacaacacagaaaataaacttttgctacatgcttcacctcaatgagaaccacatcatgcaccaattaatcaaaatacaatggatttgctttgatgttatggttccttattagcaaggttacagtaaccaagaaggaattacacacaacatagtttaataccagcttgagaaagcaatggaacaaaagtaattctatttttctaaacatcattatgtctggttactgtatatataatgaggatatatttccatgctccaacagatggcccagagaaagt

SEQ ID NO: 20848 - DNA, 856 bp, Homo sapiens
  misc_feature 704, 705, 706, 707, 708, 709, 710, 711, 712, 713, 714, 715,716, 717, 718, 719, 720, 721, 722, 723, 724, 725, 726, 727,728, 729, 730, 731, 732, 733, 734, 735, 736, 737, 738, 739,740, 741, 742, 743, 744, 745, 746, 747, 748, 749, 750: n = A,T,C or G
  misc_feature 751, 752, 753, 754, 755, 756, 757, 758, 759, 760, 761, 853,854, 855, 856: n = A,T,C or G
gacccacgcgtccgggcaaattactgaagcagttatggttcatagtagcaattgtatatgttacctaggagatggtgtcaatggccgggggcctcatcgccacgtaagggtgtcttgccaggtgacttgcaagggtgactgccaggttgaagccaaggcattcactgaacggaggcagaagcagaaacagtcccaggcaattcttggaaaactggcccattcttactgcgggacatagcaccttactgttgggtccaaaaccccatgtgtcctgccaaaaaaggcagcccagcacagatgtgttcagggccagagacaccatttgcctactgaatgacttgagcaatttggtgcatctcaccgagccttcaccttctctgttaaatggaacatctcctccctcctttgcaagattgtcattaggatttgtgaggtattggcaataacgggccctcccatccttcccattgctgttgttattactgtattcatagctttgtgtgcttcataggtaccctctagggtcctctacgtacaacatacaacagcttcgcaatagccagtgttggaggctccaagaacgagggtcctgtggctatgtggagagtaacagcagagccaggactgccactcagagctagttcacccttgctgccgccattcgaacccagagctcctggcccaaacagtctggaatgttctgnnnnnnnnnnnnnnnnnnnnnnnnnnnnnnnnnnnnnnnnnnnnnnnnnnnnnnnnnntagagggggtagagggggtgctatagggtaaataccggccctatttcaaagatttttaggggaattaattctaggaccatgggcatgaaacnnnn

SEQ ID NO: 20849 - DNA, 392 bp, Homo sapiens
acttgacaacagctgaatctgaggaggtctttgttcactcaaaaaattagttaatacaaggggttgttgtcagagattttaggggctaaaactgtctattccctatgaatttctggaaatggactattctgggggagctggatttaaaacagaaccaaacactggaaacagtgctgtaaatggaagaagaattgagaaggataaaataaaaatagatgaataatagatatgattaaaatacaagtggaaggggaaaacaaagccagggaatctcaggaaatcaagacattatattttagtttacaccacgaaaacaacagaaaatgaaaaaaattagaaatacataactttagaaaaatataatttcttctaaaagttaaaaagctaaattt

SEQ ID NO: 20850 - DNA, 1010 bp, Homo sapiens
  misc_feature 1, 2, 3: n = A,T,C or G
nnncctctttctgtgctgtccccagcctggcccccgctggccactcagactgtgttatctcctcttttgtacatctgcccaaggcacccttcagctaaggggttatgtataatcctttccccaactgccagtcccttgccttgctacaaatgcatttgtttgaaatcaatatatgtattcatttatcaaaatatcttcacttacatatttactacatgttagaattacagagtggttctccagacatctgctttgtgggttaggccaggctgaagttatcacatccattttgcagacagggttgccaggattcagaaaccccgtcacttgcccagaaacacagttgatagcagccacatggacttttctgactcctactccggtgctcttttgctcaatgtctttgtgaatattctgtgtaattatttgctcctttttgctccccagcccctccacctcagatctggttagtgattccaggacagaattattgcttgctcatctgaacatcccccactgcatagcccagccagcactggacacacagtagacactcagtaaatgtttgttgggagaatgcaggctttgatgtagaaagccttcctagaattacttgctcttacctaacagtggtcttactgcttcttatacaaagactccaccacctgaggctttctgggactcagtttccctgtctgtaaagtgactatagagcaagcttatccaaccaacaggccgcatgcagcccaggacagctttgactgcagcccaacacaaattcttaaaatttctcataacattattagttcagcccaaagccaggtacaaaaatagcagcagctggatgcgccctcgggttccaggcaaagaagatcacatactgtaaggctaggaagttggtgtttgcaggtgaccctggaagtgggtaagtgtcatggacaggatgagctgtcagctttctggagccagtttcatttcttgggaactattttcttttaaatatcccgcgt

SEQ ID NO: 20851 - DNA, 484 bp, Homo sapiens
  misc_feature 1, 2, 3, 4, 5, 6, 7, 8, 9: n = A,T,C or G
nnnnnnnnnatcatctctgaacagtacataaataattgtaacctagttgtaatttagactaaagcttcacacttctttgtactcatgctcctggtagctgttatcattcgttatttctaacagaagtggtttctatgtgcacaacccttaagagaaaacatcaggaacctgattaaaaactatcctcatcaccgcaaactccctatttatagaagacttacctactgaatgatctccgattagtcctttaacaattcagatcctaaatctaaaggctaaaagagaatcatttagggcatttcaaaggtagaaatcttctggtgttatatactattctcagggaccgagcaatcagcagctatactaaaactggaaaactcgtgactttatttatttatttattatatttctatatagagataggggtcccatcatgttgctcaggctagtctcaaactcctgggctcaagccatcttcctcctg

SEQ ID NO: 20852 - DNA, 596 bp, Homo sapiens
  misc_feature 588, 592, 593, 594, 595, 596: n = A,T,C or G
taacatgccaattaaaatccagacttcacattggcacctaatgaacacagcagaatgaccaaagttgagtgctagtcattgtcatagatgcagcctgaaaggaaaaaatacaaatttaaatatagttattaaaaacatattctctaagtattccaagtttggaaatgtgggtgattcatactctcctggttaaggattaaaaaaaatagaactggctcactttataaaaaatgagttaaatggaagatcatatatttaacttttattatttagtatataattcaacaaaatttcttggacagatttattctctattaaaatgagactcaagattattttatgtggcacttagtcatatactttttggtagtcactctgaacgaggttgaagatattaaagagccagactcgtaagtttaaaggactaaaggaaatcatgatcaacactgcatcatttcagttagattaattttttagattacagtttggaactatatgatgcttagagaatattggtattactggttatgaaataagtacctatttattcgccaaaaatcccgcgttaattaattctagaagtacccncgannnnn

SEQ ID NO: 20853 - DNA, 343 bp, Homo sapiens
  misc_feature 1: n = A,T,C or G
ntccaccgcggtggcggccgacgtacgcggggagaacaccaggtgctgttctcaacaacgtccggcgcttgaccagtgcattgagaaggttggtccccaataacatctatctcaagaccactttccacagccttttaatctcccactcccagtcctctctctttgttctctttccactctgacgaattaaatttagcccttattctttttcttgctttagaaaagttcctcgaagtttagacgtgtagaatgttagtgtcctcagcatatctcgcccaaatccctccttttataggtgcagagactgaggcccacagaggttaaatgccaggctcaaggtggt

SEQ ID NO: 20854 - DNA, 571 bp, Homo sapiens
  misc_feature 571: n = A,T,C or G
acttggatacctactagtgcttactcattagcatacagaagacaatacttgagggctgtagcaaaataactgagaggattttgaaatgggcaggggtcctgcagtaggatagggggtgaaactcagcaaaatgtcaggttatctgctgctaacataaccccatctgtaacctccaaggtccttgggcctttcaggaacatgtttttcacatttcatagaccactgtaaatctaaatagctaatacaacagctaaagatcttaaagcaatttggagacattcatatagtaaattcccttcgtctaccaaaggaaatatgagcatctctgaggcagagcagctgcttaatggttacagagcaatattacacaacagcttaatccaggaagaaaagaacaactctgcatttgtgtgatgctgtatttacactacatgtgtgctttttaaaaaaaataaaattgagtaggaaataaagacttctacaaactgaaaagtctcaaaagcaatatcaaattatattattttacttcttttttatttttctctgacaaaagcaacagtaaatcactacn

SEQ ID NO: 20855 - DNA, 3821 bp, Homo sapiens
  misc_feature 1, 64, 148, 3821: n = A,T,C or G
natcaagtgttctcaatgctaagttatatgtgttagtgtcggggaaatagtttgcagataatgnaggagtacccctacaactatatgtccttagttcttacagaacctcatagtttgagaacaaagctgatgcaactgatttatacanaatgaactttggcaagaaaaataacattaacctcattgtttttggccgggctttgcttaatgatggatcattgttttgtgaggagacagaaaaaccctcagattcatcctttactttgtgtttgacacattcccctttaccttcaacctcagaacccacaactgatcctcaagctagtttatctccaatgtctgaaagcaccctcagcattgctattggcagttctgttatcaatggtttgcctacttataatgggctttcaatagatagatttggtataaatattccttcacctgaacattcaaatacgattgacgtatgtaatactgttgacataaaaactgaggatctgtctgacagcctgccacccgtttgtgacacagtagccactgacttatgttccacaggcattgatatctgcagtttcagtgaagatataaaacctggagactctctgttactgagtgttgaggaagtactccgcagcttagaaactgtttcaaatacagaggtctgttgccctaatttgcagccgaacttggaagccactgtatccaatggaccttttctgcagctttcttcccagtctcttagccataatgtttttatgtccaccagtcctgcacttcatgggttatcatgtacagcagcaactccgaagatagcaaaattgaatagaaaacgatccagatcagagagtgacagtgagaaagttcagccacttccaatttctaccattatccgaggcccaacactgggggcatctgctcctgtgacagtgaaacgggagagcaaaatttctcttcaacctatagcaactgttcccaatggaggcacaacacctaaaatcagcaaaactgtacttttatctactaaaagcatgaaaaagagtcatgaacatggatccaagaaatctcactctaaaaccaagccaggtattcttaaaaaagacaaagcagtaaaggaaaagattcctagtcatcattttatgccaggaagtcctaccaagactgtgtacaaaaaaccccaggaaaagaaagggtgtaaatgtgggcgtgctactcaaaatccaagtgttcttacatgccgaggccaacgctgcccttgctactctaaccgcaaagcctgcttagattgtatatgtcgtggctgccaaaactcctatatggccaatggggagaagaagctggaggcatttgccgtgccagaaaaggccttggagcagaccaggctcactttgggcattaacgtgactagcattgctgtgcgtaacgctagtaccagcaccagtgtaataaatgtcacagggtccccagtaacgacgtttttagctgccagtacacatgatgataaaagtttggatgaagctatagacatgagattcgactgttaaatcagtgggtcttttaaacctactcctggtagggaaatagctacagttttacggcagctatggttctgttggtttaacttgccggagctcctgcatatagatcacttgtatcaagtgttttcattgctaagttatatgtgttagtgtcggggaaatagtttgcagataatggaggagtaaccctacaactatatgtccttagttcttacagaacctcatagtttgagaacaaagctgatgcaactgatttatacaaaatgaactttggcaagaaaaataacattaacctcattgtttatggccatgctttgtgcataatcaaagtttatgattaaatgtaaggaagtggtatctagtcagtccataaagattgtgctaatttttttgtggaaaagtagccattagttcaggaaactcagtgctgccttcagatgtcattgatgtttctcctgttggaaagctgatgtgtccagctcaacctttgtgctgacatcataccatttctgatcatgaaatattggctactggtgtatgtagcagttcttaaatcagcagtattatgaaaaaaaattccccctcattagaatgtttaagaaatctttttaaaaagtaaaattctgtcagactacaaatgtttagctgttactcatttctagggaagaaattctaaatccctccttcactttgagcagtgttctaattggataaatgaaggagagtagttttattctgaaggtaattaaatttagactatgtagtatgtgacagaatttttttaaaattataaaaagattttatttagtaattgggatttacttaaaataattttggaataatgctcccagacttgcccagatttgtgtattgtacttattgccactggccgccactttgacttattttctctaatagtttatttgccacagtctttattttgaatatgctcctagtttttttttagggtgctgttcattatgaaggcttctttatagaggcctaataagaatgcctttttataaagcctgtgcatttaggtaggttgaagctaggaggattttctttagaatgctcttttgcatgtaaagcacaaagtatgtttcagtttaaatgcacttcttccggttaatttttatggggaagacaagtgagtcacaaacattctgttgaagggaaatctagtcagttgcttgaaagagcacagcccaaataaaacaaggactgactaggtgtaatgaaataacctgtgatttaaaagaagagctgcagctttgacagtgcttatttaaagaaaaatactgctggaaaatttccaatttctactacgttcaccatctctagtaagatctgacatatgctgaagttatgttttgatttggcacacagcatgttcaatgatggttactcgcctagtacaagacatggagaagaaacctttggacacagagcagatgacacctccttctgttttgtagtgtatcctggtgtcattttctgtgaatgtggtcaggtagagttgtttttgttgttgttgttgggcttttttttcttttttttttttggtctcttttggtggggtgggggtgggctaaagccataggaagaaaaatgtgatgtgtccagtatgtactattttgtttttgttttgcaagaagagttgaactatttttgataacaagagtaaatggtggaaaatgcttcttagttgtcttgtctttatttgctttccaagatttggaattttatttaattcctttaagtgttagcagtgtcttatgaaacatgtatttacctaacgtttgtaacagttttgtgttgaacccagatgccctgctatataaagttgtaaatctgttctttattcactaatgatcactgcaaaaatgattagaaatgagattgtacacatggatgaggatatattttgcaaatcgaccaaactttcctaatattatgatcttaaaattcatagagtactttattgcttcccaagtttgataatcttgtgggttttttttttttttttgatgcatgggaggttggcaatatagacaaagtggaaatcattagtatgtgagggccttgattgttatgtaatattgccaatgatgaattcaggttgtttttagcacaagtttctcttttttatgctggtattctcactgccacatttttggaaacctgtattacaccttaaatctatcaataaatgatagttttctaattctatgttgtagaatactgaagagtttgggataatgtgatagccgggaactctagagn

SEQ ID NO: 20856 - DNA, 402 bp, Homo sapiens
acgcgggatgatgtgaggtgtaaggcttatgacttcattatgagaaggatgaagacttgaataagatttggcacattttacgacaactagtctaactgcaagtgaaaaacggactgtaggtaaccaatggtgaaggacgatcatgatttgaactaaaatggtatcaacggacatagtaaggagttgagaaataaagaggaagtcgtgattgattctggatatgttttgagagtaaaacaacataatttcctgagagtttggatctagagtgcaacaaacgtagagtcaaaaacaattaactttctggtttcaactacttgttgaatggtaatgccactaaataagacaaacaactctgaaggatgaaaaatttgagagaaaaatcagtctggataatttagt

SEQ ID NO: 20857 - DNA, 684 bp, Homo sapiens
  misc_feature 670, 671, 672, 673, 674, 675, 676, 677, 678, 679, 680, 681,682, 683, 684: n = A,T,C or G
acgtttttctccacagagcaacaaagacacctatacaaagtcataggagatcaaggtcaataactaatatttaacacatattcattcacagatatgaattgagaacaaaatagcaccagaaattttcaagaagtgaagaacaaatgtagagaagcataatgataacaaatagaaaaaaaaagatgccccaaaaaacagaactcaaggaacagaaaattgtattttgagtttccttagagattccagaacattctgcagtaaataaaacaagatcaagcttatgttttaaaaaattatcagagaattagaaaatgttactggaaagaaaaccattaaaaaagtgttagaaaataaaagaaaaaaagtctcaaaagatagagcaaaaaagtcaaaaaaaatgagaaaactctgagagaaacatcaaagagaaacatcgagatagagaggctagaattccatcatgtgactaatgcgaactttggaaagatcagaaaaaatagagacatgaaactagtcaaaaaactaattgacattatttcacaacatttaacaacaaatatcaaattgggagaacctgacaagttcctagaatgatggaaaaagtcctatttctaaacacattcatgaaatttcagaacattaaagatacaaagatggtcttaaaggtgannnnnnnnnnnnnnn

SEQ ID NO: 20858 - DNA, 1240 bp, Homo sapiens
acagacaaaagtggaaaacaaaccaggaaaaaaaaattgtgaagcacagagctgcttaaaagaataaagtcacagtaaataagtcagtattttgtttagagactagaactccaactgctagccaactgcctagaatatagtaaatattttctagtttcttaaatgactagtaatattcctacattatgtgatggcatttcccaaactgtgtaattagatgttagatttgtagccaaatatgtctaggaaatgcttaaacaatataaaacagttttaatgattggctttttagaacgttatatattagtgtgctttatgcatatccaagaggtgagtgaggtatttggggtttttcagacttacttgattacagatctggagtatctcaaaacagttgttttgtggaaaacactttggcaaactctgagtcttagtcattaaaaatagtttttgggtaaacaacagtgtaatagaaatggaaattactgattcacattgagccatgaagaatttattttcagcaatttttatagaagttgctttatgacaaagaaagctttggttaactggcatttggcatttcacacccctaaattttctacatgaggatttatttctctggttctctcactttctcactcagttatactgaattcatttatgatgagcgctctcaaccattcttattcatcaaagccctgaagttggcagagccctctctggtacctgattagaagtccgtcttccgtctcatagggaagtgttagagatggataatgtttctgtgtagcagaagtagtcattatgtccccttaaattcggtcactttgactacagtagagcttcttagtgagcagtctgtgatggagtatactttcggagaagctcatggtgggggaaatctggaatttatctaaatatttcatttctttgataaattacattaaaaaattaatgagagtatctatttggtgaaatcactttcctccatgtgaccaaatgagaaatttagtgaaagatttaaaatcatttttcagactttttccacattagtcgggaagcaaaccccttttttaaggcaatgtcagttattaagctttagggaaccacatgccactttaggtaacacgtgattggagagattgaagagtgaagtccctgctttaaagtgtactcctgtggacacagtaatacatatatttaaaatggttcatgttaagagtaggtatatttctatcta

SEQ ID NO: 20859 - DNA, 2275 bp, Homo sapiens
  misc_feature 1, 2, 3, 4, 5, 6, 7, 8, 2272, 2273, 2274, 2275: n = A,T,C or G
nnnnnnnnatctatggaaaggaggttatttttacttgattgggagatttatttttttaattaaacattgctctgggtttattttccatattccatcagtgagtaaattttagtttagaattacagctttacccagggtttatgtcatcaagttcccttcaagtagattacttgcaaggaaatcttactttgatatttcctaaatattaagcaattgatataaaagtttgacttaattacttgatttatagaattacttggtctataaggttaattatttggtcatattgaataaatcagattttttatattctttggagatacgtgctacatccttttgttaaaaagtctttttagtgatactaattctgtgttcagtgtgtgaagagtaaaataccacaattttaaaagtctaattatttttaattttgtttaatgacagagatatagatcagctatcaggaagggacttctgccattcaaagaaaatgacaggaagtaacactgaggaaatagactcaagaatccgagatgcaggtaatgatagtgccagcactgctcctaggagcactgaggagtctctttctgaagatgtgttcacagaatcagaactttcccctatacgagaggagcttgtatcttcagatgaactgcgacaagataaatcttctggtgcgtcatcagaatctgtgcaaactgtcaatcaggctgaagtagaaagtctgacagtcaaatcagaatctactggtactcctggtcacttaagatctgatactgaacattctacaaatgaagttgggactttatgtcataaaactgatttaaataatcttgaaatggccattaaggaagatcagattgcagataactttcaaggaatatcaggtcctaaagaagacagcacaagtataaaaggtaattcagaccaggattcttttcttcatgagaattcgttacaccaagaagagagtcaaaaagaaaatatgccttgtggggaaacagcagaatttaaacaaaagcaaagtgttaacaaaggaaaacaaggaaaggagcaaaatcaggactcacagacagaggcagaagagctacgcaaactttggaaaacccatactatgcaacaaactaaacagcaaagggaaaatattcaacaagtgtcacaaaaagaagctaagcataaaattacatctgctgatggacacatagaaagttctgcacttttaaaagaaaagcaaaggcatcgattacataagttcttgtgtctcagagttggaaaaccaatgaggaaaacgtttgtatctcaagcaagtgctacaatgcaacagtatgcacagagagataagaaacatgaatattggtttgctgtgccacaagaaaggacagatcacttgtatgccttcttcattcagtggagtccagaaatatatgcagaagatactggcgaatataccagagaacctggatttatagtagtaaaaaagattgaggagtctgaaacaattgaggattctagtaatcaagcagcagccagagaatgggaggtagtgtcagtggctgagtatcaccgcaggatcgatgctctaaatactgaagaactgcgcacactctgcagacgcctccagattactacaagggaagacataaattcaaagcaggttgctacagtgaaagcagacctggagtctgaatcttttcgaccaaacctaagtgatcccagtgaacttttactgccagatcaaattgaaaagcttaccaagcatcttccaccaagaacaattggctatccatggactcttgtttatggtactggaaaacatggcacaagcttgaaaactctttatcgaacaatgacaggtttagacaccccagtgctgatggtgattaaagacagtgatggacaggtttggtgcgttagcatctgagccatgaaagtgagtgatggctttatggtactggagagaactttgttttacattctgtccggagttgagggcttagtggaccggcatactactgtcatccacgggaatgggatcactagctccgggggagggggaattgcgccgggtgagcggatccaccgcagaaccttctggaacgtggaatcgacattcgagaggagcacttatcagaatgaacggggttgaataaaggctgcggacaaagcaaggatgcaccggggcatcgaccggaataaggaaaacggccatagcagagggacaccgacacacgagagccacagcagaggcaaagacaggcggcaaacaggatgtgannnn

SEQ ID NO: 20860 - DNA, 655 bp, Homo sapiens
  misc_feature 1, 2, 3, 4, 5, 6, 7, 62, 655: n = A,T,C or G
nnnnnnngctctagtgacccaggacaggcaaaggcttgtatagttctgttatattccctatntgtgttagtgacattttggagatcattttaaacttattaggtggcacttaataagaggatcctgaaagagtattattataacaatttctatttgccaggaaaaaaaagatactgggacatatctgaaagcttatttttaaagtgttccagcatatgctacctcagtactattatctctctaatgaatcacatgtataacgattcaaatactgtgtttgaaatgcaaagtcattttaaccgctcaaactaggaaactggcataattatggtcacaaacttatcctacgtgcctaagcttatgaaccagcaaatgaacataccaccaaatattcgcttacctggtcaaaaactactactgcactcattagaaacttttaggatatcaaaatcataaaaccgttccaggactatagttttatttgcaaagcaaactattcaatgtgttttgaaacaagcagtcttctgacacacagaagtgttaataaaataagcattaagctaagaccagaattaacaaacctaaatcaatcaaagggaatagctgacaaacaaatgtcattatcccaaatattcaccccaaaaaatcattgaan

SEQ ID NO: 20861 - DNA, 531 bp, Homo sapiens
actgagcctgtgtgtcaggtaatgtggttaacttaacattcattacagcatgtcatcaccacaaaggcctcttgtggctggtgctattttttttccattttgccgacaaggtttagagagattgaatcacctgcttagacccacacacccagtaagtgttggaatctggattgatgctgtaatgaccattatccagatccttatcaccgtttggggaaattgtctgaaaatccctctgggttatttagagtcaagctttcatctgggtcttcagaaagttgtagtggagccatctgcaccaccacacacctgaagacatttcaggactaacctggatgaaaagggaattgacttttagctaggataggacaaaagggcataatcataaaattaattcactttccttcctttcttttgaaaatttttctaaactgtgtatcctcccagatattccctggcaaagaagaccccagtgaagccttggtttggagaaactggactgtgtggggcaagtgaaggtggtctggggat

SEQ ID NO: 20862 - DNA, 831 bp, Homo sapiens
  misc_feature 807, 824, 825, 826, 827, 828, 829, 830, 831: n = A,T,C or G
actaatgacttaggaacttccttctccatcaatctgtcttccatgttcaagttttatgaatttccattcctgtattcttgaatggaaacatttctgtcttagaaattccactcttccggtgtttacaacaccattttgaatggtgtttctccatctttttcaaatatactccagtattactgagctctatttattatacgtataggatcatgaattataaatgagtatgtgttaaatgaatgagaaggaagtggcttaatggtctataggagaaccgtaagttttcttttgaggtaaccgggtaaatcatgcagttaaatgacaatgctgtgtgaatgcactgctagctaactggccttcatcaactcatgagggtatttctcttcctggcatctcttaaaagatgtcaactagcagcagagcagaggaagaatagagtggttaagagaatggcctccggtgctagactgaatttgacttccagctctagagtttactagtgttgtcactttgggcaaattgcttgatctctccacagtcagtttcatctacaaaatgaggaagatcatagtaatcataccttctcactcgcttcataggcttgtttgaggattaagtgagctaatataaacaaaactcctacagagtagctggaatagtactatataaatgtttgcaattattattatgcagctattgcttggcttggcaatgactttgattcagagtgacaaatgaggcaagcagactgtttttgcattgattccaggacaatgatgtgggactgaaatcccgcgttaattaatnctagaagtacctccgannnnnnnn

SEQ ID NO: 20863 - DNA, 887 bp, Homo sapiens
  misc_feature 1, 2, 3, 4, 5, 886, 887: n = A,T,C or G
nnnnnatcgaatgccaatctttaacatgtcaggaagcaggaaggaaagtaccagatacttgaaggacccactgacctggaaaaaagtgggatctagtttcagcttgaaaaaatccttcttcataattacatttcccttaggcaaatctctaacatgcctaggcttttgtatatctgtttttactgcgtcacaaacctcccccaaagagaagggagacgataactggagaaaaccacaaattaatcttccaatatttttttcttccatataatcagcagtgcctcagaatcaaagcagtctctaaaaatattttgaagaaatttattttcttggatcttcaaagatccaaagttactgagatgcaaagaatcttccacagtatcatccaaggatactgaagggctccttcaaacctcgcccttgtatatttcttcttccagttgtgatactgcagttacatttgcaaaccaaatgatccctttgggtggtttttccaaaacaaatcgtctttcccaaaggcctacctaagtcttcattttccacaaagtagaaaactgcccacagctttgaaatggcagcataatttgtatttctaccaccttgtccaggtttcagggatctctggtccagtttcagtcaataatgctaactatcactgcagctcactgacttctttcctgtacatagcagtttttcgcaggaagaaaacaaatctaacgaataggaataacttcaggtgatgctgttttcttcccgcttcctgggatcactgtctttcctctgaaatggttttaatcagaaccaatctgttatactcaggagcctcagcgcacaccgccagagcgcccagcccgcgcacgtgcttccggcgccgcaatgagtacann

SEQ ID NO: 20864 - DNA, 484 bp, Homo sapiens
cgtacactctgtgtagaagaaagagaaatatttactggtagaaatgtttactggtagaaatgttttcttgcttatcagactgatgtttacgaaattttcttcagctctcaggcagttggcactgtttacattacactgactacccagatctgcaaagcagctgaaacaaatgtagtttattagctgggcaggaaaccatctgaacaatacagaagttcacttactgaaaaaaagagtagctattagcaactggactctgagccacaaaacccaaggtttcactagaatgtgagctatcgccttttcttttggctgctgtcagcacacagtatgtaaaatagagaaaacagggaactttctaaaagaaaactaattttaattctaaaaagatatgagtatggcttagcaactaaatctgttagatggggttgacttcatcattactccttgtttttgggacaactcatccacgacttggaaacgt

SEQ ID NO: 20865 - DNA, 854 bp, Homo sapiens
  misc_feature 852, 853, 854: n = A,T,C or G
actgaagacaaacgttgtaatcaatttatggtcttaggctatttgcacgactgaaatctgaaaacttcatgaaatcagggatcattacaaatatcccaatgccttgtgccagccacagaaactcagtaacagactatttgacagaatggtgtcaatttaatcatgacattgcaatggactataggaagagtcaataaaacactgatagtggagcaaaaatctggcgtgacacctgacattgaaaaagtcggatggaatacaaccacatccatttgttctatgttgtctatagcggctttcacacagaaactgcacagttgagtcattgtgacaaagactgtatatcccacaaagcttaaaatatttacaatttggccttttagagaaaaagttttatgacccttgcaatattaacacagaaatctcagagatgctgtcttcttcctaaactttaatatttaattctgattgtggatgagattagattctccaactttccatgtttaagactcattcaaaaaattcataaatctcaaaatattagaaatgcaggatattgcctgatgacttgtcaattacatgataaattatcttaactatagaattaatatgctggattaagaaatgacccttgtttatgcctaagcttctagggcaagaaaaaaatgatcagaaggaggaaggtagttcccctccacctcaagagaaaccctattgtcatctacatgtctctggaaaacattttttgaacaaatatgccaactaaccaaaagatgaacataagaaaagacccaggagaggaaagacactattgaaatgctaggggaatagcactggcaacagtaatatgannn

SEQ ID NO: 20866 - DNA, 565 bp, Homo sapiens
acgcctcacccaactcaactcttcacatagctcaagtcttggcataaatgatatttctcaagagatacattttctgaccactttatccttgtctttccttcataattaatccataacattatgcttgttagcttccttcatggtatatatcatagattgtcatcatatattaatatgtttgtctatagactgtctctcatattatattctaccaatatgagtgcagcatccatataccatagacctagcatggtcttagataactaagatcaaataaatacaaaagttcaagggcaaataataacgataataattaggattctcaaaagcataaaggtatgtttttaaaactctcaggtattaataaaaatcaatacccaaaattctatgtatccgtagaaatttggtttacctttctgcagcccgaataacattattatatccttacaaaaatttaaaagtcttttggacacgtgagagtgggtcaaaatattacattgacattttgttattgttgctgttgagacagggcccggctctgtcatccagactggagtgtaggtgt

SEQ ID NO: 20867 - DNA, 452 bp, Homo sapiens
  misc_feature 1, 198, 306, 323: n = A,T,C or G
nacgactgtgtttgcagaacgcagtgggctgatgatggcatgcatgatgtcgtgattctgtatgttcaggcgcaggggctcctgcatggccatgtttgttaatactgtagcagcgttggcaatggctccatctcgtttactagacaggaggtttattaatggatcaataccatcagcttcagcagcagcgcttgtatntgttaatcattataaatatgcttggccaaaatgcatgattcctttgtcacttggtggttttccctcgagaatgttcactttttaaaacatcctcttagaggtaatatntgagtcttatttatatntccggtgctgagaagatcaatgtattttaattgactcgaatcaactcaaggtgagtgagcagaaattcgtttgcattagcagggttgcaagtggttaggtttgccagggctagagctgctgcttcccgt

SEQ ID NO: 20868 - DNA, 857 bp, Homo sapiens
  misc_feature 1, 2: n = A,T,C or G
nngcatgaagctctaaggcatcacactttgtctcagctacgtcagctccaagatatgcaagatgtggggaaggtggatgctgcctgggagccatccaagaaacacgttaataatgggactctggtacccagggggcagagaagaagagtgcagcatctattgcctgtttcttggcagccaatggtgctgacctgagcattcgaaataagaagggtcaatcgccacttgatctctgtcctgatccgaatctctgcaaagcactggcaaagtgtcataaggaaaaagtcagtggtcaagtgggttctcggagtccttctatgattagtaatgattctgaaaccttagaagagtgtatggtgtgctcagatatgaagagagatactctttttggtccatgtggacatattgctacctgttctttatgttctccacgtgtcaagaaatgcctcatctgtaaagaacaggttcaatccaggacaaagattgaagaatgtgtggtatgctctgacaagaaagcagctgttctttttcaaccctgtggccacatgtgtgcttgtgagaactgtgctaacctgatgaaaaagtgtgtgcagtgtcgagcagtagttgaacgaagagtgcctttcattatgtgctgtggagggaaaagttcagaagatgccactgatgatatctcaagtgggaatattccagtattacaaaaggacaaggataataccaatgtcaatgcagatgtgcaaaagttgcagcaacagttacaagacattaaagagcagacaatgtgccctgtgtgtctagatcgtctgaagaatatgattttcctttgtggtcacggaacctgtcaactctgtggagac

SEQ ID NO: 20869 - DNA, 527 bp, Homo sapiens
  misc_feature 526, 527: n = A,T,C or G
actcagtttattgaattgatgaattgatttttttttagtaatcacataaatttctgtaagatttgttatacattgtttactgtcacagaatcatgttttatatcttcaagctcaaagcaagctttcaaacttgaatttagttcttgcataaatatggatgattgtttctccattgctgaagcagtgtattatttccataatgatctgtaaagtaggtgggtttcatgacctaagtgttattgttgatctttatatatacaaggaaaacgcagagtcatcgttcatttgtagctgcatttatctctggttttcaagcatttctataaaataacaattaagcttagtgtgatggttaatactgagtgtcaacttgattggatggaaggaagcaaaatattaatcctgagtgtgtctgtgagggtgttgccaaaggagataaacatttgagtcagtgtgctgggaaaggcagacccacccttaatctgggtgggcaccatctaatcagctgccattgcagctaggatann

SEQ ID NO: 20870 - DNA, 814 bp, Homo sapiens
  misc_feature 809, 810, 811, 812, 813, 814: n = A,T,C or G
acaaacgagttgtatttaaagagtgctttttgaattctagggctctctgtaagttacttcatcaggatcctgtttctttgatcaagtcagcatgggtgcctaccaaatcatttctactttgctgtgtagcttttaaatctattttctgggtcactgggcttactcatggaatttcttttccttagtttgtttctctactatagtcagagtaaaatgagatgaatggatctgtatttaaagtgtggcattttcccagaactgccatggcctttacattcattctcaagaagatcaagatgagcagaaatgatcttcacagaaccaacatttactccaaaggcatcaaaactctatgtcctgaaatgcatttgagtcacttaccagcccagtgggatctctgtgcaacaatttgaatttatatcagtttacaaattcactgaaaagaattgtgtcttttttggttagttcattcctgaagtctccaggctctactgaataacccagttggtttatatataccatcaaacttgcctaaaccctagtcactgcacctggttatctggcctattaaatgcacagtcagtaattcagtttaattcagttgaattcagtcattaaaaactcatacttgacatgtttctttgtcaagggcaaaaagaagtcaagtaatcagtgaaggaggagagaatttccagtgattttctgttacattcagtcctttcccatacaattagtagaagtcacctggctccttttaacattttggattattttcatacccctgtcttgctaaagagagtactttagcnnnnnn

SEQ ID NO: 20871 - DNA, 625 bp, Homo sapiens
  misc_feature 1, 622, 623, 624, 625: n = A,T,C or G
ncgagctcgggaccccgctcttgctcccatcagactcttcccgtcctcagggctgtcctcaaatgggacttgggccttaagtgaatcaaactgtgtatctcccatatgtcatttttttttttttagcagaaaataaagtaccttaatttatccacccacagaaagtttttcagatggggtgggaaggaatggagagagaatgtgtctatgagcttccagcgctcatctctgcggctcagaagccatcaatagctcgaacagaaaacgtcctcacatctgtcacacaaacacaccccatggaaccaaaaataaaccccacactgatgaaagccagcatgtcgaaagataattttagatctatttgaagactgcagagactgtctcgctgaaattttaaaaccacaccaccagaatacccaaccccttatgattatgctcagccctgatgaggaggcaaaaacacttcattccattttataaacctcccaggcacctcagctctgtctctagaatggggagagagcattcctgagttaccacgtgactccgaaggtcaaccgagtcacatctgaaccaacaccactgtccaatattcactaatggagttcacatatttttagcnnnn

SEQ ID NO: 20872 - DNA, 479 bp, Homo sapiens
  misc_feature 1, 2, 478, 479: n = A,T,C or G
nnagtggttgctatctgtcgattgagtgatctgatagaatttataatgactagaacacagattcaggttgtatgtgtgctgcattggaactgaaagttttcacataggaaatgcttaaattcaatccctaaaataaatgaacaatgagaagaacacgttgaaaatctactgagtgtgtattgatcatctgtagttgttcaaacgctctctgaagcttatgctcttgttcatgtgccatttttgagttgtgcctacatgatgctggcaacagataagacatgtagttttaataaatcactaacctttatattctgcttatttttaaattataaattccatctgtgtaaatagtttctctcttcttgcactttactaaaagcagttaaaagaaaccattctgaggctgggattacaggcgtgagccactacacccggcctcatctgctctttaggatatggcagcagatcatctatatann

SEQ ID NO: 20873 - DNA, 801 bp, Homo sapiens
tataggggtcgacccacgcgtccgcgccctttttatttctaagcttgcagatatttctagaattccacttactgttacatctaaatgtatgctgatttttcgttaaataataagcaggtctgtaaacattttcttttctaacctctttccatatttatatgagtatagaaaaactgtggttatgaatattttttactttttgataacttttaaaaactatcagatatgtgataatcagatagatttcaagtttacttacggtgtaaattaggaaaatttttataaagattctatccagtattgatcaaaagtataaattgtgtgtctttttaagcagcagtttggcaatgacaatcaaattgatactatgtaaaagttttgaaatgttatagctggctactggggtttttatctattccagttctcgaaaatttaccaaatataggttggctgtaaaatcataactatctgaggtatctgtcaataaatcaaagattgcaatgatgatagcttctttaacatgaatgtaattctaacagtaaaaaatttctatatggaatatgttttgtagtcctaaattgatattttatatcatttttcagtgaacaagtagttgtttacaggtgtctgtgcatatgtctcaagtttttctaactaaaatattaatagttaagtctaaaaatatgaattatacgtggggcttgtcattctgacatttaatacttcagcgtggtgataatggtgatataatatactgtttgaaattgtaacacatgagttaaaatcaaaagattgataagt

SEQ ID NO: 20874 - DNA, 1141 bp, Homo sapiens
  misc_feature 1, 2, 3, 4, 5, 1132, 1133, 1134, 1135, 1136, 1137, 1138,1139, 1140, 1141: n = A,T,C or G
nnnnngtcaggacggatccaacaagccttgtgcatgagttccacatggcacagcgtgcacagtaaacactcaatgttaatttttcaacgttccagtggagcttgctaaggaactctgttgggcacaggtgcccagaagattcatggagcagccagtcctggggaatgtgagtgggtagcgagctgcctgctgctggggcaggtgatgtgtcaaagcagcaactgctaggggtttgccttcctcccctcatgtgcattctggcaggcaaagggggtttcttcctttcctccttgtcctcctggtgtatagtggggtctgggggatctggagaccacccttttggttcccaggcagccacggtatgacagtgggccataccatgcagtttaaaatgtatcttggagtgaaatttggtggtttccttattcttttttctctcttcactgtccttccaaactcacttttctgggtgtcccgaccgcatttggtgaatcatccttactccctttaagttctcgcttgggatttcaccaggtgggctagatggtgccatttcacttccactgtttgatgcggctggtaatgttgactcacctgttacgtgttatttcactggtttctgtgattttaccatctttctcatcagtgacctgggctttgatgaaattagctttcattaagtcctatttttttttaaatttgcatccttacctctttctttctctgtgaatgccatcatgtgtgtggtcttatgtacccttcatccatctgaagtcctggctgaatgattgtttctattagcagaaagaaaacaggtccatcctaatgtatctgggaagagataaaccctctcgtatgtggtgggattcctgacggggacattttgcagcagaattcttcatcatgtccagattgggctgggggagggttcatgaaccttagtccttgtacatctaacatggcttggtgtgggcgggaggggggacggaaatgacggcatcttacaaccctggttattaacggaacaagacaggtttgaaaccaggtgttatgtggcaccaagggcgtctaaaaaaaaggggccaaaatggcggtttttctctcttttcggtgtttctacttccactatacnnnnnnnnnn

SEQ ID NO: 20875 - DNA, 657 bp, Homo sapiens
acatcaattcttatggcacaataaaataaatccataatagctgtgggattcagaaacaaagttatttacagaaatgtttttgatataaaaaataaacagctaatatgatgagtttctacatcagtaaaaataatttcatttgaaattgattacagtctgagcacatactactatgtaagagactccactgggggccctgagagatagaaagatggcttaaatacaatgttgacacctttagttattgataatttactataacatggcagtgtgcctagtagctggaacaatgtggcaaaaactaataaatctgctgcgtgagatccttagcaattactgttccatctgcctagaactatgcagccatataaaagtgtatcccaacatctttttagttgctcccttttagaattcctgtcttaactgaaatgtcccctcctcaataaaattttctctaatatttgatctatgttaaccctctctctcagttttcttcactgcaaacaacatttattattaattataaaggtctagcatttacttactgttattgtctgtctctcctacaagaatttaagctctataaaatcagggaattttcctgcccatcacctctgtattcccagtgccaagaaggattcctggaacacaataggt

SEQ ID NO: 20876 - DNA, 441 bp, Homo sapiens
  misc_feature 1, 2, 3, 423, 424, 425, 426, 427, 428, 429, 430, 431, 432,433, 434, 435, 436, 437, 438, 439, 440, 441: n = A,T,C or G
nnncggggttctcaaacacaaactaaatgaaaatgtgagagctctgctcacatctgacaggtctattggttgaagtttcaagtggcaactggtttgttagaaccagtctcttccagtgaagaaagttgttcactatttagcaaacgctaaggaggaagttcatgtaattcagataattcctatggtgtctccacagatactacgtggaaaagatggggagtagtgagagaaaacacaagaatatgtgaacccttcaggtctgtgagggatggaaggattgggattattggagaaaaataaggatagcattccagctgggcagatctaattcgagaataaacaggatgtgcctgtagatcaatgaaaagaaaggccaactggagtaggggtggcctgttggaatggtcagtttaaagcagttannnnnnnnnnnnnnnnnnn

SEQ ID NO: 20877 - DNA, 1445 bp, Homo sapiens
  misc_feature 1445: n = A,T,C or G
acgcggggacttccggcggcggaggattgggagggactgaaggccgtttccggctctggtagtgtagggacttcggcacgtgtgtcattccccgggatttctgtagtaaccctgcttctggtgaacttgtctggccggcattcatttaaggcctaaggatgaaggcgagaagaaataaaaaacagatcccaagctttcgcaagttaataaaaactagtaaagtcaaacttgaaaacaagctaaaaaataagcagtttaaacaacaaagcactctcaagaagtaccgaaaagaacagaggaaactaaggcaagctgtgaaagatgctgtgtctaagaaacccattccattggagaacccaaaggaaaagcgaccaggtaaaaggattgagagggaagaagaggaagaagaagaagcccttcctttagatatgatggatgaagatgacttacagttaatgaaggatttaggacaaagagtatcttttctaacaagagatctttcttctagtgagcctgttcatgcgaagaaacggaagcatgaacgcattatagataaatatgaaaaaataccaagaactctgcaaactgcaccagagaaggaactgattcatttacttcctatcaaagataaaagtggtataatcccacagactagggagaagccagttactgatagtaacaaagatgaagaggatcaagaagaagagagggaacttgaggaagagatcattgaagatcctattcaagagctgaccatagaagaacattcgacttgagagaaagaagaaattacaggagaagaacgatgcatatgccagccttggcatctgccatattatcagatccagaaaataatattcaaacaacattgacaaagaatgacgtcctatgtgatggaacaagatcctgatgtggctgttactgttacgaacacgctggtaattgtctctctgatggagttattccacacagatattactccttcatatacaaatccggccctcacagaaacgcagattacatctactaagacccgaacaagaaacccagaaagttaagagaatttgacagaaggcctggttagacactacaagcaccatttggaacacaatctggaaacaaactggtctaacagatcaggcagcagaggaaagcctgaaggagacgtaacgctggcactcccgtcgacaggcatccaaaggacttggcagaaagtcgcaggaaagaactagagctagccagctaggacggccacgacctcaacacaacttgtagacaccacaccatgtatgatgccccccatggaagatggcacacggatatgaagccaacgcaacgttgaagagacccaaacttggaccgcctacggcaagaaaacaaggagggcaaaacaagggcacaagcaaaataagaaccgacaacacacaagacaaaacagaccgacn

SEQ ID NO: 20878 - DNA, 446 bp, Homo sapiens
  misc_feature 443, 444, 445, 446: n = A,T,C or G
acttacattgagtaaagttataccccactttcttggttgatactgtcatttgataaaattcatcagtggataaattgctatgtatgtgtgtgataaagatacttgccttaaaatagaacacttctgtcttgcaaacagtttatggtcaaattgccttttcagttactgttctttccatgcacctagtgaatttaagtctgataaagtccctggatgtaagaaagaagatgaaatgtcttttcattgttaattatctgcacctggattaaaaagtattttcaacatgtgaagactttatggaaaaaaataatatgtgtgtgttgtttgacttttactgctaaagacagcaagtgattgaacagataaaattatgtattggttttaaccattatttttattgaccctatcctcaatgagagtattcaattgtgtgtgtggtcagnnnn

SEQ ID NO: 20879 - DNA, 1557 bp, Homo sapiens
  misc_feature 1, 1556, 1557: n = A,T,C or G
ncattgtgaactagacagaagctagaagaaacatacaattctaattttaaaaggaaattgtactaaccagagatattctatcccaagtgaaattcaagtaaataaacgaaactactactactgagcacctattaaaggtcagaaattgtactggcactttcatacttaccattgtatttaatttagatcacagctcattaataaaggtattactgcccacaatatacacatagtagtacagaggaacaaaaaagtaacttgtcccactaattagctcaagagctgagactttaacttaggactcccgttatagctttaccactcatctcattgaaaaaataaaaaattaagagaattgtcaagagttagacatattagctagcctgattttcttttgtaataagattagtatacaagtagatattggaagtatggggaacatagcacattacgatttcagcaaagcatctgtcagaagtaatatagtattacaaactaacaattagggctcctaacacagataaaactcttaaatgctgcttctatcacttactctttatgtcactctgtccaagcatttaaactctctaagatatagcttcccccttatctctttaaaggggaaccatgatgataactatctcaccaggttttagtaaagaccgaatggtaaaaatctacagaatgcatttagcatagtacctgtcacatagtaaatggtaaattagtgttaactattattattaaggcatgatatctctttggacaaaaaataatttgaaataattacataataatgaaatatcatgaagtattgtaaacaacagttattaaccccatcctattcaacttctgtcaatgtctgctttgttttataattcaccaagtatcttccagaaaagaaagattgtaatggggtcactacagaattatacagaactgctggctcaaaaagaaatatgattatttataataggaaatcaccagcaatgacaagaatgcattcacagaagattgcttaaatagattatgatagactaatcttgcacatgtagtgtaggaggaaataaaagactagaaggagatacaccagaagattaacatgattcatatctcttcaactaattaacaaacatattaaataccatttgggaaaagattacatttttttcatcagtatttggattcagatttccattttggaatggggtgggtttataaggagccattctgggagacagaactatctccaaggtgactggaaggggatgcctcaagttataagagctcaacagcaccaagcacagtggctcacacctatagtcccagaactttgggaggccaggaattcaaaaccagccttgggcaaaaaagtgagaccttgtctctacaaaagctacgaaaagttagccaagcatggtggcacgcgcctgtagtcccagctactcaagaggctgaggtgggaggactgcttgagcccaggagttcgaggctgcagtgagccgagattgcaccactacactccagcctggatgacagagcaagatcccatctcnn

SEQ ID NO: 20880 - DNA, 2648 bp, Homo sapiens
  misc_feature 1, 2633, 2634, 2635, 2636, 2637, 2638, 2639, 2640, 2641,2642, 2643, 2644, 2645, 2646, 2647, 2648: n = A,T,C or G
nctgaagctccaccgcggtggcggccgctctagaactagtggatcccccgggctgcaggaattcggcacgagaaaatcccacagtggaaactcttaagcctctgcgaagtaaatcattcttgtgaatgtgacacacgatctctccagtttccatatgttgagattctacttattcatcagtttgttgtgcttgtcaagatcagacgcagaagaaacatgtccttcattcaccaggctgagctttcacagtgcagtggttggtacgggactaaatgtgaggctgatgctctacacaaggaaaaacctgacctgcgcacaaaccatcaactcctcagcttttgggaacttgaatgtgaccaagaaaaccaccttcattgtccatggattcaggccaacaggctcccctcctgtttggatggatgacttagtaaagggtttgctctctgttgaagacatgaacgtagttgttgttgattggaatcgaggagctacaactttaatatatacccatgcctctagtaagaccagaaaagtagccatggtcttgaaggaatttattgaccagatgttggcagaaggagcttctcttgatgacatttacatgatcggagtaagtctaggagcccacatatctgggtttgttggagagatgtacgatggatggctggggagaattacaggcctcgaccctgcaggccctttattcaacgggaaacctcaccaagacagattagatcccagtgatgcgcagtttgttgatgtcatccattccgacactgatgcactgggctacaaggagccattaggaaacatagacttctacccaaatggaggattggatcaacctggctgccccaaaacaatattgggaggatttcagtattttaaatgtgaccaccagaggtctgtatacctgtacctgtcttccctgagagagagctgcaccatcactgcgtatccctgtgactcctaccaggattataggaatggcaagtgtgtcagctgcggcacgtcacaaaaagagtcctgtccccttctgggctattatgctgataattggaaagaccatctaagggggaaagatcctccaatgacgaaggcattctttgacacagctgaggagagcccattctgcatgtatcattactttgtggatattataacatggaacaagaatgtaagaagaggggacattaccatcaaattgagagacaaagctggaaacaccacagaatccaaaatcaatcatgaacccaccacatttcagaaatatcaccaagtgagtctacttgcaagatttaatcaagatctggataaagtggctgcaatttccttgatgttctctacaggatctctaataggcccaaggtacaagctcaggattctccgaatgaagttaaggtcccttgcccatccggagaggcctcagctgtgtcggtatgatcttgtcctgatggaaaacgttgaaacagtcttccaacctattctttgcccagagttgcagttgtaactgttgccaggacacatggccataaataatagaaagaaagctacaaccacaggctgtttgaaagcttcacctcacctttctgcaaagcagaaaaagtatgaaaaaaccaaggcttttttcagtagcgtcctatggatgtcacattgtacatcaaacaaccttgtgattataaaacgatcctgggaaggagcccctaactagggcaagtcagaaatagccaggctcgcagcagcgcagcgctgtgtctgctgtgtcctggggcctcccttgttccgacctgtcaattctgctgcctgtcacgcgggtggttctgcccatcgcggctgcgggtcaagcatcttcaagggaaggacggactggaggcctcaccgtggactcaactctgcattctccgtgccacattcctccagttcccacacgtagaagggaacgaaactgacgtctacctcatggggctgctgtgtgggtttgggaggcaaaaatctatgaagggttttttgaaatcccataggtgccacatctatgagatgtttgataaatgtgaatatgcttttacatttgggcttatctaatttgcaataagagagcctctctctatcaacaccagcttctctctcgggctgtttgctcagggaaggcaagaaagccacgtgctggccctctgccttctctaaagtgctgttggagcatggaggagctggaggagatggggatggactgacagctaagagggcggctgctgggactagatagtggatgaagaaagaaggacgaggaagccgtggggcagcctcttcacatggggacaggggatggagcatgaggcaagggaaggaaaagcagagcttatttttcacctaaggtggagaaggatcactttacaggcaacgctcattttaagcaacccttaagaaatgtttatgtttctttattaccaatgtaatctatgattattgaaggaaatttagaaaatgcgtagatacaaaaaaaaaaaaaaaaacctcgagggggggcccggtacccaattcgccctataccggtggggggagcgggggcccgggggaaggggcctcggggcccgcggcacttttccccccgggggggccggatcgggacggccccnnnnnnnnnnnnnnnn

SEQ ID NO: 20881 - DNA, 480 bp, Homo sapiens
  misc_feature 474, 475, 476, 477, 478, 479, 480: n = A,T,C or G
acttttagtagagacagggtttcaccgtgttagccaggatggtctcgatctcctggtctcgtgatccacctgcctcagcctcccaagtagttgggattacaggtgcccaccaccactcccagctaatttttgtatttttagtagagatggggtttcaccatgttggccaggttggtcttgaactcctgacctcgagatccacctgcctcggcctcccaaagtgctgggattacaagtgtgagccaccacgcccagcctctttactttcttaattgcctcttcataatgtatttaataaactatggcaatcccagaatgacagattgttaccactgccattggatttctaatttcaatttggaatttaaaaaccaaatacctgaattgttgtcctaattctgacattgcctatttatagccttggttaggtaattgagctttctgagtctgtaatttcttaacttattaaatgannnnnnn

SEQ ID NO: 20882 - DNA, 886 bp, Homo sapiens
  misc_feature 1, 2, 3, 4: n = A,T,C or G
nnnncgccgacccacgcgtccgcgggaactgcccttgctacttgtgacctgccctttactcagcagtttttgttctgggaagccctgggattgtgctaatacctatcactgtaggtgctgaagggaaacagatgaagaacatgacctcaaggagcttcctgtcaatgagaagaccaagctgacgcctggcaaagatattaaagaggagcctgaaactgttccttggacatcttatgaatgtcagaaaataccttttggagggttagaagatcaggggacatggttgttcacatttgctgccacggaacaccgccagtcttcacttggaaacagaatcacgccttgtgaagagatcatccctaagcaggagagaagctactaaagatataaagtaaatggaatacaatttaagctttccttgagtcaacaatcttctcactaaagatcaattactacaccgtgctgaagtgtgagactacaccgtgctgaagtgtgagggaaaatcctcaaaaactactgcaataaacaaggccaatctgctacttctcatccactgaagtttggaaaacaatcttgtatagtaaagagcaacacactctaaggactaccagacaggagctcctatcagtaaaatacgtatctttacatggattctttgatattatacaccagtatttattctgttcagaggctttatttactgattttctggttctcagctatggttcaaatgtatggttcaaatgactgaaactgacactctactagtctacatctgttctgtccaatatggtaaccactggctagccatatgtggctaaattcaaattaataaaattaaaacattgagttaagttcctcagctgcccatacccacatttcaagt

SEQ ID NO: 20883 - DNA, 626 bp, Homo sapiens
  misc_feature 1, 626: n = A,T,C or G
nctcgtctcgttagggacacacgcagtccacacagtgccgcgccacgtggctctgcagtgttggtgaacaggagttgcagggaactgaaagcccgggatcccagctggtaaagggagcctcagctaccgaccgagctgctgctctcatcttgagaacttctgattcccagccctgcggggaagacgtactggtatctgattgttcttacagaaactcaggatggagcagcagaaacttgaggagaggctggagttctggatggagaaatacgataaggacacagaaatgaaacagaatgaactaaatgctctcaaagccacaaaggccagtgacttagcacaccttcaagacctggcaaagatgataagagagtatgaacaggtcatcattgaagatcgtattgaaaaggagaggagccagaagaagctccaggcctggtggcgaggcactatgattcggagagaaattggggggttcaagatgcctaaagacaaagttgatagcaaggattcaaaaggcaaaggtaaaggcaaggattagaggagaggccagaagaagtgaccaaggtctcttttgtgttttctgctgggattctggaggtgggaaagacttggagagagttaan

SEQ ID NO: 20884 - DNA, 1078 bp, Homo sapiens
  misc_feature 1078: n = A,T,C or G
acgcgggggtgtctcgatggagtagactctcagaacagtgcagtttgccctccgctcacgcagagcctctccgtggcttccgcaccttgagcattaggccagttctcctcttctctctaatccatccgtcacctctcctgtcatccgtgtccatgccgtgaggtccattcacagaacacatccatggctctcatgctcagtttggttctgagtctcctcaagctgggatcagggcagtggcaggtgtttgggccagacaagcctgtccaggccttggtgggggaggacgcagcattctcctgtttcctgtctcttaaggccaatgcagaggccatggaagtgcggttcttcaggggccagttctctagcgtggtccacctctacagggacgggaaggaccagccatttatgcagatgccacagtatcaaggcaggacaaaactggtgaaggattttattgcggaggggcgcatctctctgaggctgaaaaacattactgtgttggatgctggcctctatgggtgcaggattagttcccagtcttactaccagaaggccatctgggagctacaggtgtcagcactgggctcagttcctctcatttccatcgcgggatatgttgatagagacatccagctactctgtcagtcctcgggctggttcccccggcccacagcgaagtggaaaggtccacaaggacaggatttgtccacagactccaggacaaacagagacatgcatggcctgtttgatgtggagatctctctgaccgtccaagagaacgccgggagcatatcctgttccatgcggcatgctcatctgagccgagaggtggaatccagggtacagataggagatacctttttctgagcctatatcgtggcacctggctaccaaagtactggtgaatactctgctgtggcctattttttggcattgttggactgaagattttcttctccaaattccagtgttagcgagagagagaagcatgggccggtgccttatcatggattcagcagggacaggatcagagatgctccacattcagctgcttctcttcttctagttctagccn

SEQ ID NO: 20885 - DNA, 787 bp, Homo sapiens
  misc_feature 1, 787: n = A,T,C or G
natgagattacaggcatgagccaccatgcctggtcctaacatcattttgggatactgcactgtacttcctaagatcaagaacaagaaaggagatgtgtgtatgagttctgcagaagtccaccaaatgtgggccagggttatttccctggtgatgctctgaagctttgccaaaggacaaagtggaaacaggaagtacaatcatgcactggggtaaagaagattcatctgctcttagctacctaccatgccaacactcctgagaaagctcacagaggcccatgatgcccacctggatctgaggacctagaaagccacaacaggcaaccataatctgggtcttccctcagccaactcccctgcataaagtgaatgaatgaaaaacccatcttatattaatcagagttctctagagaaaaagaaccaatcagatgtgtatatatagaaagagagaattattttagggaattagctcacatcattatgcaggctggtcaatcaaaaatctgtggagtgggctagcaggctggagacccagggaaaggctaaattgcagtttagatcagaaggtcatctactggcagaattccctcatcttccaggaaggtggatctttttctaccaaggccttcagtttattagattaggcccatgaacatgctggagggtaatctgctttactcaatacatactgatttgaatgttagtatcatcaaaaagaccttcacagaaacatctaaaataatgtttgaccaaatgtctgcataccatggccaagccaagtttacan

SEQ ID NO: 20886 - DNA, 331 bp, Homo sapiens
  misc_feature 327, 328, 329, 330, 331: n = A,T,C or G
acctgtgtggccattacaatgccttacatgtaataagtccttgttaaacattagttgcagtgggttaatttgcgaaatgattttgcaatgtaaaagtcatcgcagtattatattaagtatgttctattccacccgacttaaaacatgattcagttcatgaattgttaatgtcaatgaattttcaaaaataaatgtctagggcaaaatcagacctgtctacttgttgcatcttgactaaaaattggtcaaggtatctgtaaataagttgctttatacagttgctgttcaacattatggatatacacagatgatcacgcaagttctgcnnnnn

SEQ ID NO: 20887 - DNA, 408 bp, Homo sapiens
  misc_feature 408: n = A,T,C or G
acacatatgcgaatttaacctcagcttaaaatggtaattcctcaccagggtttgaagtgcctgccaccttcataatgcatcttaaaggtcagctggcaatcagtgacaaattctacattcctgaatagttacttgtgaattcaggatttcatttagcttaatttgtgtgtttttttcctcctaagtgctcaggtctgaaatagtcaaattttaaccatctaattggaatgaaaagaaagccatggttcccggcgtgtccctaggaggtgaggatagaagagtgctgggaagaggaggcacagactcttttcatgaaggaatgcatctcacactaggagcagagacctgatcggagacggtcggtggcttgaacgctgagtgctaaaagaaactggctgcaggcacacn

SEQ ID NO: 20888 - DNA, 2728 bp, Homo sapiens
aaaaggcagattccctatttaaccatcctttagttccgtgatatggtttggatgtgtgtcccctccaaatctcatgttgaaatgtgatctccaatgttggaggtggggcctggtgagaggtgtttgagtcaggggggccaatccctcatgaatggcttggtacgcggggacagaaggaggaaggacagcagggccaacagtcacagcagccctgaccagagcattcctggagctcaagctcctctacaaagaggtggacagagaagacagcagagaccatgggacccccctcagcccctccctgcagattgcatgtcccctggaaggaggtcctgctcacagcctcacttctaaccttctggaacccacccaccactgccaagctcactattgaatccacgccgttcaatgtcgcagaggggaaggaggttcttctactcgcccacaacctgccccagaatcgtattggttacagctggtacaaaggtgaaagagtggatggcaaccgtcaaattataggatatgtaataggaactcaacaagctaccccagggcccgcatacagtggtcgagagataatataccccaatgcatccctgctgatccagaacatcatccagaatgacacaggattctacaccctacacgtcataaagtcagatcttgtgaatgaagaagcaactggccagttccgggtatacccggagctgcccaagccctccatctccagcaacaactccaaacccgtggaggacaaggatgctgtggccttcacctgtgaacctgagactcaggacgcaacctacctgtggtgggtaaacaatcagagcctcccggtcagtcccaggctgcagctgtccaatggcaacaggaccctcactctattcaatgtcacaagaaatgacacagcaagctacaaatgtgaaacccagaacccagtgagtgccaggcgcagtgattcagtcatcctgaatgtcctctatggcccggatgcccccaccatttcccctctaaacacatcttacagatcaggggaaaatctgaacctctcctgccacgcagcctctaacccacctgcacagtactcttggtttgtcaatgggactttccagcaatccacccaagagctctttatccccaacatcactgtgaataatagtggatcctatacgtgccaagcccataactcagacactggcctcaataggaccacagtcacgacgatcacagtctatgcagagccacccaaacccttcatcaccagcaacaactccaaccccatggaggatgaggatgctgtagccttaacctgtgaacctgagattcagaacacaacctacctgtggtgggtaaataatcagagcctcccggtcagtcccaggctgcagctgtccaatgacaacaggaccctcactctactcagtgtcacaaggaatgatgtaggaccctatgagtgtggaatccagaacgaattaagtgttgaccacagcgacccagtcatcctgaatgtcctctatggcccagacgaccccaccatttccccctcatacacctattaccgtccaggggtgaacctcagcctctcctgccatgcagcctctaacccacctgcacagtattcttggctgattgatgggaacatccagcaacacacacaagagctctttatctccaacatcactgagaagaacagcggactctatacctgccaggccaataactcagccagtggccacagcaggactacagtcaagacaatcacagtctctgcggagctgcccaagccctccatctccagcaacaactccaaacccgtggaggacaaggatgctgtggccttcacctgtgaacctgaggctcagaacacaacctacctgtggtgggtaaatggtcagagcctcccagtcagtcccaggctgcagctgtccaatggcaacaggaccctcactctattcaatgtcacaagaaatgacgcaagagcctatgtatgtggaatccagaactcagtgagtgcaaaccgcagtgacccagtcaccctggatgtcctctatgggccggacacccccatcatttcccccccagactcgtcttacctttcgggagcgaacctcaacctctcctgccactcggcctctaacccatccccgcagtattcttggcgtatcaatgggataccgcagcaacacacacaagttctctttatcgccaaaatcacgccaaataataacgggacctatgcctgttttgtctctaacttggctactggccgcaataattccatagtcaagagcatcacagtctctgcatctggaacttctcctggtctctcagctggggccactgtcggcatcatgattggagtgctggttggggttgctctgatatagcagccctggtgtagtttcttcatttcaggaagactgcatttgcaacagctacagtctaaaattgcttctttaccaaggatatttacagaaaagactctgaccagagatcgagaccatcctagccaacatcgtgaaaccccatctctactaaaaatacaaaaatgagctgggcttggtggcgcgcacctgtagtcccagttactcgggaggctgaggcaggagaatcgcttgaacccgggaggtggagattgcagtgagcccagatcgcaccactgcactccagtctggcaacagagcaagactccatctcaaaaagaaaagaaaagaagactctgacctgt

SEQ ID NO: 20889 - DNA, 394 bp, Homo sapiens
  misc_feature 1, 2, 3, 4, 259, 260, 261, 262, 263, 264, 265, 266, 267,268, 269, 270, 271, 272, 273, 274, 275, 276, 277, 278, 279,280, 281: n = A,T,C or G
nnnnattgtcccacaaatgtttggctgtttttgtagttgaattgtttgtattaggattcaagcaaggcccatatattgcatttatttgaaaggtctgtaagtctctttccatctacagagtttagcacatttgaacgttgctggttgaaatcccgaggtgtcatttgacatggttctctgaacttatctttcctataaaatggtagttagatctggaggtctgattttgtggcaaaaatacttcctaggtggtgctggnnnnnnnnnnnnnnnnnnnnnnngagtgagggctgtaaaactaatctcagcttctttctttacaagttatgtgacttcagagaaaatacttaactctccaggctttaaatgaggtaatgaaaacatttagtccagt

SEQ ID NO: 20890 - DNA, 1167 bp, Homo sapiens
ctgtaaaaagctgacagatacaccccagagtaccttgatggtataagtttcctcaaagtcagttaacctggtacagaaaccagttctatgaccatccagcccaatgttcaattcacttcaattattctatgccccggaaaatataactgaaaagcttgatttatatgctagagaagaagcacaagtttttaatcaccacttagaaaaaaaaaaaaaaggaatcccaaatgctaaattatgctgtcaaatcatctaaagatgaacagctatttgcactggaggtcagagaacattacagacttggggaatatggtgttaacagtcagatccccttttttcataccaatctaaactcagagctgttggctattttgtctgacccatacaattggccagattagtctatgattgggacagaaacattacgggcactcagggattgctcatgaataccaattaatattaatttggatttcttctctttgacccagtacgcggggatccctgactcggggtcgcctttggagcagagaggaggcaatggccaccatggagaacaaggtgatctgcgccctggtcctggtgtccatgctggccctcggcaccctggccgaggcccagacagagacgtgtacagtggccccccgtgaaagacagaattgtggttttcctggtgtcacgccctcccagtgtgcaaataagggctgctgtttcgacgacaccgttcgtggggtcccctggtgcttctatcctaataccatcgacgtccctccagaagaggagtgtgaattttagacacttctgcagggatctgcctgcatcctgacgcggtgccgtccccagcacggtgattagtcccagagctcggctgccacctccaccggacacctcagacacgcttctgcagctgtgcctcggctcacaacacagattgactgctctgactttgactactcaaaattggcctaaaaattaaaagagatcgatattagaaaaaaaaaaaaggaaaaaaatattttcctttcccggggggccctttaaaaaataggggacccccggggggggggaaattaaaatacccctttttttttccccccccccccggggggggcccccgccccccccttttggccccttaagagggggttaatggcccccttgggaaaa

SEQ ID NO: 20891 - DNA, 335 bp, Homo sapiens
  misc_feature 1: n = A,T,C or G
naggaagtaatcattgaattgaccaagggaggtgtggattttgcccttgactgtgcaggtggatctgaaaccataaaagcagccctggactgtactcaaatacaggccatctatgactctactatttacaaatatacctactaagacaatcccattcgtttcccccaggaaaagtccactcaggccttctatgagaacatttatatttccacagctccactctccttctataagaacatttatatttccacagctgatagaaatctcacctctcttaactctttgcctaagcaacaggtagcatagcttttaatttcaaacaaaattacccgcgt

SEQ ID NO: 20892 - DNA, 400 bp, Homo sapiens
  misc_feature 396, 397, 398, 399, 400: n = A,T,C or G
accacttgcacaccaagcttaatagagatggggtggctattactatcttctgcttattggtggggatgcctgagacacaaaggagctgaggaacatggccacagccaagtggccaagcccagaccaagtgtctggtgtccagtcacctagtccccagatgtctcctgtgtctcttgcaactcagctcaaatcacaggttccttgtctcacccatgaacagatccatcatctgttcttgggacactgaggttcctcctcatcttgagggacattttccaaaaaaaaaaaagggccttgacctttccttaagggaaaaataattattaattaaaaagaaccctgaagtcaagtcacttatgtagtgatgtgatcccgcgtacctgcccgggcggccgnnnnn

SEQ ID NO: 20893 - DNA, 2090 bp, Homo sapiens
ttttattgaattagttgcatgcaggagcaattctgttcttcccatgagcagcagagtcgagtgttagagtgcaggatccagagcggggagaggctgctgctgacctgggagagtgggcaggtcctgggggaccagacggtctcagacaatgagctccaggaaatgtccaatcagggaagtaagtacgtcaataaggaaattcaaaatgctgtcaacggggtgaaacagataaagactctcatagaaaaaacaaacgaagagcgcaagacactgctcagcaacctagaagaagccaagaagaagaaagaggatgccctaaatgagaccagggaatcagagacaaagctgaaggagctcccaggagtgtgcaatgagaccatgatggccctctgggaagagtgtaagccctgcctgaaacagacctgcatgaagttctacgcacgcgtctgcagaagtggctcaggcctggttggccgccagcttgaggagttcctgaaccagagctcgcccttctacttctggatgaatggtgaccgcatcgactccctgctggagaacgaccggcagcagacgcacatgctggatgtcatgcaggaccacttcagccgcgcgtccagcatcatagacgagctcttccaggacaggttcttcacccgggagccccaggatacctaccactacctgcccttcagcctgccccaccggaggcctcacttcttctttcccaagtcccgcatcgtccgcagcttgatgcccttctctccgtacgagcccctgaacttccacgccatgttccagcccttccttgagatgatacacgaggctcagcaggccatggacatccacttccacagcccggccttccagcacccgccaacagaattcatacgagaaggcgacgatgaccggactgtgtgccgggagatccgccacaactccacgggctgcctgcggatgaaggaccagtgtgacaagtgccgggagatcttgtctgtggactgttccaccaacaagaccctcccaggctaagctgcggcgggagctcgacgaatccctccaggtcgctgagaggttgaccaggaaatacaacgagctgctaaagtcctaccagtggaagatgctcaacacctcctccttgctggagcagctgaacgagcagtttaactgggtgtcccggctggcaaacctcacgcaaggcgaagaccagtacagtggtccttttcagagttggacttctagactcacctgttctcactccctgttttaattcaacccagccatgcaatgccaaataatagaattgctccctaccagctgaacagggaggagtctgtgcagtttctgacacttgttgttgaacatggctaaatacaatgggtatcgctgagactaagttgtagaaattaacaaatgtgctgcttggttaaaatggctacactcatctgactcattctttattctattttagttggtttgtatcttgcctaaggtgcgtagtccaactcttggtattaccctcctaatagtcatactagtagtcatactccctggtgtagtgtattctctaaaagctttaaatgtctgcatgcagccagccatcaaatagtgaatggtctctctttggctggaattacaaaactcagagaaatgtgtcatcaggagaacatcataacccatgaaggataaaagccccaaatggtggtaactgataatagcactaatgctttaagatttggtcacactctcacctaggtgagcgcattgagccagtggtgctaaatgctacatactccaactgaaatgttaaggaagaagatagatccaattaaaaaaaattaaaaccaatttaaaaaaaaagaacacaggagattccagtctacttgagttagcataatacagaagtcccctctactttaacttttacaaaaaagtaacctgaactaatctgatgttaaccaatgtatttatttctgtggttctgtttccttgttccaatttgacaaaacccactgttcttgtattgtattgcccagggggagctatcactgtacctgcccgggcggccgccccgacggggggcccggtaccca

SEQ ID NO: 20894 - DNA, 827 bp, Homo sapiens
  misc_feature 826, 827: n = A,T,C or G
acacctatagtcccagctactccagaggctgaggtgggagtattgcttgagctgaggagcctgaggctgccgtgagccgtgactacgccacagcactccaacctgggcaacagagcaagattcctgtcattcattcattcataattaaataaatagaaaatcatctctttcaaaaagttcacagtcatgggaacacttatacctaaattagaggtccaggccagttcatccatgaagcagcaactataactgaagcacgccaaattgtggaatggagaacatatgcccagtctaaagcatgcagccactacctgacaccagcactcccatgctctgggagaatgcaaactcagtggtgtcacagcttctgattttctgagaagacagaaactttgaggaatgaacatttaacctagagaaatcagggaatgcttagcaaaagagcccccatttgactcgagtcctataaaggttacgcagagtgtactaggtgtggatgcagatgccttatttcctgtggctacagcttagggtggaaagtggggagtggcaagataagcaactagagaggaaagaagccatgcacaagctaaactctatgcacagaacacaagaacttgttgaagaagttactctataatacaacatacaagagcagaatttatctgtctgcagaaaactctaccaaactcccatacagtgagatttcaaggtttggtagacatacaaagaggcaggtatcttgcttttagtccataaagctagactggacactactgtatctaaacactctttggcctcgaactattgagacatctaaatgccnn

SEQ ID NO: 20895 - DNA, 3918 bp, Homo sapiens
  misc_feature 3915, 3916, 3917, 3918: n = A,T,C or G
ccgcccgggcaggtacgctgtggagtctcctccagatcgcagctgaaggatctgttgagcgcttcaggaaaggcggacaggcgacactaacaggtgaagatctcgggagaccatgactaagaaaagaattgctgtgattgggggaggagtgagcgggctctcttccatcaagtgctgcgtagaagaaggcttggaacctgtctgctttgaaaggactgatgacatcggagggctctggaggttccaggaaaatcctgaagaaggaagggccagtatttacaaatcagtgatcatcaatacttctaaagagatgatgtgcttcagtgactatccaatcccagatcattatcccaacttcatgcataatgcccaggtcctggagtatttcaggatgtatgccaaagaatttgaccttctaaagtatattcgatttaagaccactgtgtgcagtgtgaagaagcagcctgattttgccacttcaggccaatgggaagtggtcactgaatctgaagggaaaaaggagatgaatgtctttgatggagtcatggtttgcactggccatcacaccaatgctcatctacctctggaaagcttccctggaattgagaagttcaaagggcagtacttccacagtcgagactataagaacccagagggattcactggaaagagagtcattataattggcattgggaattctggaggggatctggctgtagagattagccaaacagccaagcaggttttcctcagcaccaggagaggggcttggatcctgaatcgtgtaggggactacggatatcctgctgatgtgttgttctcttctcgacttacacattttatatggaagatctgtggccaatcattagcaaacaaatatttggaaaaaaagataaaccaaaggtttgaccatgaaatgtttggcctgaagcctaaacacagagctctgagtcagcatccaaccttaaatgatgacctgccaaatcgtatcatttctggcttggtgaaagtgaaaggaaatgtgaaggaattcacggagacagctgccatatttgaggatggctccagggaggatgacattgatgctgttatctttgccacaggctatagctttgactttccatttctggaagattccgtcaaagtggtcaaaaacaagatatccctgtataaaaaggtcttccctcctaacctggaaaggccaactcttgcaatcataggcttgattcagcccttaggagccattatgcccatttcagagctccaaggacgctgggccactcaggtatttaaaggtctaaagacattgccctcacagagtgaaatgatggcagaaatatctaaagctcaagaggaaattgacaaaaggtatgtggagagccaacgccataccattcagggagactacatagataccatggaagagcttgctgatttggtgggggtcaggcccaatctgctgtctctggccttcactgaccccaagctggcattacacttattactgggaccctgcactccaatccactatcgtgtacagggccctggaaagtgggatggggctcgaaaagctatcctcaccacagatgatcgcatcaggaagcctctgatgacaagagtagttgaaaggagtagttctatgacttcaacaatgacaataggcaagtttatgctagctcttgccttctttgctataattatagcttacttctagttgtcctattgtcactgccctgtttttcattgggaagcttatctacagatgccttcagaatctgacgagattgactctcagtttcatattgcccagaaatctactttaatgtctctttcgaaagcattaattcactttcctttttcctacaatgaaacctgttttccatttgtattaactcatctcccttccactcatgatccgtcactcttccttgtggtaatccctagactgggagctcaggtactcttttagtcatctttgtatgtctttagcagagttcttgacatgtggtaggtgcttaataaatgtttgttgtttatcaaattttatggtagggagagtaagtcagcatcggtataaaatcgcttactccacgtaactcttcttctgatagggtttgattttctattagaagctcaattttagttttttttcatattataactaaatatgtttcctgagagataagagaaataatgttcctacaatagttgtatgtatctaagataagacatatagatgcttaagacattttgtttcacttgctattcactagtgtacttgaaacatggtcatttttagcccttttccttaggaaccatgtctttattttctcaataaagaaattactttcaactttctaggctcacagtcattcagatcatctaccatctgccaatgagatcaacttggttgagaattttgggattttaaattagctgtcctacctttttaaatctcttttaaatccttcccatattaggatccaacaaaactttatcttaggaaatatgataagtagcttccaattgttgtagtgtggtctacaaatgtgatttgattcatcttcccccactctaattttctccccttttctcctcccttacatggagtctaagtaagtatttgaacaagtcatttatgtattaaattagaactgatattaactaaatgtaggaacattctgcttataccagtttttctcatgtcgtaaagtgtagttctgaaaaacagagcaaatgaaatgcaaagcaggtacttgggtttacatcccagtgccactgatgattctgttttctcatctgtggaagtttcactgttcttgtttcatggagaaattaactaagtgtcagctgtcaggcacactgaactcaggtgatgttcattaatagctgttgtacaatatgtttgtatttggattgctgcttattacttaacaacaggataaacctgaacaatggaaaagaccaacattagagagtattatctttccaaatacacacacctgtaagagaactggaaatgtgagaactacaacttcttcttatttaaacatttgaacaattgccggccctttcaccgaatttacctgtggaatgccttttgagagttagagaactgagaactggtattacttttcaggtcttttgctttccctaatccttgtgatactggagatttatcatctattaaaatggacctagtatttttaaatctgcatatcaaaagcaaattgaatgtctcttgcttccttttaatttcttttaacatataaatttctcttttagcatgtaaatttgttgaattaacagccctttgataatataattcctagttatcagcaataagtacaccagtttcttttttaaattaggagtatgtaattctaaattaattgattctctcattgtacatattatatgcaaggttacaaaaaaaaatcaatggttaatgattttttagctcaaccaagctaaaagatgtgaacaagaaattgaactcaaaacaacttaagatacaaagctcttgttactgataatgtctaataatattcatcaatttaccatatcttgttcttatattaaaatgttctatcattttcctaattattttaaagtcgattacaaaaatatatatatattcttgtagtgccagaaaattgaatacattaataaatggggtagaatagatgaatctcccatgaagaagaattccaaataatttatgaactctgccctcaaggatatggagcagaacttcctacttctctagtgtgagctgaatagtgacttccttccaaaaattacatatggaaagggggaaaataactttgtagtggagaaatctgataaacactatctcggctaggttatcaagattaacactaacagtaataagtcacactgatagtatgtacnnnn

SEQ ID NO: 20896 - DNA, 1821 bp, Homo sapiens
  misc_feature 1, 2, 1820, 1821: n = A,T,C or G
nnagcgtccggcattttttgttttcctttcttttggggtccagtatccaagttctgggcacttgaaggagaataattctagcatcatggccaaatagattttttaaaattatactccattatttaatgaaattatacacattttagttgacttaatatttaaaacatatttttttcctttttgatgagtgaatattgtaccttcatcatattgagtgttctaatttcctttccttcagttgtgtgaaaatgtcttctttccaagaggcctcttttaagaggtctttgtccctaaccagtaccggttgctctctagaattggggcatagctgttaccctgggacttttgttccttgctctcctgtggtaggaactgtttcttggatcccaggcttcttgtttttttgttttgttttgttttgttgttgtttttttaaaattaccagtcggttttgctgaattcccgtaaaacttcagtaactttaataactctcccacaaaagggaaatatactatttaagtccttgcatattagaaaatgtcttctgtcttcatgcttgattgatagtttggctggttatataattataggttgattagctttttctgtgtacatggggcttggacccctttctctcgacggggttttatctacattgttgacgccttatggaacaacctgcatcgagagcctctcgtaatgtggttacaaaccttttatattttccttcctaatgctactcttctaagactaaatattatctcttaaaatcttaagctattaaaattacgttaaaaacttaccgctaagcaatatcttagtaacctatggactatatttttaaagtggccgcccgcggacttctgtgggacctgcagtgttgtggcttctgtggggagatggacccgttcataaactttcttctcttcttggaattattaattcctatctgcttccaagctgataaagcttagaaaaggcagttattccttctttccaaccagctttgctcgagttagaattttgttattttcaaataaaaaatagtttggccacttaacaaatttgatttataaatctttcaaattagttcctttttagaatttaccaacaggttcaaagcatacttttcatgatttttttattacaaatgtaaaatgtataaagtcacatgtactgccatactacttctttgtatataaagatgtttatatctttggaagttttacataaatcaaaggaagaaagcacatttaaaatgagaaactaagaccaatttctgtttttaagaggaaaaagaatgattgatgtatcctaagtattgttatttgttgtctttttttgctgccttgcttgagttgcttgtgactgatcttttgaggctgtcatcatggctagggttcttttatgtatgttaaattaaaacctgaattcagaggtaacgtaaaaaaaaaaaaaaaaaaaaaaaaaaaaaaaaaaaaaaaaaaaaaggggggggcgcaaaaatttccccgggggggccaaattttgggggcccccctttttttggaaaagggggccccaaaaggagagcccatataaataaccaacaggccacggggccccgcgcgtaacacaaagccgcgtagccggcggaacccacgctagccggggggaccctggggggaaggaacccacactcgcgcgggcgcccctaggtggccaaccccctaagagataaacgggcctagcgcacatttaaaatccaggcgcatccgcgcgctacccacggccataccggcgccgaaaatggtcaggatatcataggaatcttccgagcnn

SEQ ID NO: 20897 - DNA, 427 bp, Homo sapiens
actatcttttcaacttttctgatggcttgatatttttcaaaattaaaaatatcagaaacaaacatccgacgatgggggtttaatgagattccagtatgtaaaatattctagaatggctgaaaataataaaatagtaatatttttgatatcggagagaccttcaagcaatgtattaaaaaggcaagctattgaacattgtttacattttgtaaaagcagatacaaccgcaaacacatgcagaagcactgggacaaactttaacagaaattgataataataaggagacggggaaaagcttttgtttttttgtttcacattatagctttcttcactatttgaattttctacacatgtgctacctacctttttatgtgagcaacagttatctgggtggtagttgggggggcattttttgtttactttatac

SEQ ID NO: 20898 - DNA, 494 bp, Homo sapiens
  misc_feature 1, 491, 492, 493, 494: n = A,T,C or G
nacatttggcatgatctgggcctatgcggtcttacaatccctgtataaaactagacaatgaaaaacagaaaacaaaacaaacaaacaaaaaaacaagaacgaagcacctaccacatgccagctactgaggctatgaaggtattctcccgccttagaaagcccaggattaatgcaggattgcgacatttaaacagaacatttccatacagcatgagtataaatgactttcccaagtttacactgagagtaactgacacagcaaccccagcaaagtctgagctgagtcctgaataattgtataaaaaggggagagaaacagagtgaagaaagggtttcccagactctgtcccaggaaagaaaatgagctcgtggagaggaatagactttctctatgaaaacagagggaacaaagaggaagatgtctgggaaccgaggagtaatagagacctgagtttacatcactactctgccactccctaggtacctgcccnnnn

SEQ ID NO: 20899 - DNA, 281 bp, Homo sapiens
acagattaaatagcttaaaggaagaaaaaatcatcatagtaaaagaatttgagaagataacaaagcccaggagaaatggagaagaagatgaatattttgagagaaagcactgaagaattacgtaaagaaataatgcagaagaaattagaaattaaaaatttacgagaagatttggcatctaaacaaaagcagttattaaaagagcagaaggaactagaagaattgttgggacatcaggtcgtcctaaaggatgaagtggcccaccatcaaaccattccagt

SEQ ID NO: 20900 - DNA, 535 bp, Homo sapiens
  misc_feature 1, 2, 533, 534, 535: n = A,T,C or G
nnggtactgtggtagtatggtttcttggtatgatagtttcttgaatggcttattttgctaaaaaatgtttatgtttttgcccttatttatccatattaatggagaagagctatggaatagttaatgccaatttatgaataatcccaaatcatttatgttggacttgattaaattatttataatgccaagcacagccagctgtcatggcccatatgtttgatcacatttttctctaattgtttctttcttttgtctctggaaatctgctgttatgtataatgaatgtttcttctaatgcttaaaattgttagcagattactgtcatcatgagccgtaaactatccaagtctgaacatatcagatcagcatttaatatcatactaagatgaaatttagaaagttaatatccagcgataattatatgcatcatcattactgtgttgcatgttaattaggtatatgtagttagtatatcatataaatgactgcgttacccttatggtaacagaccctcggagatcctgctagagtcnnn

SEQ ID NO: 20901 - DNA, 1952 bp, Homo sapiens
caacgagcaccagcggccagaggtgagcagtcccgggaaggggccgagaggcggggccgccaggtcgggcaggtgtgcgctccgccccgccgcgcgcacagagcgctagtccttcggcgagcgagcaccttcgacgcggtccggggaccccctcgtcgctgtcctcccgacgcggacccgcgtgccccaggcctcgcgctgcccggccggctcctcgtgtcccactcccggcgcacgccctcccgcgagtcccgggcccctcccgcgcccctcttctcggcgcgcgcgcagcatggcgcccccgcaggtcctcgcgttcgggcttctgcttgccgcggcgacggcgacttttgccgcagctcaggaagaatgtgtctgtgaaaactacaagctggccgtaaactgctttgtgaataataatcgtcaatgccagtgtacttcagttggtgcacaaaatactgtcatttgctcaaagctggctgccaaatgtttggtgatgaaggcagaaatgaatggctcaaaacttgggagaagagcaaaacctgaaggggccctccagaacaatgatgggctttatgatcctgactgcgatgagagcgggctctttaaggccaagcagtgcaacggcacctccatgtgctggtgtgtgaacactgctggggtcagaagaacagacaaggacactgaaataacctgctctgagcgagtgagaacctactggatcatcattgaactaaaacacaaagcaagagaaaaaccttatgatagtaaaagtttgcggactgcacttcagaaggagatcacaacgcgttatcaactggatccaaaatttatcacgagtattttgtatgagaataatgttatcactattgatctggttcaaaattcttctcaaaaaactcagaatgatgtggacatagctgatgtggcttattattttgaaaaagatgttaaaggtgaatccttgtttcattctaagaaaatggacctgacagtaaatggggaacaactggatctggatcctggtcaaactttaatttattatgttgatgaaaaagcacctgaattctcaatgcagggtctaaaagctggtgttattgctgttattgtggttgtggtgatagcagttgttgctggaattgttgtgctggttatttccagaaagaagagaatggcaaagtatgagaaggctgagataaaggagatgggtgagatgcatagggaactcaatgcataactatataatttgaagattatagaagaagggaaatagcaaatggacacaaattacaaatgtgtgtgcgtgggacgaagacatctttgaaggtcatgagtttgttagtttaacatcatatatttgtaatagtgaaacctgtactcaaaatataagcagcttgaaactggctttaccaatcttgaaatttgaccacaagtgtcttatatatgcagatctaatgtaaaatccagaacttggactccatcgttaaaattatttatgtgtaacattcaaatgtgtgcattaaatatgcttccacagtaaaatctgaaaaactgatttgtgattgaaagctgcctttctatttacttgagtcttgtacatacatacttttttatgagctatgaaataaaacattttaaactgaatttcttaacttggaaaaaaaaaaaaaagaaccatcaacgcgccccttactcaacagagacgacaccacacaggaaaaaccacagaggggcgcacccaatcccccgagaaaagctgtcgacaaccacaatgtgggggcagcgcccccaacaagtgacgaacagtggcacgaagacaccgaaaaagagggcggcgcgacgcggggtcaccccataaaaaacgccgggcgccgcgtcgaaaaaaccagggattcggaccgagcacacggggcagactaaagcccgacggggagaaaagagagggccgcaca

SEQ ID NO: 20902 - DNA, 2658 bp, Homo sapiens
gagtcgacccacgacccacgcgtccgctcgcgatggagggaggaggaggtatacccctagaaacacttaaagaagaaagtcagtcaagacatgttctacctgcaagttttgaagtcaacagtttgcagaaaagcaactgggggttcttacttactgggcttgtgggtggcaccctggtggctgtgtacgctgtagccacgccgtttgtaacgccagcccttcgaaaagtctgtttgccatttgtacctgcaactatgaagcagattgaaaatgttgtgaaaatgttgcgatgccgaagaggatcccttgtggacatcggtagtggggacggacgcattgtcatagcggctgcgaagaaagggttcacagcagttggttatgaattaaacccatggctagtttggtattccagataccgcgcttggcgagaaggtgtgcatggatctgccaaattttatatttcagatttgtggaaggttactttttcgcagtactcgaacgttgttattttcggtgtgcctcagatgatgctgcagttggagaagaaacttgaacgtgaacttgaggatgatgcacgagttattgcttgccggttccctttcccacattggactccagaccacgtcacgggggaggggatagacacagtgtgggcatatgatgcaagcacttttagaggccgtgaaaagaggccctgtacatcgatgcatttccagctgcccattcaagcataaactttactgggagtgtttttctgaaatattgtagtcttccctgatcttgtagagacttacagctgtgtccttagcaaaggagcataattgtctttggtttggaatgagaaattactattactttccttaactgttggagaaaacaaacgaagaaaaacaggtagatttaaaatctgcttttgatgctattttcttaaaaattgtacttactgcctttccatgcacctggatgcatgaaaagatgaataagtgatggtcatggttatgggtaggaaaataagatgccaatagctcttcacattataaacaatatggcttaatgcctcgataaggagaaatgatttttaaagacagtatatattaccaactgtttgtagtatcctataactttgttcatacttaagttgtatctctttcctttttgtacttcatggcaaaattaattttctaaaggattcagagaggcgtttatattttataacatttattagaaataatttgttccaccactagattactgtattttatggaatctaagctgtatatgtgtacatttgtatacatgtatgtgtaaatgtaagcctgacgtgggttcagattccagttttgtcatcagcaagaggcctcggacccatgacttactgcctctgagccttggctttctgtgtatctctgccactgggataatggtacacataacagtggagtggggaccaatttctaaaactcatggcacctagtctttggtccataaatggtgtttgttattttagacactgagaaaaatcttattcacagaagttgcagattatttctgctagtcacttttttatttcttgagagctgccactcatttaatatttctcatttatgagaagagacttgactgatttagataaaagacgaattaaggaaaacctttgaacgtgagtagacaagcttcatatatctgtaaagtgaatattgaatggtagcttgagtcattcgtacttatcacagaaaagaattgaactcccagtcatacacctgtaactgaaataccaaactgtcttaatggagatgtaatgaagtaagatggtcacatctttaactaaacttataaaaattggtcagtttgatcattttcatttaaatgagaaacatctggggacacattcattcattcaacaaatatgtattcagtatctactgtagaagaagctctgagattctgcggtaaatagacatgcaaagcccctggcctcatggaattcctattctggaaaggagagacaaacaaataagcaagggaatcttagtgtgtgtggagttctctgaagtaaacagtgtgatggtgtagagagcacctgtgtgagtctgagatgaggggatgtgatgttgtggacttcagccaggtttttggcagctagtgtctgtccctttttcagtagctccagtcttcttatgaagaatgagttctttctgtggtgtgtgactttagtgggagggcagctcttgctctatgcctctcagttgccttccactgtaaccagtcctgtaactggtctgggcacactcggagggggatccatggtagctccttgccatgaagatgtgggtagaggagggttctgtggggcctcggaggtgttcaacattttctagaagtgttcctggtggggtttatagaggcattgatatggtttggctgtgtccctacccaaatctcatcttgaattcccacgtgttgtgggaaggacctggttggaaggtgattgaattatgggggcaggtctttcctgtgctgttctcatgatagtgagtaagtttaatgagatctgatggttattttaggggggagttttcctgcacaagctctttttgcctactaccattcacgtaagatattccaagccacatggaactgtaagtccaattaaagctc

SEQ ID NO: 20903 - DNA, 899 bp, Homo sapiens
  misc_feature 1, 2, 3, 4, 5, 6, 7, 8, 9, 10, 11, 12, 13, 14, 15, 16, 17,18, 19: n = A,T,C or G
nnnnnnnnnnnnnnnnnnnatagatctggttcatttatttaactgttatgtagtacaccacaatattatgtaactatttacgtgctgtttattcattctgctactgacaggaatttaggctgtttccaattttctgctattacatataatgtttcaagcacacatgcaagatatctctttatgggttttaagttatgcaatttcatctttacttcatctcttctagttgagaattgctctccggggtagttgtaccaaatggtactactacaaacaatgtgtgagagttccttttacttcatcctcaccaacatttggtatttcataagatttttcttttcaccttgcactttttgcaaatcataaggcttttaaattttacaaatctgatgcgtagaaaatggtaacactgatttcacttgcaagttcttgattattaatgaatgagaatcttttcatgtgtttactggctatatgcatttcctattttgagaactacctatttttcaatttatctgttcttatatttggtaaagttctcagttatatgagttacaaattttctaatgtttttaactttatggtttctttggcgatacacaagttttaaattttggtcaagtttatcagtattttcctttgcagtttatactttgtactttgtttggtgttaggaacattctctcatttttatcctaaaagaattttgaagatttgcttttcatatttgggatataattcacctagaaataaattttgtgtctaatgtaagatggatctaatttttttaaagttaaactgtgtaaacacaatttattaaatattctactctttccctactgatctgaaacactacatcagatatttacagtttccataaacacatatgtggctcgttt

SEQ ID NO: 20904 - DNA, 326 bp, Homo sapiens
  misc_feature 1: n = A,T,C or G
nagcggccgcccgggcaggtacgcgggtctgttccttatttgagtgtaatccagaaacttcactgaagcagatgtagggaggctgataagtagatgtaacttgtgttgtgatgaaagaacttgccaaatgatttttctcattgtgctgctaatgcatgaaaaaggttaaaatgataaaatctatataaatgaatgattattttgcttttaagtagcatttaggatgtttttgttttcatttaagcaccaaggatgacattgatcttgatgccttggctgcagaaatagaaggagctggtgctgcctaagaacaggagcctcaaaag

SEQ ID NO: 20905 - DNA, 3189 bp, Homo sapiens
  misc_feature 3188, 3189: n = A,T,C or G
cgcgtccgtgcactggcggaggtcgcggcgggcctcggagaggagacgccgacgtcagcgcgccggggcggggctggcggcaggagacgccgcgttgagagcttgggctcctccgtgagccgccggcgcgcttcgctgcctggcggcctttccccgagccgagcccgcttcccgaggccgccagtcgtcgcctgcccgcgcctgcgcagcgtcccgggccgagagggccacggcggcggccatggcgcaccgctgtttgcggctgtggggccggggcggctgctggccccgcggcctacagcagctcctcgtgcctggcggcgtgggcccgggcgagcagccctgcctccggacgctttaccgatttgttacaactcaagcaagggccagcagaaattctcttttgacagatataattgctgcttatcaaagattctgttctcgacccccaaaaggatttgaaaaatactttcctaatggaaaaaatggaaaaaaagctagtgaacctaaagaagttatgggagagaaaaaagaatcaaagccagctgctaccacacgctcttctggaggaggaggtggtggcggtggaaaacgaggtggcaagaaagatgattctcactggtggtccaggtttcagaagggtgacattccatgggacgacaaggatttcaggatgttcttcctctggactgctctgttctggggtggagtcatgttttacttgctgctcaagagatccgggagagaaatcacttggaaggactttgtcaataactatctttcaaaaggagtagtagacagattggaagtcgtcaacaagcgttttgttcgagtgacctttacaccaggaaaaactcctgttgatgggcaatacgtttggtttaatattggcagtgtggacacctttgaacggaatctggaaactttacagcaggaattgggcatagaaggagaaaatcgggtgcctgttgtctacattgctgaaagtgatggctcttttctgctgagcatgctgcctacggtgctcatcatcgccttcttgctctacaccatcagaagagggcctgctggcattggccggacaggccgagggatgggcggactcttcagtgtcggagaaaccactgccaaggtcttaaaggatgaaattgatgtgaagttcaaagatgtggctggctgtgaggaggccaagctagagatcatggaatttgtgaatttcttgaaaaacccaaagcagtatcaagacctaggagcaaaaatcccaaagggtgccattctcactggtcctccaggcactgggaagacgctgctagctaaggccacagccggagaagccaatgtccccttcatcaccgttagtggatctgagtttttggagatgttcgttggtgtgggccctgctagagtccgagacttatttgcccttgctcggaagaatgccccttgcatcctcttcatcgatgaaatcgatgcggtgggaaggaagagaggaagaggcaactttggagggcagagtgagcaggagaacacactcaaccagctgctggtggagatggatggttttaatacaacaacaaatgtcgtcattttggccggcaccaatcgaccagatatcctggaccccgcgctacttaggccggggcgtttcgacaggcagatctttattggaccaccagacataaaaggaagagcttctattttcaaagttcatctccgaccgctaaaactggacagtaccctggagaaggataaattggcaagaaaactggcatctttaactccagggttttcaggtgctgatgttgctaatgtctgtaatgaagctgcgttgattgctgcaaggcatctgtcagattccataaatcagaaacactttgaacaggcaattgagcgagtgattggtggcttagagaagaaaacgcaggttctgcagcctgaggagaagaagactgtggcataccacgaagcaggccatgcggttgccggctggtatctggagcacgcagacccgcttttaaaggtatccatcatcccacgtggcaaaggactaggttatgctcagtatttaccaaaagaacaatacctctataccaaagagcagctcttggataggatgtgtatgactttaggtggtcgagtctctgaagaaatcttctttggaagaattacaactggtgctcaagatgacttgagaaaagtaactcagagtgcatatgcccaaattgttcagtttggcatgaatgaaaaggttgggcaaatctcctttgacctcccacgtcagggggacatggtattggagaaaccttacagtgaagccactgcaagattgatagatgatgaagtacgaatacttattaatgatgcttataaaagaacagtagctcttctcacagaaaagaaagctgacgtggagaaggttgctcttctgttgttagaaaaagaagtattagataagaatgatatggttgaacttttgggccccagaccatttgcggaaaaatctacctatgaagaatttgtggaaggcactggcagcttggatgaggacacctcacttccagaaggccttaaggactggaacaaggagcgggaaaaggagaaagaggagcccccgggtgagaaagttgccaactagaggcccagagggaggccatctcagtctgtccactgtggtttcagctggtgcattatttcagctgtggctttcagaagaatgggaatgctgcgctgattttagccagccactggcccagctgaaatgatggggaaaggagtccttagtcctttcagcctcagaggtcacagtgggtggcaggtgactttccggaggccttgagggaaatgcacactgtcccatagcctcattgggctcccagacgtgctggaaaggttgagcccagagtggccgaggctggaccctgtggcaccaagtggggtcggctgaccgtgtggcagggatcgttgcactggactcttggcgtgtgggaagggatgctttctctttgtcgcccactcttcattcctgtttctcctcagttcccctgtgcagatgggctgtgaaattaaattggagtcttgataagaacacattttaatttgacttaatattttaaagattgaatccagatcacttgttgctgtcttaatggaatggttttctagaggagcgtaacataactcaagttgann

SEQ ID NO: 20906 - DNA, 2891 bp, Homo sapiens
aggagtcgacccacgcgtccgaaggagtcggcggccattttgttcttctcgtggttccggtggggagagaaggaggaagtagggagcggggtggcaggggggggacccgccgcggctgctgccaccgccgccaccaccgcctctgctcgtggcgtgggaaaggaggtgtgagtcccgggcgcgagccggcggcggcgccgctgcgggagggtcggcggtgggaaggcgatggcggatttagataaactcaacatcgacagcattatccaacggctgctggaagtgagagggtccaagcctggtaagaatgtccagcttcaggagaatgaaatcagaggactgtgcttaaagtctcgtgaaatctttctcagtcagcctatcctactagaacttgaagcaccactcaaaatatgtggtgacatccatggacaatactatgatttgctgcgactttttgagtacggtggtttcccaccagaaagcaactacctgtttcttggggactatgtggacaggggaaagcagtcattggagacgatctgcctcttactggcctacaaaataaaatatcctgagaattttttttcttctcagagggaaccatgaatgtgccagcatcaacagaatttatggattttatgatgaatgtaaaagaagatacaacattaaactatggaaaactttcacagactgttttaactgtttaccgatagcagccatcgtggatgagaagatattctgctgtcatggaggtttatcaccagatcttcaatctatggagcagattcggcgaattatgcgaccaactgatgtaccagatcaaggtcttctttgtgatcttttgtggtctgaccccgataaagatgtcttaggctggggtgaaaatgacagaggagtgtccttcacatttggtgcagaagtggttgcaaaatttctccataagcatgatttggatcttatatgtagagcccatcaggtggttgaagatggatatgaattttttgcaaagaggcagttggtcactctgttttctgcgcccaattattgtggagagtttgacaatgcaggtgccatgatgagtgtggatgaaacactaatgtgttcttttcagattttaaagcctgcagagaaaaagaagccaaatgccacgagacctgtaacgcctccaaggggtatgatcacaaagcaagcaaagaaatagatgtcgttttgacactgcctagtcgggacttgtaacatagagtatataaccttcatttttaagactgtaatgtgtactggtcagcttgctcagatagatctgtgtttgtgggggcccttccttccatttttgatttagtgaatggcatttgctggttataacagcaaatgaaagactcttcactccaaaaagaaaagtgttttgttttttaattctctgttccttttgcaaacaattttaatgatggtgttaaagctgtacaccccaggacagtttatcctgtctgaggagtaagtgtacaattgatcttttttaattcagtacaacccataatcatgtaaatgctcattttctttaggacataaagagagccctagggtgctctgaatctgtacatgttcttgtcataaaatgcatactgttgatacaaaccactgtgaacattttttatttgagaattttgtttcaaagggattgctttttcctctcattgtcttgttatgtacaaactagtttttatagctatcaacattaggagtaactttcaaccttgccagcatcactggtatgatgtatatttaattaaagcacacttttccccgaccgtatacttaaaatgacaaagccattcttttaaatatttgtgactctttcctaaagccaaagtttctgttgaattatgttttgacacacccctaagtacaaggtggtatggttgtatacacatgctgccttcttggggattcaaaaacaggtttttgattttgaatagcaattagtgatatagtgctgtttaagctactaacgataaaaggtaataacattttatacaatttccatatagtctattcattaagtaatctttttacagttgcatcaggcctgaacccgtccattcagaaagcttcaaattatagaaacaatactgttctatacgagtgaccgattatgctttctttggcctacattctttattctgcggtgaagttgaggcttataagttaaaacaaaggaactaacttactgtccaccagtttatacagaactcacagtacctatgacttttttaaactaagatctgttaaaaaagaaatctgtttcaacagatgaccgtgtacaataccgtgtggtgaaaatgaattcagacttattaaatgatgaacttgttaaatcttctcagtgtctatttatcagcacaatacacacaggagaactgttgatggcatattgaatagattttcctgaataaattgctctggaaaccaaaaaaaaaaaaaaaaacaaaacaaaacaaaaaaaacaacaaacacacaaacaacaaaaaaaaagggggggagcaacacatagggagcgccccaagggagggcccaaccccagaaggcgcacaccaaatcattatatccgaacccgagggagccccctcagacgaaacacccaccaaaatcaaagaacagcacgcacgcgaacgccgcacacaacacccggcgagccccagtcgaaaaccaacgcagaaccgaacagccccacacacaaaggaccaccagtcgcgaggcgacctgaccaaatgggggaaaaaaaacccaaggaagacaacacccacgagtaaagcacacaagtacaaggatacaacgctcacaacgaccgatctacgagcgaagaaacggccaggtgttacgcaaagaacagaaca

SEQ ID NO: 20907 - DNA, 349 bp, Homo sapiens
accctgtggtcagcatagtagataacatagttacagaagaattgacaacaggaaagttgttttatagaggagggaataagggctccgtaacatgacatcataatttctagacaaacgcttaacttccctgaagcagattccgccgagagggattgggccatgtcggaaagagaccagtttgcctgtaatattcttcctttctctaatcctgggctcccttcaggtagaacccagatcaccatcaggaaccagagaatgagaaaaagtagagagattgtggaacctctaagccatcttctcacagaggaggaaactagagttcaaagatgcagccacctgcccgctctag

SEQ ID NO: 20908 - DNA, 616 bp, Homo sapiens
  misc_feature 612, 613, 614, 615, 616: n = A,T,C or G
acttgcattaatacgtgcatactttctccctttttacaaaacctctattagaggctctggaaggtgtaagccatgatagcaatgaccgtgtcaaactctttttctctgtaactcagggcctaggactgtgcctggcacatagcagacacttgatacatatttgttaaataaatgggtagctggaacatatgctccatgaggaaaatgaatgtatttgcatgttgttagttaggaatctggccctgggagtcagaattgcagtgtttgagtcaggctgcattatttcctagctgtgagagctctctaaatctattccctcacttgcaaagtggaatgatattagaatctgactcatattgttacgtgaggattaatcgacataaatacctgacacatgggtagcactcaatacaggctagctgttattatcattatcaacatcatcactatcttcttcatttttcttgcttactacttatctcctgttttaagcacataacatatgctcaataaaaatttgttaaatagagaaatgaatcaatgaagtgtagcttacctgtatacacaaatatgttttgctaccctcagtatacattttgtcaggattcagannnnn

SEQ ID NO: 20909 - DNA, 534 bp, Homo sapiens
  misc_feature 478, 533, 534: n = A,T,C or G
actgttccttccatgcatctaaaccctgtaacaattctgtgaggaaggcattactatccctagtttacaaataaagaacggagacacagaaaagttaagtcattcaccctaataattggaaagctgagattcaaacttgggccggcctgtccacccccaaagcctgagctcttaatcactgtagcacactgccttctaaaacttcagagtttttaagagctgtgcaagctactcttcccctaaattaagttgctccccctgaatgccccagaaacaacatctctcattggcttcctggcttctgctgcagtgaaagctaagctgtcagcagggctccctggtcatttaacttgttgatcaatcctgacatttctaccaccaaacaaattcttcttttccttgtggctctctctaacctgcatttcccgctgtgggctactgagcctggactaaaatttatgtattctctatcccccanatgagcaagagatgcagttctcatgtatctatcagctaaattaagaagagaaaann

SEQ ID NO: 20910 - DNA, 500 bp, Homo sapiens
  misc_feature 95, 227, 478, 479, 480, 481, 482, 483, 484, 485, 486, 487,488, 489, 490, 491, 492, 493, 494, 495, 496, 497, 498, 499,500: n = A,T,C or G
actggaagtgctatataatgcagtgttaaaaaaaaagaaataaaatgcacatagatttgaaaggatgaaatacaactttgttcacaagtaacatngattgtctttgtagagaattctaaataacaaaaaccctgctgacattaataagcaattacagcaggattgcaggatacagtcctcaagtagatgataaaaaggaattggacatcaagtcattaaaagacacngagaaaccctaaatgcttattgttaagtgaaaaccaatctgaaaaggctttctattttgtatgattgcaattatatgacattttgggagaggcaaaactattgatccagagaaaggaccaatggttgctgatagttgaaggtataggcggtatggatgttgctgctgctacctttgggcctaaaaaccaaccacctgttgtgtatcaattaccttctttgataaaaggaaataaataaataatgttatccnnnnnnnnnnnnnnnnnnnnnnn

SEQ ID NO: 20911 - DNA, 468 bp, Homo sapiens
  misc_feature 1: n = A,T,C or G
nagacctctaccaggggtggtcccattgtgttttattggttaaaacaaaaaagaaatgtagcccttaagtctttggctgaggaaggaactggaggaatgagggttcaaaaggaaatttgagtttatctctgccttcatagtagttggtcttaattacattttgaatgtctttggggaacaggtaaggtaataagggggattttactaggtgggcaccaccctcaggaagggcttaatcccattttgagtacgcgggggaatttgaggaggaggagactgccattgagatgccttgccatcaccttttccattccagctgcattctgccctggctaagcaagacaaattcctgtcccttgtgccgctatgagctgcccactgatgacgacacttatgaggagcacagacgagataagactcgaaaacagcagcagcaacaccgactggagaacctccatggagccatgt

SEQ ID NO: 20912 - DNA, 3015 bp, Homo sapiens
actacatatttggagaggcagctaggaagtggtctaaaggttgggattgctgtatgtgatcacttgtgctgattttcatcacccgctaaccagagctttagagtgggagttgggaactaagtaatgacctgtctgctagaaaaggggaaaaaccaagagaccctgcatttcatactggcgccatatccccagagcctgacttgcacacaggcagtataagaccaaataagggagtcggggggctcaaaaagtggagccccatcttaagtatctccaaacagcagggaccgcttagtccttgccgcatccccagtgtctatactgggggcctggcagggagatgcactttactcaggtaatttactgagtggatgaaatagcataaaaacgaacaggaatctaaaaaacgcacaaaaccctgttttaatggaagtcaggcccaggctagaagatgacaatctacaaacacttttattagcaaaaggagtaagtgcagcatgggagaaagaggggctcctccttcccctcaaaggcatcactgccccttcccaaggggcaggccagcagggaacaagaggaccccagggttgcaagcaggctggaatcagacaaaagtgatccgtgtccgggaagcattgacctgccagacattgagctcctcatattcatccagagccgcctggaactgggcgggtgtgaagccacgagatacacagcgctgctctgcctcagagaaccggacacttcggccccctgagaccagttcacggacggtggcaaatatcacatctgctggtctctgagtcctagctgtctgccccttgtctcctagaagagagtcctttgacatctccattagcctgatggcttcattcacatcttctttctccaccacatccaccattctcagacgtgccagagcagtggaaaggcgcaggatagccagcagggctccgggcagaagtataggtggcatccttactagcccaagcctctcgcctcatctccacgtatgctgctgtgatgtagtcagccagagactctggcaccatgggctgcttctcgcggcacatggctatgtaacgcctgtgggggaaggttcatggggaagctcatgagcttcatgtccagaggttcaaactgggaggggggctgccggctgtgctggtgcacataggtgatgtgctgggccaaccgtaggtcattgtctcggtcgggccggtcctgaatcagccagaggaggtcaaaccgggagagcagtgcagcaggtagctgtatgttctgctccaggctgcggcgagggttgtagcgcccgtaggcagggttggcggcagccaggatggagcagcgggcattgagtgtggtgagaatgccggccttggcaatggagatggtctgctgctccatgacctcgtggatggctgtgcggtcggcctcagccatcttgtcgaactcatcaatgcagcacacaccctggtcagccagcaccagggccccaccctctaaggtcagttctccactcacggagtctctcagcacagctgccgtaagccccactcctgaggagccccggcctgttgtgtactggctgcgaggcgccagtcgatcaatgtatgacaggagctgagacttggccacaccaggatcccccatcagacagatgttgatgttgccccggattttcatgcctcgaggagactggtccacacccccgactagcaggagcagcagtgccttcttcacatcttcatgcccgtatatttctggggcgattgaagctgccagcttttcgtagaaatcctcctctgcaatttgcctcagctcctccctggtgagctctccagccccagactcatcatcctcactcttgttcatcttcacaatccgatgggcttccaggtaggtttctgagagtaaaccctgtaccacctgtcggaacccagtgcgcaggattggcaagaaaataccagtgacgctgacgtggtctccaggctgggcaatccttgtgttctctccttctaccagcaccgtgatactacgagggatatttcccacaggcacctgatcactcccaaactcactatgttcttgcatcttcatctcctggaatttgatgaatctggagccccgtgtctgcagatacagccgccctcctgagcggttggtttggcactcctggcttgggcacatgatcagaggcatgaaagtgggagactggatcggctggtaggtctctgccccacactggtcacaagtgtaagtggccaccaccatcttgggtttgacttcagagacacgagtgacgattccacgcacagttaccaacttccccacagagtcagcccgcacttcccggatcacacgaggcttgttgctgctagggccttgaaaatacagctcaaatctgcgcatgagttcagcagggtactggttctgggggcttcggaccatcccagggtcccgactccgctgctccatcattagccgatgctcaatgtaaacgtccaggacatctttatttaccacttccctctccttgtactgaggcagcagctcttgtacggcatcagcaaagagcttcgcgtagcgcctggcattctcacaaattgagtccaccaactcggggtcatcctcggctgcgtcgtccaggtccacatacagagccacctgttcccgatgagccagccgaaccaactggttcccatacttgaactgcttcttcccgagttcatcatcctggtagaactcttgtaagaacttcttaaccttttccttctctagcgcgtagtccttcagtgccatcgctgccgagggccgtgcggccgcgcttggcgggctcagaggtcttgctcctggggaagctgagaatctccgcgcggtggactgtggccggccaaccgaaattggcgcgaaacgtcgccccccacgtgaccggcgccactgcgtgcgggccaatcggacaaggcggccttcttcacctcccgctagccgcaagccaatcaccgtgcgggccta

SEQ ID NO: 20913 - DNA, 538 bp, Homo sapiens
agcctggccaacatggtgaaaccccatctttactaaaaatacaaaaattagctgggtgtggtggcaggcacctgtaatcccaactactcagtaggctgaggcaggagaatcacttgaaactggaaggcggagacggaagtgagccaagatcattccactgcactccagcctgagttgggtgaatttatctcctcttgaggctccaagataaacctggggttcctgagtttgtcagaaagtgaccttcaggatttctgacctcttttgtgatagtctctgggcctttaggagttgaagagctttaatttcatctcatctgcttcgaaggtggctcatggttgggctatcttcatctaggagagtattccaggccagaccctacttaaccttttctcggcttcaggaatgtcctggagtctatgaatcttccagcaccatcagttcaccgcgtgatggaggctgaggctgtggccgaatcaccgagacccttggaaagaagacacagggcagtcgaagagctaacctcgcgcccccgcgt

SEQ ID NO: 20914 - DNA, 602 bp, Homo sapiens
  misc_feature 596, 597, 598, 599, 600, 601, 602: n = A,T,C or G
acgcgggggactgactccccggggacatgaggtggatactgttcattggggcccttattgggtccagcatctgtggccaagaaaaattttttggggaccaagtttttaggattaatgtcagaaatggagacgagatcagcaaattgagtcaactagtgaattcaaacaacttgaagctcaatttctggaaatctccctcctccttcaatcggcctgtggatgtcctggtcccatctgtcagtctgcaggcatttaaatccttcctgagatcccagggcttagagtacgtcttaaatagctcaataaaacagaagagatttaccctcaaatgaaagaattacatctatactatataacactataaatatttggcaagtgggtgagattattggctagcaattgggaaaatggtttagacctatacaacattatgaaaatcagtttcagagaatttacaaagttaaacactttaaaacagaaaatctagaagaaagtggaactgaatttcttcattttatgcattggaagagtttcctaaggatagaagcaacagaagtcaataaaagaaaaacacatggatttggttacagtgaaannnnnnn

SEQ ID NO: 20915 - DNA, 1339 bp, Homo sapiens
  misc_feature 1, 1333, 1334, 1335, 1336, 1337, 1338, 1339: n = A,T,C or G
nagactcagttactttgattttggttagttaaggtttaaattaaattgcttcaaagattctgtgcctgccagagtagttaggagaaaaaaactcaggggtgattatttattgttattaccctctgtatatctaggcaggaggaagtcagcagtgtgaattcttaagtattaattgtgtatggaaagattgtaagatcagcagtgactagctgtgaattgggcactgtagatctgataattgcttgggaccttaaactagctctaaagaataacattttcatattgacatatatgttatcaaaaggccagaaaaataatagtatgtgtaaacttaaatgtaaatgatagcttttggttaaaaaacaatctttatataatatgaattaaagaaaaaatatttctctattttccttttagtaatgcaatatgggaaaggcaaatcatgttattataggttcctgactaaggggcaacagtggatttggcttcagactcattattatatcacttaccatcagtggaattcaaggccagagtttattgtttgtactcacactgtagtaagttatgcggaagttagggctgaaagacgacgagaacttggcattgaagagtctcttcctgagacagctgctgacaaaagccaagattctgggtcagataatcgtataaacacagtcagtctcaaggaagcattggaaaggtttgatcacagcccaaccccttctgcctcttctcggagttcaagaaaatcatctcacacggcgtctcagacccttcctcaacaccaaccaagatcccgacggatacgagcactccacccaggcagcatttaccagctcatgagaagatggtgcaaagaaggtcatcatttagtagtcagtccataaattcccagtctgtgggttcatcattaacacagccagtgatgtctcaagctacaaatttaccaattccacaaggcatgtcccaggcattgcagatgccgacagtacaaaatatatgaactaaaaaacattacatctagagggaatgacagatgcctaacaataccatgctatattgctgtgctgaagtatgtaagttgaattgtaagcgatgtgtgatctttaatgcacctgaggagtgacggaaacttcaggaggattgttctggccagtccaaagagcctgatgtgaagtgcccaaaagggggatccgagggggggttgagcccctcccctgggtttggttcgccctgggtcaccctaaattggggggttccccccgtggggaaaccaagcgcggcgagccatcaggacatacccttttcacacaacctttcctctattaannnnnnn

SEQ ID NO: 20916 - DNA, 1038 bp, Homo sapiens
  misc_feature 1, 2, 3, 4, 5, 6, 7, 8, 9, 10, 11, 12, 13, 14, 15: n = A,T,C or G
nnnnnnnnnnnnnnnggccttttccaaaacagatgattcatttgcagattaaaatttcaaccatttacagacagcttcaaaagatcacccctggccgctgcccctatctgcacagctgcctctcccatctcctctccctactaagcaacctctttcttctctcctgcagctcacacaatgttcatgagcataccatcaaatacaaatattccaatttttcctgttcccttcacacaaatgtagccttctctctatatactggtctgtactttgctttttaattgttagtaatttttccgcaacaggacacaaagagcaatctcattctttctggaggtccatgcagaatactgccctcaatggatgtcacctatgtgaccagttcccactgatgacccttacactgaaaaccggcttacacaggagtggtctatgatctatgatgtattaacatggacatttcctcttccattatgaatttgtaaagttttgatttccataattctttttttaatcagtgaaaacataaaataaggttctgggagagagatacaggaagccaatctgtggaacttttggtttgggccccagcatcctataaaaatggcactaggatgtatccttaatgtctctggaatctgtggattactgggtgcaaaatgctacctgccaagtggatgggacaacaggactacattcagaattggatctgcagcacctccaggaaagttttgagctatgcttccttcagttcctccatctccttaattgacttcaccttgagtctctggaccagctcaaaggccactacagttcaacgaaggctgggagtttttgtaaagaaatccctagaccattgtatccattggctccagttgactaaacgaacatctcctatggagacccctggactttagccaagctcacctgggccagctaacttacaactcacaaggactctgtagacttaattccagacatgtgggatatggtatatgtgcacagaaacactgtgggaaatccaaagtgaccggacgc

SEQ ID NO: 20917 - DNA, 969 bp, Homo sapiens
  misc_feature 1, 2, 3: n = A,T,C or G
nnnacatacaaaatgttttaattgagaaaaaaattcaaaacagtcacacatatccattatcatcatggttctctgaaatattttcttatacaaatgaaatatttaaaatggaaaaattacatttttcaaatctaattaactaattatttttgtcctgcctttccccacaaggatttcaagacacttattggaatacataaagcatgacagacaatagtataaaataaaaatgggaataaatgttaaaaacaaatattgagaggaacaacacaaaattaattttaaaatgcatagaacaatgatcaaataactaatgagtatgatttgcaaatatttttaatgtaaattacagttaataaaaatgagatagttaaatcaattgctgttaattctccaactagattggaactgcttcagagaatactgttaaagatactctgggaagtaataaacagcaatctcgaaacgttaattcatgtagtaggaatcataatctcattttcacatcattctttgttctttaaatttgaaacacttatttcaaggtctttagaaattcacaacttaatttcttttttttcaaagaactaatttctgggtgagttgatattcttttcaggttgatattcttttcaggtactgcaagggtaccataaaggtactaatgttattaatgtgactgacaagtaattagaaaactggaaattaaattttacacacatttttaaaatcgctacaattaaaaaaattcaagatggttacattatgaatatgaatgaaatgtcattagcgacttcgttaaatgtatatgtaattctatattttccccaaaacccacattttatgaagaatattcatttatttatttatttttgtttttttgaggattattaggacgttgacttaacatttctgtgtcaaaagtcagggaggcccaagttctgagcatacaaacccatgcgtccgcgg

SEQ ID NO: 20918 - DNA, 1093 bp, Homo sapiens
actcaagcaaacatggcaggccaagatctcagtcattcgcccttcaaagggacacgagagctgtatgggggctgtagtctctgagtctctgtggcatggtttgggaacacaggaagggtaccgattaccacaagcaaccatggcaggccaagatctcagtcattcgcccttcaaagggacacgagagctgtatgggggctgtggtgtctgagtactttgtgctgacagcagcacattgtttcactgtggatgacaaggaacactcaatcaaggtcagcgtaggaggggagaagcgggacctggagatagaagtagtcctatttcaccccaactacaacattaatgggaaaaaagaagcaggaattcctgaattttatgactatgacgttgccctgatcaagctcaagaataagctgaaatatggccagactatcaggcccatttgtctcccctgcaccgagggaacaactcgagctttgaggcttcctccaactaccacttgccagcaacaaaaggaagagctgctccctgcacaggatatcaaagctctgtttgtgtctgaggaggagaaaaagctgactcggaaggaggtctacatcaagaatggggagaagaaaggcagctgtgagagagatgctcaatatgccccaggctatgacaaagtcaaggacatctcagaggtggtcacccctcggttcctttgtactggaggagtgagtccctatgctgaccccaatacttgcagaggtgattctggcggccccttgatagttcacaagagaagtcgtttcattcaagttggtgtaatcagctggggagtagtggatgtctgcaaaaaccagaagcggcaaaagcaggtactatatgtatgtgacttccctccccctgccagaatactccttggtcaattgtaggtattctttttggtttaatttttgccaatgtaattaaaaaatggtatgtcatttttaaatttgtatttctttcattacaaataagattgttatgtcagtattgttattggcttttcgtattcctcttaacgtgaaccgtctgttcattgtttttacctgttttcgttttagcaagtagt

SEQ ID NO: 20919 - DNA, 5152 bp, Homo sapiens
  misc_feature 1, 2, 5145, 5146, 5147, 5148, 5149, 5150, 5151, 5152: n = A,T,C or G
nnagtcgaccacgcgtccggcgggaagcagtgggagcgcgcgtgcgcgcggccgtgcagcctgggcagtgggtcctgcctgtgacgcgcggcggcggtcggtcctgcctgtaacggcggcggcggctgctgctccagacacctgcggcggcggcggcgaccccgcggcgggcgcggagatgtggcccctggtagcggcgctgttgctgggctcggcgtgctgcggatcagctcagctactatttaataaaacaaaatctgtagaattcacgttttgtaatgacactgtcgtcattccatgctttgttactaatatggaggcacaaaacactactgaagtatacgtaaagtggaaatttaaaggaagagatatttacacctttgatggagctctaaacaagtccactgtccccactgactttagtagtgcaaaaattgaagtctcacaattactaaaaggagatgcctctttgaagatggataagagtgatgctgtctcacacacaggaaactacacttgtgaagtaacagaattaaccagagaaggtgaaacgatcatcgagctaaaatatcgtgttgtttcatggttttctccaaatgaaaatattcttattgttattttcccaatttttgctatactcctgttctggggacagtttggtattaaaacacttaaatatagatccggtggtatggatgagaaaacaattgctttacttgttgctggactagtgatcactgtcattgtcattgttggagccattcttttcgtcccaggtgaatattcattaaagaatgctactggccttggtttaattgtgacttctacagggatattaatattacttcactactatgtgtttagtacagcgattggattaacctccttcgtcattgccatattggttattcaggtgatagcctatatcctcgctgtggttggactgagtctctgtattgcggcgtgtataccaatgcatggccctcttctgatttcaggtttgagtatcttagctctagcacaattacttggactagtttatatgaagtccccggcttcctctctctgaagtgagagcccgactatacaacctcctaggaaagctgtagaggaaccccttaatgcattcaaagaatcaaaaggaatgatgaatgatgaataactgaagtgaagtgatggactccgatttggagagtagtaagacgtgaaaggaatacacttgtgtttaagcaccatggccttgatgattcactgttggggagaagaaacaagaaaagtaactggttgtcacctatgagacccttacgtgattgttagttaagtttttattcaaagcagctgtaatttagttaataaaataattatgatctatgttgtttgcccaattgagatccagttttttgttgttatttttaatcaattaggggcaatagtagaatggacaatttccaagaatgatgcctttcaggtcctagggcctctggcctctaggtaaccagtttaaattggttcagggtgataactacttagcactgccctggtgattacccagagatatctatgaaaaccagtggcttccatcaaacctttgccaactcaggttcacagcagctttgggcagttatggcagtatggcattagctgagaggtgtctgccacttctgggtcaatggaataataaattaagtacaggcaggaatttggttgggagcatcttgtatgatctccgtatgatgtgatattgatggagatagtggtcctcattcttgggggttgccattcccacattcccccttcaacaaacagtgtaacaggtccttcccagatttagggtacttttattgatggatatgttttccttttattcacataaccccttgaaaccctgtcttgtcctcctgttatttgcttctgctgtacaagatgtagcaccttttctcctctttgaacatggtctagtgacacggtagcaccagttgcaggaaggagccagacttgttctcagagcactgtgttcacacttttcagcaaaaatagctatggttgtaacatatgtattcccttcctctgatttgaaggcaaaaatctacagtgtttcttcacttcttttctgatctggggcatgaaaaaagcaagattgaaatttgaactatgagtctcctgcatggcaacaaaatgtgtgtcaccatcaggccaacaggccagcccttgaatggggatttattactgttgtatctatgttgcatgataaacattcatcaccttcctcctgtagtcctgcctcgtactccccttcccctatgattgaaaagtaaacaaaacccacatttcctatcctggttagaagaaaattaatgttctgacagttgtgatcgcctggagtacttttagacttttagcattcgttttttacctgtttgtggatgtgtgtttgtatgtgcatacgtatgagataggcacatgcatcttctgtatggacaaaggtggggtacctacaggagagcaaaggttaattttgtgcttttagtaaaaacatttaaatacaaagttctttattgggtggaattatatttgatgcaaatatttgatcacttaaaacttttaaaacttctaggtaatttgccacgctttttgactgctcaccaataccctgtaaaaatacgtaattcttcctgtttgtgtaataagatattcatatttgtagttgcattaataatagttatttcttagtccatcagatgttcccgtgtgcctcttttatgccaaattgattgtcatatttcatgttgggaccaagtagtttgcccatggcaaacctaaatttatgacctgctgaggcctctcagaaaactgagcatactagcaagacagctcttcttgaaaaaaaaaatatgtatacacaaatatatacgtatatctatactttccttgattgtgtacttgtcccaaataataccttttttagagggagctgtattcctttatacaaatctgatggctcctgcagcactttttccttctgaaaatatttacattttgctaacctagtttgttactttaaaaatcagttttgatgaaaggagggaaaagcagatggacttgaaaaagatccaagctcctattagaaaaggtatgaaaatctttatagtaaaattttttataaactaaagttgtaccttttaatatgtagtaaactctcatttatttggggttcgctcttggatctcatccatccattgtgttctctttaatgctgcctgccttttgaggcattcactgccctagacaatgccaccagagatagtgggggaaatgccagatgaaaccaactcttgctctcactagttgtcagcttctctggataagtgaccacagaagcaggagtcctcctgcttgggcatcattgggccagttccttctctttaaatcagatttgtaatggctcccaaattccatcacatcacatttaaattgcagacagtgttttgcacatcatgtatctgttttgtcccataatatgctttttactccctgatcccagtttctgctgttgactcttccattcagttttatttattgtgtgttctcacagtgacaccatttgtccttttctgcaacaacctttccagctacttttgccaaattctatttgtcttctccttcaaaacattctcctttgcagttcctcttcatctgtgtagctgctcttttgtctcttaacttaccattcctatagtactttatgcatctctgcttagttctattagttttttggccttgctcttctccttgattttaaaattccttctatagctagagcttttctttctttcattctctcttcctgcagtgttttgcatacatcagaagctaggtacataagttaaatgattgagagttggctgtatttagatttatcactttttaatagggtgagcttgagagttttctttctttctgttttttttttttttttttttgactaatttcacatgctctaaaaaccttcaaaggtgattatttttctcctggaaactccaggtccattctgtttaaatccctaagaatgtcagaattaaaataacagggctatcccgtaattggaaatatttcttttttcaggatgctatagtcaatttagtaagtgaccaccaaattgttatttgcactaacaaagctcaaaacacgataagtttactcctccatctcagtaataaaaattaagctgtaatcaaccttctaggtttctcttgtcttaaaatgggtattcaaaaatggggatctgtggtgtatgtatggaaacacatactccttaatttacctgttgttggaaactggagaaatgattgtcgggcaaccgtttattttttattgtattttatttggttgagggatttttttataaacagttttacttgtgtcatattttaaaattactaactgccatcacctgctggggtcctttgttaggtcattttcagtgactaatagggataatccaggtaactttgaagagatgagcagtgagtgaccaggcagtttttctgcctttagctttgacagttcttaattaagatcattgaagaccagctttctcataaatttctctttttgaaaaaaagaaagcatttgtactaagctcctctgtaagacaacatcttaaatcttaaaagtgttgttatcatgactggtgagagaagaaaacattttgtttttattaaatggagcattatttacaaaaagccattgttgagaattagatcccacatcgtataaatatctattaaccattctaaataaagagaactccagtgttgctatgtgcaagatcctctcttggagcttttttgcatagcaattaaaggtgtgctatttgtcagtagccatttttttgcagtgatttgaagaccaaagttgttttacagctgtgttaccgttaaaggtttttttttttatatgtattaaatcaatttatcactgtttaaagctttgaatatctgcaatctttgccaaggtacttttttatttaaaaaaaaacataactttgtaaatattaccctgtaatattatatatacttaataaaacattttaagctaaaaaaaaaaaaaggaataaaaaacacaaacaaacaaagaaagccaaannnnnnnn

SEQ ID NO: 20920 - DNA, 3920 bp, Homo sapiens
acaatatgaaggtaacataaatgtgtcagctgctgctttatttgatagaaagcggcttcagtatctggaaaaactcaaccttcctgagtccacacatgttgaatttgtaatgttctcgacagacgtgtcacactgtgttaaagacagacttccgaagtgtgtttctgcatttgcaaatactgaaggaggatatgtattttttggtgtgcatgatgagacttgtcaagtgattggatgtgaaaaagagaaaatagaccttacgagcttgagggcttctattgatggctgtattaagaagctacctgtccatcatttctgcacacagaggcctgagataaaatatgtccttaacttccttgaagtgcatgataagggggccctccgtggatatgtctgtgcaatcaaggtggagaaattctgctgtgcggtgtttgccaaagtgcctagttcctggcaggtgaaggacaaccgtgtgagacaattgcccacaagagaatggactgcttggatgatggaagctgacccagacctttccaggtgtcctgagatggttctccagttgagtttgtcatctgccacgccccgcagcaagcctgtgtgcattcataagaattcggaatgtctgaaagagcagcagaaacgctactttaaagtattttcagacagagtggtatatactccagaaagcctctacagggaactcttctcacaacataaaggactcagagacttaataaatacagaaatgcgccctttctctcaaggaatattgattttttctcaaagctgggctgtggatttaggtctgcaagagaagcagggagtcatctgtgatgctcttctaatttcccagaacaacacccctattctctacaccatcttcagcaagtgggatgcggggtgcaagggctattctatgatagttgcctattctttgaagcagaagctggtgaacaaaggcggctacactgggaggttatgcatcacccccttggtctgtgtgctgaattctgatagaaaagcacagagcgtttacagttcgtatttacaaatttaccctgaatcctataacttcatgaccccccagcacatggaagccctgttacagtccctcgtgatagtcttgcttgggttcaaatccttcttaagtgaagagctgggctctgaggttttgaacctactgacaaataaacagtatgagttgctttcaaagaaccttcgcaagaccagagagttgtttgttcatggcttacctggatcagggaagactatcttggctcttaggatcatggagaagatcaggaatgtgtttcactgtgaaccggctaacattctctacatctgtgaaaaccagcccctgaagaagttggtgagtttcagcaagaaaaacatctgccagccagtgacccggaaaaccttcatgaaaaacaactttgaacacatccagcacattatcattgatgacgctcagaatttccgtactgaagatggggactggtatgggaaagcaaagttcatcactcagacagcaagggatggcccaggagttctctggatctttctggactactttcagacctatcacttgagttgcagtggcctcccccctccctcagaccagtatccaagagaagagatcaacagagtggtccgcaatgcaggtccaatagctaattacctacaacaagtaatgcaggaagcccgacaaaatcctccacctaacctcccccctgggtccctggtgatgctctatgaacctaaatgggctcaaggtgtcccaggcaacttagagattattgaagacttgaacttggaggagatactgatctatgtagcgaataaatgccgttttctcttgcggaatggttattctctgaaggatattgctgtgcttttcaccaaagcaagtgaagtggaaaaatataaagacaggcttctaacagcaatgaggaagagaaaactgtctcagctccatgaggagtctgatctgttactacagatcggtgatgcgtcggatgttctaaccgatcacattgtgttggacagtgtctgtcgattttcaggcctggaaagaaatatcgtgtttggaatcaatccaggagtagccccaccggctggggcctacaatcttctgctctgtttggcttctagggcaaaaagacatctgtatattctgaaggcttctgtgtgacaggaaacccaagcctaagaaacaattaagtggttctcatctctaattaactgtgaaaccatttaatccaaacatgtaagcacacactcacttattaagtcacatacttttctaggtgctggggattgagaacgaatcgatgtaagattcctcctttagggcagagacagaccactgacaaatacacagatagacaaggaatttcccatggtaaaaagggatatcagtaattagaggaccgtgagactcagagatgtgtgtgtgtgtgtgtgtgtgtgtgtgtgtgtgtgcgcgcgcgcgcgcacgtgcacatgtgtgtaggtagatggagggggtgattattttgggtggtcagggaagtgctcagtgagggaagaacttgtcatgagaatctctgagcgtgccaggcagactcggatatttttataaatttttaacatggccacttgcagaagagcttgaatgggacgtgcagcgagaatgggaaggatggagcaggtagctcatctggccttgtaggtgccgggaacgggcaagacatgttttgaaatgtaagatcacagactgttttttgcaagaccacattatattactttattattttctgctttttcttttaacgacattagtgtttttgatcactatattttaaaatgctttttgtgagccttttggttatgtggaatctgttccttagctctgattttttattcttatggagcgtcttaggttactacatgaaggtaagactgccacagtcccccagggaggcacactgtgttttactgattgatttgaagatgatagagagcctagggggatgagtctattggactcaaaggttacattttgtttttccatttaatttaataatcaacaaaacgacaaagtcagtttaatatctttcttctgctgagtcttcaggatgttagctagtctttcaaaagccattgctacaaaagtgcaaatttctcatttcctgtgggtctctagaaactctctcaatatttaaagccaaacaaatccatcttttctgagagacagaaactaaaaaattcagagttaattcactattaaaaacagcaaggccctgctatttcccaagaataaagaaatttaaaattctcattgtaagaagtatgaacttgaagctagaattggtttatttctggcagctacttacaatattaagaactttactttttaaatttgagacaatttcacaggaaagcaagaaattagtctattgtgaaatgtttttacaactaacttggaatatactgcaaatcactagtaagtagagacacatttaagataaaatgattaataaaacaattggtaattctgaataaggatctgaataaatccagatcacagactgttcctttaccaatatgtaaaagaatgtgcaaaattagtaaaaatatacccaaaaatttaccagcaacagagaagcaaagaatggagttcaaccttacactataaacatctaatagatatgtatgaaaatttaaaaactagaaaaggttgggcatggtggctcatgcttgtgatcccaggactttaggaggccaaggtgggaggattgtttgagcccaggagttcaagaccagcttgagcaatatagtgagaccctgtctctacaaaaacaaacaaacaaacaaacaaataaataaataaataaaattagctgggaatggtgatgcacacctggagtcctagctactca

SEQ ID NO: 20921 - DNA, 1482 bp, Homo sapiens
acgcgggagcagcaggaggaggcagagcacagcatcgtcgggaccagactcgtctcaggccagttgcagccttctcagccaaacgccgaccaaggaaaactcactaccatgagaattgcagtgatttgcttttgcctcctaggcatcacctgtgccataccagttaaacaggctgattctggaagttctgaggaaaagcagctttacaacaaatacccagatgctgtggccacatggctaaaccctgacccatctcagaagcagaatctcctagccccacagacccttccaagtaagtccaacgaaagccatgaccacatggatgatatggatgatgaagatgatgacgaccatgtggacagccaggactccattgactcgaacgactctgatgatgtagatgacactgatgattctcaccagtctgatgagtctcaccattctgatgaatctgatgaactggtcactgattttcccacggacctgccagcaaccgaagttttcactccagttgtccccacagtagacacatatgatggccgaggtgatagtgtggtttatggactgaggtcaaaatctaagaagtttcgcagacctgacatccagtaccctgatgctacagacgaggacatcacctcacacatggaaagcgaggagttgaatggcgcatacaggccatcccgttgcccaggacctgaacgcgccttctgattgggacagccgtgggaaggacagttatgaaacgagtcagctggatgaccagagtgctgaaacccacagccacaagcagtccagattatataagcggaaagctaatgatgagagcaatgggcattccgatgtgattgatagtcaggaactttccaaagtcagccgtggaattccacagccatgaatttcacagccatgaagatatgctggttgtagaccccaaaagtaaggaagaagataaacacctgaaatttcgtatttctcatgaattagatagtgcatcttctgaggtcaattaaaaggagaaaaaatacaatttctcactttgcatttagtcaaaagaaaaaatgctttatagcaaaatgaaagagaacatgaaatgcttctttctcagtttattggttgaatgtgtatctatttgagtctggaaataactgatgtgtttgataattagtttagtttgtggcttcatggaaactccctgtaaactaaaagcttcagggttatgtctatgttcattctatagaagaaatgcaaactatcactgtattttaatatttgttattctctcatgaatagaaatttatgtagacgcaaacaaaatacttttacccacttaaaaagagaatataacattttatgtcactataatcttttgttttttaagttagtgtatattttgttgtgattatctttttgtggtgtgaataaatcttttatcttgaatgtaaaaaaaaaaaaaaaaaaaaaaaagatgcggccgcaagctta

SEQ ID NO: 20922 - DNA, 1114 bp, Homo sapiens
  misc_feature 1, 2, 3, 4, 5, 1108, 1109, 1110, 1111, 1112, 1113, 1114: n = A,T,C or G
nnnnnacgccagctggcgaaagggggatgtgctgcaaggcgattaagttgggtaacgccagggttttcccagtcacgacgttgtaaaacgacggccagtgaattgtaatacgactcactatagggcgaattgggtaccctgatcttcctgcggctgaaccgcccggctgagccgacattgccggcgtcttggcgattcggcccgacgagctccgctttcgctacagcatggtggcctactggagacaggctggactcagctacatccgatactcccagatctgtgcaaaagcagtgagagatgcactgaagacagaattcaaagcaaatgctgagaagacttctggcagcaacgtaaaaattgtgaaagtaaagaaggaataatctaccctgactaaagcttgaaatgctacatttccaaggtgaagatgtgtgggcacatgttatggcagattgaaaaggatctcattccatgggaaaaaaaaaaatcctgtcttgtccataatttgccaatgtcaataattgaaatatggttcactgttaacgaaccaacaaccaaaaaacaaaactccgcggggcctcttatattgtgtggggtctgcgatagcaagcggggttatgcgaaaggggcccatgtggtctcactagcgtgctccccctgaccccaagtttttttgttcaccaacgtggatacatttgccgggctccccctttgtagtggagcccgatataaatccgggattaagcccctgtttaaccctgccttttatactgccgcgaaatgagtagcaagggagactaatacaatagaccacaaagacaaacacgacagggacactccacacagacggtaaagcaagcaccgtcagagcggcagaaaacactaaccacgacgattagcagaatacgacgatcgccacgcccgacaagaataacaagctaatcactagtacgaccaccacagctccccaacaatctagagcagataacaggcaagaactcagtcgagtagagagactaagagcaacacccgacgagaagacagagagaagaacatacaataagacagagcagcgaacacagccgaggaaaaacacacctactgagannnnnnn

SEQ ID NO: 20923 - DNA, 380 bp, Homo sapiens
acttcacaatatattcaagttaatcttttacccagtggtgccaaattcttctgagaatagctaagagggaatttcaggctttccttgactgtgggcaagtcaaatactttagtctcttccaattatcatatgtaaggagtagaatatttaaaataaaaataaaaataaaaaaaaatacacgttaagttcattggaggactgctactagatctaaaatataagcagtaaaaaaactacatatatgtgattatatatacataaaatgtgtgtatttatattacatatatatgcagtgttcattttttgacatttctagttatcagattttttttgccagtgataaatttggaatgagtgacagaaggaaattaatatcaggt

SEQ ID NO: 20924 - DNA, 1213 bp, Homo sapiens
  misc_feature 1, 2, 3, 4: n = A,T,C or G
nnnngatgtactgcatgctgtggcttcgctttttaattttttttttttttttaagagagagaggagccactcttgcccaggctggagtgcagtggctaactgcagtctctcactcctgggctcaagggatcctccagcctcagcttcctgaatagttgggactacaggcacaagccactgtacacagctgctttgttatcttctacatatataccaaagggataagttaggaacaccagaaactcagtagtaactcactttaaccttgcttctggggctccaattcaagtgatgctcaatttcaaggtacaaggaaaaccatgagaatataaagtcataatgccatttccactcagatgaaaagatttatctatctttagatactcaaaattattcttggcattttagcacttttggtacacatttcctgatgtaggaaatagtaaaatttcagagcctatggcattggctttcaccacctatgcaattttctacacatctgaaaattaccagtttatctaactccttaaatgttcctctcttcaacaacaaaaaacacaaacaaaaattgctggaagaaacaggaagcatccaggtccaaatgacagcataacagactatgaagaaacagggcttaagtgcccatctagaacaagatggtctagattacaataaggaccccatgggacagaacatcaaaacattcaactttcaagtaaatgtcttggaagtaaacatttaaaatttataggacttcctctggcatgtaggtatgatattagaagagtttcctttgacaaaggacaatgacccaagaagtaggtttttttttttttttaaaggagagacagtctcactctgttgcccaggctggaatacagtggtgtgatcatagctcactgcagcctcttttaactcctgggctcaagcaatccttccaacctcagcattctgagtagctgggatcacaggtgctccccatcacaccctgctaatttaattttctttgtagagacagggtcttgctatggtgcctaggctggtctcgaactcctgggctcaagtgatcctcccgcctcagtctcccagtgttaggattacaggagtgagccactgcctctgccttcaggtagcaattttattagcaaactataagcctaaagtaatagttaaaattctcactgtgatattcattactaacccctgaacctgt

SEQ ID NO: 20925 - DNA, 1048 bp, Homo sapiens
  misc_feature 1, 2, 1047, 1048: n = A,T,C or G
nnagccgaagatatctacaagtactatcgctgacagtcaggactaaatagttcactcagcagttataaagtaatggtcactggaagtttactatcttctgaagcggcagcctttgctgctacggttcctcaattatctgccctattggaaatgggaaggaagagagaggttattagcttttcatagaaactacgttggaactcctattcctgttttgaccagatacctgtttgttacacattctggtgtatgcggtactccacgagattagaagtgcatattcaactgcagaaaccggaaccagcatggggagtctaaatgttaccagataaggtttttagggcattttggttatagtgctaagcatttttgggaaaccgtaaagagggttaggataggtggtgggaatagaggctgacagcagttttcagatgtccgtgtgttcatgcacgcagtatggcccaggtaagttcaaaaccttattcttaggctatttcgatcaaccctgccaggcaattttaaattcttggtgatgtagggcagggacactgtggatggctgaggaaactctgggctctgctggctaaccagcttcgctccactctgcagaggctgtctcatcttttgtgatctgcaaattcttgctttggtcttcatgtgaactctcagggaatttgagcagttcagtctgttaccagtgttgtgagcctacctggtcattttagctgttgcttttgtaacgtaggcttttggttgttcctcagttagaattgtgggactttcctgaaccttctggttcttgtttcttccttgaaagtaactgaatcctggggtaattacacaggatttgccatagcggaatcaagcaattggtctatcaagtatgctggcttgtccccggcagtggctaatgctgcttcttcttgtcaggcaaacaggagatttcacaatttagcactgagatctaaagatggtaaccaggtctcctagtttacccttcagctttgacgcagactacctaatttcctaaggtcttagcatccaccnn

SEQ ID NO: 20926 - DNA, 867 bp, Homo sapiens
  misc_feature 864, 865, 866, 867: n = A,T,C or G
cgtacttcgggaaaacaagaactgtgcttcaatgtctttataaccacactatatggctcattgtaaatgttcaacaaatgcttgatgaatgactcaatgagcaaaattacgcgaaaacacttgctaacctatctctttttcatcaagtatgtagcaaacacatgcccacacctggcaccagaaactataagtgctatctaaatatcaacattttatttggcctgtgcacttatcagctagtggaaagcataaattattccaataaacagacgggaggtgtggaggcaaaatatcacacctaggtctttcaaaactaatgactttcaaatcaaaaactgcattacctgataaagacttaacttcatgattatttcaacagggactaaaaaaattacaggaaatcttggaacccagctatctggccaaagacactaattttagagatgaagaaactgaggcccagagaagtaatcaatcaaagacacacagttagtggcagagttataattaaaactcaggatctctggccctacactagtttttgttcttctacaccatgttgcctttgtatctataaaatcaaatcttttatccccaactaaaaaaaaaaaaaaaaaaccaaacaccttagtcacaattttgttgtctgcatcccaatgggaggaaaaagtagtaagccatcatcttattttgtctagaggtaactttccaactttgctcttggtttcatgcctaaccttctgtgtgcagaataataaagaaaaagctaagattcataaataatcctgataaagccatcaaaatttatcaactaccaaagaagcattacaatgtctttccaggatgcagcactttccggacgcnnnn

SEQ ID NO: 20927 - DNA, 548 bp, Homo sapiens
  misc_feature 1, 2, 3, 4, 5, 6, 7, 8, 9, 10, 11, 533, 534, 535, 536, 537,538, 539, 540, 541, 542, 543, 544, 545, 546, 547, 548: n = A,T,C or G
nnnnnnnnnnnccagtatagtagtagaaaaactcttcctttaataaagtttaaagtagataagtttttaaaaccatactgttttttaaaaatgtactgtttttaaaatcctaatttttatacttagttatttttagcagtgtcatattgaattctgttacgagtttcatggttacttataataaccagtttcctcattacatagtagaatggtatttttccaatttgaactcttaattttaaattttcttctccctttaaaattctgtgattctgtttggtcaaaagggtctgtggaaataatacttgatatgtttatatagtggttattcaaaacttactcatcccccccccgctgacatctgatgagatatagttctagagccattttttatttctggactttagtcttggatggatgaaaatttgatccgatttcaggaaagaaaaggattataaattagaatccataccatggtaaaagaagtttgttcccccacgcccaatcgccacggtaatttttgatcatttaannnnnnnnnnnnnnnn

SEQ ID NO: 20928 - DNA, 1217 bp, Homo sapiens
  misc_feature 1212, 1213, 1214, 1215, 1216, 1217: n = A,T,C or G
cgcgtccgatacatttacctgagaaaaagtatttagtagtttgagtagttgatctgcaaaaactttaactttaattaactacatttacctgagaaaaagtctctgagagcacttcattcctgttttagttcgtgtaaattctctgagaatgttctggagatagataactcatttacagtggtttctattaactaattaaagtacccatgattttttccttttctgctcagggatgatggagatttccttttaccttctgaggtagaattttttaatggggaaaataggccttttaaatattattgccagggtctgcaatataacttaaaattcctgtacatactgcaaatatttctttaaattgcacaggaaaatgagcgaactttttatttcttaatatctttggcaaaaaactttaaccagtaagcaattttataaccctgagggatcatcaaagatactatcctgattcctggtaagggaaaaatatattatttccttataacaaggcaaggagaaatgctattttattcctgataatttatataactagaataatttttttcctttcttttatggacctaaatctgccaatggggaatttgtgcatgaaatatgaagttactttttatagataatcagtgcttttaagtccctaaaaggctcctgctgaagtaatgatgatgttaataataaaagcctttgaaaggctgaaaacctacatagtggtaccatagtatttggagcttctataggagtggagaggggcagctcattgttgagagttgcatgctgaacctaatggtcagcaatgaaataaatacttgtagaatgttcacttcagtgtgaagtttgtatctagttaatttatatacatatatcctttgtagatacttctatctaatcttgtgggctaattaagaaataagggggtgggggtaactgtcaacaaagggagaagaaacggtggttacagaatcagcggcagcagaaaaattagagaaccagagtccaatatcaaccacaacctcacaaaacttgggcggcgcctggccccagaaaagcttttaacaccatggtttggcccgcggcccattgtttctataacgtggccaacggttcaacgaaacctggcaacatggccggtcccccaaaaaaacgcgggcacgggcttgaaaacccagggttgggctacggctaacgggcagcaannnnnn

SEQ ID NO: 20929 - DNA, 781 bp, Homo sapiens
  misc_feature 780, 781: n = A,T,C or G
tgaagttgttctggactgcctgttatagctattaaatggaaaccccagaattcatcctgaatgtctctgaatgggaaaagtcacatgcgttaatttaattcagtataaaatttccatgttctcccacaaggaggatttcagcagtgtcttcccagcatgaaaccatgtcttatcactccaccagattcagaattggtactaattctgacagaagctgaaactaaagcctatgttttctttagtcaacataaggccttttttcagagatggtgtgaattaatagtttaaaccaccaaaataaaagaatagacaagtattttcttaacatatccatttccattgctagagctgcggtgatcagcagaagcatctgcctggctgtcaatatcaaggtggatccaggctgttggaactggtggatccaggggttggaacggaggaatactaaaaatgagacttggaacttggaaggcctacaccacgagggccaattctgccataagccctattgcccagatatgttacataaaacatccagatattacagtgaaggtcggtgtgtggccagacacagtggctcacaattgtaatccagcactttgggaggccgaggctggtggatcacttgaggtcaggagtttgagaccagcctgaccaacatggtgaaaaccccatctctactaaaaatacaaaaattagctgggcatagtgacacaggcctgtaatctcagttgcttgggaggctgaggcaagagaatcgcgtgatctgggagcagagann

SEQ ID NO: 20930 - DNA, 1346 bp, Homo sapiens
tccccacccttgatataaccaaagaaatgtaaattaaagtaaccttttatacttgctaaggtagcagaaaggggaaaaaaccctaccaccaagtaatgttggcaatgccagaatgaaattggtacattcattcatcgtggagtaggaaaaaagccttaaaacttaaaatgtccaaaattaaaggagtgtctattagatatgtagaaagcagtctaataaattatggggaaattatgaaattatacgtcatgtgaaaatacagaataaataggaacttactctataacaactatgtataaatatatattatatgaaataagcaaaaatttaaaaggttgcctaaggtggtaggattttagatgacttataagtagctttagtaacacatcttttaaaaattctgagacttccaaattgaactagaaaaaaatactttttattatttaaaacttaatttatctgtgtcatgttttaaaaaaaactggctaaagacctgactttcgatgtcctctttttctatatcttctattccttctgcctctattaattcatgagctctcttgttttcttctgcagagagtaactccttggaatgcacattttcttcttcattttcaccaaattcttcagagtcctttagttcatcatttccatcttgctcatgtgcctcttgattctccaattcacagtccttttaatggtaagaaaatttggtacaactagaggcaaagtagtgtgggctatccaccaaacgtttttggtaatttacacctttaaatgtgtcaaatttgatcatattttaatattcccaaagttcattcattttaccttatatatttactgtgtctttaaaaataggtctaataccaagatcatcaaacacgaaatctgagttctcaaatttctcacactaaaatgcacactaatcaaattgctgctagagatgctctaaattcccagttatttaatatttaccaagccagcttctagaagctgtccaaaaaatacggcttcatttttccatgtgccatatgttgatttaacttcaaagacttcggaagtcttatacattaaaacaaagtttatttctaataataaagaactcccaactgctgcatcaatgtctgttcttgaaaaaatatgcaaataactaattgaaatgtatttgttttgaaatctaccactgtgccaaatgtcaattaggaagaggaacataggttgggattggatctgcctgtccctcaaagtttatgaatatatggtacttcagtgaaaacaaaatcagcaatctgcttaatttcctgattaaatgaagagaaaaggggtgaaagcaataaaccggacgc

SEQ ID NO: 20931 - DNA, 453 bp, Homo sapiens
  misc_feature 1, 2: n = A,T,C or G
nntactggtggagttgtggttcgcccccaggctgtcacagagcagtcctacatggaaagtgttgtgacttttctgcaggatgttgtgccacaggcttacagtggaacacctctaacagaagaaaaggagaaaatagtctgggtcagatttgaaaatgcagatttaaatgatacatcaagaaatctggaatttcatgaaatacatagtacatgaaaccccagatagactataaataattctaaacaaacaagtaggtagatatgtatgtaattgcttttaaatcatttaaatgcctttgtttttggactgtgcaaaggttggaagtgggtttgcatttctaaaatggtgacttttattctgcaagagttcttagtaacttcttgagtgtggtagactttggaacatgtaaattttttgcttgtaatgttatcctgtggtaggattttggcaggt

SEQ ID NO: 20932 - DNA, 296 bp, Homo sapiens
  misc_feature 293, 294, 295, 296: n = A,T,C or G
acctgaggcctttctgtgcagcttagcattgccagaaggctatggcctcatagtagtcaaactactaatgcagtggctcagagctccaagtgtaaatgttttagtgaacaaagtggaagttgcatcatcttttattacccagacttgtatacgacttagcaccgcttctgctataatccattactcagagaaatcacagccctcctagattctataattaaggaattttgacttcatcttgttggggaataacaagggcacacttacagagtagcatatgaagctggagatannnn

SEQ ID NO: 20933 - DNA, 594 bp, Homo sapiens
  misc_feature 1, 2, 3, 4, 5, 17, 458, 459, 460, 461, 462, 463, 464, 465,466, 467, 468, 469, 470, 471, 472, 473, 474, 475, 476, 477,478, 479, 480, 481, 482, 483, 484, 485, 486, 487, 488, 489,490, 491, 492, 493, 494, 495, 496, 497, 498, 499, 500: n = A,T,C or G
  misc_feature 501, 502, 503, 504, 505, 506, 507, 508, 509, 510, 511, 512,513, 593, 594: n = A,T,C or G
nnnnnccccccctcggnagtacttctagaattaattaacgcgggtgaatgggcaagatccttgaaaaaaaatcagtgtgaaaagggttcagttatataattagggagaaagaatttaaattataataataatatctgagttttctattatgtcctaagaagtgtacaacatcattataatccacatcattaatcatcagggaactgcaaattaaaaccacaatgcgatacctcaatgcatccactagaatagctaatatggaacctaggaatcattgttaaatttattgaagaagttaacggggcataattgctgggaccaaaactagagggaatggctggatatattttggaaagatgtgggaaagctgacggcgtgggcatcggtgactatgacaatagtaagaggaaaagaggctactctttctgtgctcactcatgtgccaagcactgtgcctnnnnnnnnnnnnnnnnnnnnnnnnnnnnnnnnnnnnnnnnnnnnnnnnnnnnnnnnccaaagaaaacacattcagaatagaagcaatggaataaagaaccactaaaataattatcaagactctagatagggaaaann

SEQ ID NO: 20934 - DNA, 796 bp, Homo sapiens
  misc_feature 793, 794, 795, 796: n = A,T,C or G
cgtccggatgtttctggcatctcaggtatgctgatttcagcagctgttttttctatatggctagttttttttctttcactctctctatctttttttttttttttttttttgtcctcactgtgttgccatagtttcttaaatggtcccttgaaccctcccagggctattttggtttgtacataactatctatatattttttttctttgggggagtgtgtagagctaaaggctggtatatgctgctcctgctccccgaaagtgacattattcccctaagctaatatttcaggctttcaatttattcgtggtttcacctgtttaaacataagtagaaattactttttctctccatatttagatttgatctatctactttaattgctaatagtgtcttagtcatagaatagattagttagaaaaaagtgtttttgacattataaatgattctttcaatttgtgtctaaaagtggaaaatactagaaagcttaacatttattattgtattcagaccagtatttcctccagatgacctttattacaacaaagataatttaatgaagatctctctaatggtaaagctgatggctttgtgctattacaatatccttcaaataaagtgacgatctggtggaaagaacaactaaagcaaggattaggaagaaaacagttaataccttcattttggtctcactctgcattaagagttttcattgtgttaaggatttattatacattaagtaatttaatgttcatttaataataaatggatcctattaaatatgatttttaaaannnn

SEQ ID NO: 20935 - DNA, 431 bp, Homo sapiens
  misc_feature 431: n = A,T,C or G
acagctcatgacaggtctggactcaaagatgcataaagtggacaaaatacaggcaagacaaattctgctgtcaagaacctgctgggctcctctcttggggggctaacagcgcagctaggttgacaaggcaggaatttaggcacaagagaattgatagccatctactaaaactagagtttggggtggggactctgtgccatgaacagggcagaaacccaagtcagaaccaaactgatgctggtagatgccttccattcaatctccttcacctcccgattacagcctgcaatgagacggaccagaggtggagatgtaggcacctcggcacgtcttcattgatttgctccttcatttagaaaacatcctatggctgccacctcttgccaggcaccaagaactagtggagatgacgatgacatagcacagcagan

SEQ ID NO: 20936 - DNA, 2888 bp, Homo sapiens
  misc_feature 1, 2, 3, 4, 5, 6, 7, 8, 9, 2886, 2887, 2888: n = A,T,C or G
nnnnnnnnnaaaatttaatgtggtaagatcttggttaccactactcttttgtgtaattggatcgtgtgtctcctcttatgccatcttcgcattgccttttcctccatgcagcgtctatcttgcgagaagtccgtaacttgaacatccttacgtagttttctgacgtacgaattatccctggattcggcaatacgcacactagaggaagtcgtgctacccccgcggagttgtcgtgtgttctggattcattccggcaccaccatgtcgaaggtttcctttaagatcacgctgacgtcggacccacggctgccgtacaaagtactcagtgttcctgaaagtacacctttcacagcagtcttaaagtttgcagcagaagaatttaaagttcctgctgcaacaagtgcaattattaccaatgatggaataggaataaatcctgcacagactgctggaaatgtttttctaaaacatggttcagaactgcggattattcctagagatcgtgttggaagttgttaatatctgctacttggaacatacgattgcctttcagaataaatattggtattttttgttgttgtaaaattgaaatcaggcatttaacatactatgaaaacaccaggagtcaatgattaatgaaaggtgactcatctgtccctttttgttgtccatactcttcctatgaagagggaatgcgtatgaattaaggctactactgtcacagaagatcatagtctttgatgctacctcacaacacaaacaggtagttcgttgggggcaaatgaattagccaactgttaactggaagcttttgataatttttttttttagaacaatttggaacattaaaatttactgaatcgtatatattcatctgagataaaaatataaaaagaattatggaccctggatggcaatttgcttgatagcatctgatttgcagactcataatttgatttttaattaaatatataggttatgatgaagtgaatagacatatcagtgaacagttaactatattaaatttttatcatttactttttttaagattcagacctcagttatataaatttcagtttaatatcaaccaaaaaattaaaattttaatctaacccttatgtgtataaattggtgtcccataccagcttttaatggtggacctatagaatccagtacttttaatggtgggaatttacagtagaagcatcctttgctgagttatacattcctttatcaatctcttttgatacaacatttaaaacaagtagcttcaagaaaccactggtgttttgaggatagtatttctaaatagcattcaggaacagagtattattgcacagatctgaagatcaaaaaaaagctcaaggaaatacagatcggaagtgctgatgagttatatttattgaaaacccaacttttaaggaagtgctaagatcagtcacccatgtgaataagaagccaggaaaggaaagatggggaagcccagatcaccaggcttctattaaggaggaaagcaacagaggaaacagtgaaggggaacagaagggggtagcaaagtgttacagaaaagcggactggatagacaaaactgcagaaggtgtatgttggggagaactgaaagggaaaacaaaatacttgacatagtcttaagtagaagaaggcagttagagaaaacaaagtatctactggccttgtcaacatacagacttcaaaataccccttatgagaatccaaagaatgatgtgtgtaagggaagattttatttgcccttccggaagaaatcagtatctatgcaaatcttgaaagacgaaatcaaagcccattaatgattcagaatcagtgcttgacctcctgtattctgaatggtgaactctggaagcagggattgtgtctggctctttttagagctggaagtgtagtggctttcattaaatacttgctgtaaagtctttctaagaccaattattatcttagcatgtttcagtatcttctctatcataggccctaagttcattgggggaaaaaaaataagaagattcaacagaatcagcatttgaagtgtaccattggtagttgtttatgaaattaccagatattcataaatgtgacaaatgaacagcaggattatgaattatcaaaggaaaaagtatttgctgaggtgaaaaaatctgatgtttgaggaagtttttatttttatttatttgttttgttttttttttttttgaggcagactctctgtcgccaggcttctcctgcctcagcctcacgagtagctgggactacaggcatgcaccaccacgcccagctaatttttgtatttttagcagagacagggaggaagtttttatttttataaacaaaatctgatgttcagaggccccgtttcttacaataaatgttgagtcttagttaagcaggaatttatgaacacccatttcctgactttttgctttaatttagatttttctccatcctgtttctagcacaaaaatttgcctgctgtgttacaaaaataaatttatgttgtcctgtgccataaagtgatatatttaatatttttattctttggttttgaacattgtaagttcctaaaaacattttattaaacaagtagacattttgttattaaaaaaatgtgatctgtaatttctttgtgcagaatgatttgaagtattgtattcagtttacatgcattattggtttataattaatatctaatgaaaatacatgttgttatattgtcaaaaaaaaaaaaaaaaacagcaaaaaaaagacaaagaacaacaagcaaaatatcaagaaaaaaaaaaaaaaagagaaaaaagacaaaaacaaacaaccaacaagaggacagagatcacggaaccgacagaaaaaattaaacannn

SEQ ID NO: 20937 - DNA, 3130 bp, Homo sapiens
  misc_feature 1, 67, 73, 3130: n = A,T,C or G
ncatgagcctgtaaggacaaatggcatatttgggcatacctgcttgactctgtaactacttttttanaatcanaattgaaaaggtattaattgtttctggctttttaattttttttttagagacaaagatgaacccagataggaaatacagtttttatgttttctacttactaaaatattagcttcttctaaatattactttatttgtatttcactaaattccaaagcaaaaatcagatatctgagatgaacaattttgaatgggttaaggtaggagtaataagcattgtgttcactcatacataggtgagggaattttatttatagcgagaaatataaaagtattttgacttactcttttttcaaggagtcgctaggaaagggtagaagaactgagaataagacatctagattccatttctggtttatatgtagctcttttgcctaatttatatataattttgtcataagataagtccagtaactgtcctgtcttagataacgtacagaggctgaagtgaccaaagatccattccttattacttttctaattaaaagaagagttagctagatttctagtagtagtattctagatattgataagacattattcctaatgccaactacaaatattcaactactcagaatgtatttaaaaaattgtttggtacagcattaatgttggtgattcctttctcccatcttatttcccttcccttctattctttcccatgtatttcttttgcctaaaagaatattggtatgattctcatttgctactttgagtatataactccatcagactttccagagttcttcagggatggagctcaaagtttacatttttccatatatgtctttttttttcttgacctttttccaccctgtaatttccccttgacttacccactgccctccccaatctgcaacagtgacagtttgctgcctcaaaacagagcattcaaatgaattcgcttagccaataacttctgtgaagttgccttttctaatggtgttattactcagtgatgcacaaatgtggtatttgccctactggtaggcaaacaaaggtctggttaagaatggtaacctgctgttttctttaaaggagagccaaagacttgtgctttactctgttttggttttgggggaagtagtagccattttgatcatgaaaccttttagtatttgtgagttgattgtactgtgtaagtagatttatctaaagttaactgttaaagttagctagccttataaaatgtaaaagtaatgaaaattcatcagtttctctaagccagtgaatgtcgtcttttgtaatattgtgtataagcatttgtgcccaccccagcttctgctatcactgtggtcaagtcatgggtctgagtaaaagaattcttgagtatgtgactggtgagaaataactaactatagtcagtacatgtacagattgttaaaattcaagacaaaatactttcactaaaaaaaaggattcgtctcagtaaagaagtattcagttgctgtcacttacatacaaatggtggtgggtagcagtctcaccatttttctactctctttttgctcgttttaaataattgagtaaaggttttatttgtaaaatctatctgtaaaaagcacctgtaacgatttatatgtcattgaaaggaatggcccagttactttttaggagagattaataacctacctggaaattaactgcagtgtttacttagattttttccccctaataagagtctaagtgtgttaaatttttaactgatgatatggttacagtgttgcaaggtgatctcttcccctgaaaaatctgcctatccttttaagaaaaattagacctacttaactaaagcaaattttactttcatcattagcacctaaacaagcaagcagtctactactgtcatcattttacctgagtgcccattttgctgatccacattcatacctttctaccttggacagctatgatttttatatttatttgttgcttcagctcaggtttatgaaattttcctgctgaaatgacttattgggagttgtaggttgattatagttactattaaacattttctcaatttagcttttctgagccacttcaagaagaaagctgtttttgtcaaaaggtactattaattgtagcaagtaaatcttaagatttgaatttttaagattttatttctgtgttcactaaagatctttccacaagtaatagattataattgataagtaatactagctatagtgttaataaagagtaagactatcaccaccaggaataagtaacaccttttaataataaatctattcctaataggtatgttttcaatactgcactgaacaaagtgggtaaagagccctttgaaatcttattgtaataaagggacttacctcaccactggaatccttgttttcagagcctctggattttcagccaaacactgaatttctcctaaactttatccctgaaacatccctagagaacgaactttattttcacaagaaaataaggcacaataagggggaagaacttaaacctcaacataatatcgtgtccaaaaatgtgtatttagaaaaataaaatcctgtggagtttgttatcctaatgtttattttatactagataaggtgacttgttttcttgtattgaggtcttactgtttcagatttgtttttgtttctgttctaactctaagcagacagagctcacaagtctttggcatccattttaggttgtacactcagagtcatcttataaccttggaaactggtccggtggtcccccaccccagcgaacgctttgaagagtccagacaaaggaatggaaccaagctatggggtgaattaatgggggggcccaattataaattataagtaataatggcgtttttatatccagtgtattggtgtacatctttctcgaggatggggggtccttaataatttggaatatcccataaaatatttcggggtaaggataaggttggtagggtactccctatactaagaggttgagaatgtttacaaggtgggaaagtagagtccggtaaatacacgggggaaaagaaaaatacgggatatgatatactgtggaggggtgtgacattggtgggcagan

SEQ ID NO: 20938 - DNA, 403 bp, Homo sapiens
  misc_feature 1: n = A,T,C or G
naagttgaaatgttaaatttggacatttgtgaattttgatattcaggtttatctttttctgcattgggaaaaacgttttttctttttaattttagcaaaaaatcccagaagtgggatgaaatgaacatcttggcgacgcatcatccagcagacaaagactatggtttaatgaaaatagatgaaccaagcactccttaccataggtaatgttacgtagacgtcattccttcatgtgacttacttccattttgcatttcaaatgaacgtctgaataccagcctatttgaatttgttttattgtagatttgttactggagcactagtgaagtcagtaacctaactgcaatttgtttagtaatggtttaagtgatgtgtaagtttaaaattaagaaagccattttgc

SEQ ID NO: 20939 - DNA, 284 bp, Homo sapiens
acatccttcaccaccgtggaatattttagtctatgtagtcaaagtcttctggaattccaaaagttctatcaattttattttcttcagacccaaattttcttttggcccaagattttattgcgaatatgttatctataaagaaaattgagaaataattttgagaaacacacaatcataaaacatttcaagtataattatcttcattgttcttttacttccttctattactttcagatatatcaaaataaggagttttctgtatttttaagagtagtggtaactaa

SEQ ID NO: 20940 - DNA, 762 bp, Homo sapiens
  misc_feature 290, 748, 749, 750, 751, 752, 753, 754, 755, 756, 757, 758,759, 760, 761, 762: n = A,T,C or G
acgcgggtgattttgaatacttctatccattatgtaaacatttatcagtagaaaaaggtggcagctcacacttctttgtatagcattttaaaaagcaaacaaaaatatttgaccatccaaattgtttttttccaaagtccttttaaattcaaaagggaaaataagattattaaaggtttgatgttttaaatcagtgtttcattacaatttaacaaataccattgactgcctactttgtgctaggttcagcaatagtgactgaaatactgtctttgcccatttacagaatntaatacatgatttaatattttaatgataattataatgatttcagatacctctgtttgctccatggatgtgttatttatcattcatgacttgcttctgaaattgagagcagcattactgttgtcatataacagtcatataacatgcaaataatatttttattaaaatataagttattccctttcatgatgtttctataaagatactgcagtcctaaattttttttactgtagcctgtaatataacatgatttttacacacgtatttttttttccacttaggacatttaatttcttaattgaggtggcatagcatagtagttagtttgagacctagaatttgtctggacaatattactaaccttgtgacattagcttaatcatcagaatagtgtgtggaagagtaagaacttaataaatatcacctattattatttaactttttaatgtgtagctgatannnnnnnnnnnnnnn

SEQ ID NO: 20941 - DNA, 474 bp, Homo sapiens
ctgcatatatgttcaagtttagtaacaaagtagcataagagaaattaaattgttattgcacaaaattatattggtattatgctacatgttagaactagacctacatatacatagattattgagtgccatactgaggcctattagcaccgctaacatgttcctttcctatcatatctttatatttgactttgaatacttgtgctaatgttcctgatgatgtaccccacaagctgcattcaaactcaaatctgtgggaatgagtgactccacaatctcttattccgatctgttcctccccccctcctcagtcctctttccccctcccttctcttctccttccccttttctcactttcttctctctcttctccttcttccatctctctttctcaccctcctctttcaacttatttgcaaaaaagaagaagaagaggaagaaacactcttattccttccgctatcccctatccttcgc

SEQ ID NO: 20942 - DNA, 877 bp, Homo sapiens
  misc_feature 1, 2, 3, 4, 5, 6, 7, 8, 15, 17, 22, 29, 874, 875, 876, 877: n = A,T,C or G
nnnnnnnnattgcantntagcntgagtgncagagtgagactctgtctcaaaagaaaaaaaggaaaaataatggggtctcactatgttgcccaggctggtctcaaactcctggactcaagcaatccttgcatctcgtcctcccaaagtgctgagattacaggcatgggccattgtacccggctatcttatcttctttatatagatatctaataagatgtaaaatactgacctgcattatctccatgttaacatttacacttcaaaatctgtaaacggacccacgttcatacgcgtgaacagaaatctttcagcaacaaaagagaaaattgtatttctcgatagaaaggaagtggtcagatcatgccagccaaacaaatctgtcaggctttgaaatatagaaccgttaggtaagatactgagataaaggataaagtaagatcagcctaaatgtttcagtctagttaagttgatttgtatattacttagaaatttcattttcagggaaatagttttcagatttaaataactgtaaagagctgagttattctttgacttggatttaaaaaaaaagaaaaaaagtgtcctgaagtcatttcctgccagtttgtccccccgactttttttcctgctcttcctgtaactggttcttgttacggcaatgtagctgtatatttaaatcctaagagactcgcttattgtgagtaggcagggtcagtagtctgctgaaacaagcacaggaaacttgaaacacctaggggctattttaaaaatcccttgccactgacattttagttagaattctaaagagagaatgggctgtttggatactgagctccagtaaaagacctcgcggtttttacacactacgctgcannnn

SEQ ID NO: 20943 - DNA, 829 bp, Homo sapiens
  misc_feature 1, 2, 3, 4, 5, 6, 7: n = A,T,C or G
nnnnnnnagtagagatggggttttgccatgttggccaggctggtctcaagctcctgagctcaagtgatctgctcacctcagcctcccgaagggctaggagtacaggtgtgagccacccctagaaaagcacaagagtagttctgatacctgacttattaatggatttttagatataacacacttgtaagttggggtcagatacatacagagtgaggacagtgttgttcattacaggaagtggggtgagagacagagatgaataaacgtgggcaaggggccatggagaactcggaggaaggagagcagagagagaagtgggctgtgtgggaaaagagagccagggcaggggcatgggagggcaacctttactgagtagctaatatgtgagggtcactgagctagagatttctcatgttgctgtagtgaatcctcatgagtccaacgagggaggtcctcttctgccatttaagagatggctgcttcttagagagtgtatacgacctgctgaaggtcacacagctgataagtggtgggccaagattccaacttgggtctctctgaagatctggcaaggaccttcttgccagttccctgtgcaccttcttttcttttcccttctttttctaggttagggaagagggagaggagtcgcttattctacctttcttgatgaaagctgggggaaggcaacactaaagcacatggcagaggaactctggggaaccagaaagtttttatttcgtaatggaaagctctatagccttcaaggtaggagctggaggatggagacaacaggtctagaactgctcaggagcactagaaagagaaa

SEQ ID NO: 20944 - DNA, 387 bp, Homo sapiens
  misc_feature 1, 2, 21, 36, 66, 69, 86, 92, 113: n = A,T,C or G
nngtaacaagtagtgtgtgtnccccctttattgccnaagagtagcccgtggtgtggatgcatcatnatntctgtagtcataaaccnattganagacatctggcttgttggggncttttacacatttattttcttcctgtggtacatacttttttccctaaccacaacaatagcagctaagaggacgcacagagcaacagaaactggggtataacatgaaaatgtagacagagagtgacaacagtgtctgtcgtctttcacagatttaaggaaaaagaagtgaaatacagtcgtggggctggggatcagttataaggtctcattggaatttaatgaaaagtataaacccacatacccaaggtgtttaaaaaactccaggatcccgcgt

SEQ ID NO: 20945 - DNA, 1120 bp, Homo sapiens
  misc_feature 824, 1109, 1110, 1117, 1118, 1119, 1120: n = A,T,C or G
tggtaccccacccgggtgggaaaatcgatgggcccgcggccgctttttttttttttttttttttttttttaagtagtaaaatggaaaacaggccttagagaattgtattcctcaaggcctctgactgcctgcttccaagcttttgttaaagaacagaatgtgttgaattcttctcaattggcaggggatcaagcacaatactacataatgaggtagctgagaacagagtttttcctataaacacaaagaacaactgaataagtgcatgtaattctcatccaattaaacaggaaacatgataaagcaagttagtacagttgtatttaaaccaagttgactggtataacttgaaaaaatttaacccaagtttctaaggtatgccttattcataactgatgagtaaaccacaagtaaagaataaggtacgcctagaacctatctactttgtaatgataatgcatataaaataagactcctaatagaatataactgtcaccaaccagaagacagatgaacctccgtttgggatgtgaatgagtttgaaatggaccgttcatttagcgtggatcctattcagtgtctactcgttcacttcatcttaaggccgtgtgtcccccggactctgtgtgttgccatccttttccacctgttccttctctaattcatatcacgactgtacaatttctggttttctttcaatgtgtgcacagaaaggaagctcaacaactttgttgagccaggaagaaattattatcaacatttataatcaggccaaatttcagctgagtagtgactttaaaagaattagttttaatctcaaaatnaaaaaaaaaaagagggcaggcgaggtggctcacacctgtaatccagcactttgggaggctgaggtgggcggatcacgaagtttaggagatcgaggaccatgctggctaacatggtgaaaccccgtctctactaaaaacacaaaaaattcgccgagtgtggtaataagcacctgtaatcccaggtactggggaggctgaggcaggatgattgcttgaacccaggaggcggaggttgcagtgagccgagatcgcaccactgcactccagcctaggcgacagatgcgnntccgtcnnnn

SEQ ID NO: 20946 - DNA, 2884 bp, Homo sapiens
tcaaataaaccttttatttacaggcaaaggatatagtacaagaagaaaaagagaatacagatgacatcgggggtccaagagacattccatatttaagcttcataatgtccttatttgcacacatataccacactgccttcattttctccagctgatagatttgtgtaagaaatcttgactttgagagttcaatgtcattcccaacagggtctttatgtctgtctggtcatgttatcagccagtcttacttaatgtattaggccagttggaaaccatcattaaagaaactgaccctggtgatcaccagagtagtttcagactataaacaacacatcataaatcccactgcccttatcttggcccaaagacaaaactggacattctgatgaccccagagattatgacagtgttttctggtctaattaaaccatagtcttcatatacctttaccacgcctccttcctccaattaggaagctaagtgggtaagaaagaaaaaataaaggcagagcataacgatgtcacccatctttggcctcttagccggagctgatccttacatgggcagtagactataagtgtgttaattatttttcctactgcagagcttcttcacgttggaatggtgaataggtacacatttctcaaagctcaaagtgcaagtctaggtatattctctagtttcaatcttggtgaaatttttttctatgaattcattactttttagtttatttcagggagggggtggtgttttttaatgaattaatacaagtgtcagcatctttcatggacatccagacaatttcttaaagatgggagaggtaaaaaatcttcaggagaaactgtgcctgaactgtgagtatccagaagccattgaccatgttaatggtggagccaatatgaagtacttgctaaatcatgtggtgcgtgaaaggaagagcaatgttataattgcatcctcctaaagactacataaccatcatcactcatcatctctccctggtcccttccacctgccaaacccccataaaaacccataattgatgatacatattagtttataattaacggcgtacctaactgttctctactagtctgagcctctgtacagagaaatgtcagttttgtattcctggttcctggaaaagtacatatagaatagtataaatacaataaatgtttgaattatcgtataacttgagtctaaattttaagttagtatcctgtattaagaactgggttgatcaaatggttctttctttgcacatatcaaggctttcgactattcccaatcaggtcttcccaaatttgggcatattcctgcctctgcctaccctgttctaatttggcactctaaagatagttcataaaaagcaagccaaagatagaaaagagagctaaggctacaggaggaatttactctttaacatttgggggaaggaaaatgaggcttgtctacagcagggactggctgtcttccagaaatggtttcccaaggtgttccctacctctctttttcttggatatctttttgcattatagatagccttgggaagggtgtcacctttatcctatcagttccacctaatcaactgtagtcatctgagagccagaattattattgatagaggggcctgggaaaggagaagaggaccaggagagaggaaggtatacttattgcagaggagaaaagccaaagaacgtttgcccatgggcagtcttagctatttaaaatcacccacttcttcatccggctcccttggcatatgtatcagcccatggattgggaggtgtaggaccattctttttctttctggaaggaaagcactgacatttaagctctgtgcggtctgctcaggggctgcccagtttgtccaagctttaggatattagagagattacgcatttgtggtctcaagttaggaaactgttgaagaacaaatatgtcccttattagagggactctttagatgtttagggtactcacaatccttgccaacctgatgtccttggaagctccagtctggctgtaaggagatgatgaggggttctgtgtgttggaggtgatgacctcattgagtctcagccacagcagggcattatgcaggaaagaattcaatggagttatttaatacctttccctattcccacaaaaatctggaactgggttctgaactgagaagtctgggttccctgagaattggacatcagttcaaccacaggaagcctctaaatttagcactctactcacagagggccaagaaaaattcacaaatgtcacaaacttaggaacttaggtatctagtcttctctgtcattttgtaatgagaaactgaggcccataggtaaaacatctcacctccagtcacacaggtaagtacatggcagggcaaggacaggcacccagttttcccaagtccagtggccttttcatgatacccatttctgtgtatcatttcattgatttctgtgacagctggccctttgccccacatcaccaaatcttaactctttggactttaataatgtgcaaaattaagaggaagtctggcatcgggagctttacacaactcagagagaactgaggaaagtagttagcatgttaactgtgcctcaccttgacctgaagtgaagagcactcaccaagccacaacctgctatctgcacaccccacaccatggggtaaaggacagccaaggaagagaaaggaaagaaaagcaatccggcagggagatcagggagcgaaacgaacagagaaacgaacagaggttttttccaagggccttctatttttctacaatctccacacattcagtactgagacacattaagaagggcccactgaggccatcattcaccctactctcgggctgccggacgcgtgg

SEQ ID NO: 20947 - DNA, 947 bp, Homo sapiens
  misc_feature 1, 2, 3, 4, 5, 944, 945, 946, 947: n = A,T,C or G
nnnnncaaaggaggctgaatgttctttacattggtctcgaagctaaacttagattttcataaagtatatgtttcatggaaaattatttgatgattactccccaaatggtgttaatgtcttggctatttttagcagtcgatgctaacacattagccctgctctaagaatcatctcttgatatgtctctttttttttgacattcaaaactacaatatttctaaagtacctcaggtaatgttgcccgaaaaacatcctacaggatggtggctgccaactaaagtcattggagcaacagacagtggctacaattactaagtaggactctgtgtacaaaatcaatggtcagtctgtaaagtccagcacctttcagagtaaaccatctcactctgattcacttaaacaatttagatacactagtaggaaggtgaagtcccttttttggagggggtggaataagcaaatggatggatacatcaaaccaaaagcagaagaaacacctacattttttttacacggtgaaatgaatagttaacaacccagttatgtcttttgccccctcccggtggtttaaaaagcgtaaagagcgcagtgggaatattttggttttgaagccccttgcacagggaacctgttctgacacattcttgtggtgtccagtaaaggaatttcacctgagtagggatcagctccagtgctaatatttcagatgctgggaatcccctgcaggccttagccaaaagagttcttaaatgaaaagtctctgcctgagctccctccctgcaaccagcccttgaacggagaagcagagaaaattctcaaaggacagcgtctgtgcctgggctggtcctcctgggagaggagaggaataaaaccaatccagagagggcacccccatctttgtaaggagaagggagaagtaattagaatgctccaaagcctattannnn

SEQ ID NO: 20948 - DNA, 609 bp, Homo sapiens
accatacagaataaaaatacatttgagaaaaactggaataaatctccagcaatcaaaccaattacatttaatttttcagaaaacagtaaattttaaaacatgccttaaaatattaatggcataaatatatcttcaaacgtgtgcttacaaattacaaaataagtggcaaaattgtcaaaagtaaagttttacttgttattaaattgtgatcaacattaaaacaaatacaaacacacaatgtgagaaagcgaggacagcagatccatagcagtgagggggtgtttctgtcatccctatcccagggtaaatatcaagaagcaatcatttcatgcctatgggctagtgaagaaaaaaaaaaatcaatcatcgcactcttcctccctaggccaagataaaccctcggaatcatttaaaaaaaaaaaaaaatacttcaggaggccgggcgtggcagttcgcgcctgtaatcccagcactttgggaggccgaggcgggtggatcacctgaggtcaggagttcaagaccatccgtctctacaaaaaaaaaaaaaaaaatacaaaatttagctgggcgtggtggctcatgcctgtaatcggacgcgtgggcggacgc

SEQ ID NO: 20949 - DNA, 4088 bp, Homo sapiens
  misc_feature 4079, 4080, 4081, 4082, 4083, 4084, 4085, 4086, 4087, 4088: n = A,T,C or G
acgcggggagaagttagggggtgcagcggcgctggctttaggtgaacgacgtgaaaattacttttcccactgaaacacacccaagtatatgcccagccttcatgaaagtgaacagagaaacgaagcgcctttatgtgggtggccttagccaggacatttctgaggcagacctacaaaatcagttcagcagatttggagaagtttcggatgtggagatcatcacacggaaagatgaccaaggaaacccacagaaagtttttgcatatatcaacatcagtgtagcagaagcggacctgaaaaaatgtatgtctgttttaaataaaacaaaatggaaaggtggaacattacaaattcaactagcaaaagaaagctttctgcacagattggcccaagagagagaagcagcaaaagctaagaaagaagaatcaacaacaggtaacgccaacttgttagaaaagacaggaggagtggatttccatatgaaagctgtgccagggacagaagtgccagggcataagaattgggttgtgagcaaatttggaagagtcttacctgttcttcaccttaaaaatcaacataaacgtaaaatcatcaaatatgatccctcaaaatactgccacaacctgaagaagataggggaggatttctcaaacaccattcctatatccagcctgacttgggaattagaaggagggaatgaccctatgagtaagaaacggcgaggagagttctctgactttcatggccctcccaagaagataataaaagtgcagaaggatgagagttccactgggtctctggccatgagtacaaggcccaggagggtaatagagagaccacccttaacacagcaacaggctgcacaaaaaagaacttgtgattccattactccttctaaatcatctcctgtacctgtttctgatactcagaaacttaaaaatctaccttttaagacttctggcttggaaactgccaagaagagaaacagcatttctgatgatgatactgattctgaagatgaattgagaatgatgattgcgaaagaggaaaacttacagagaactacacaaccctcaataaatgaatctgaaagtgatccttttgaagttgtaagggatgatttcaaatcaggcgttcacaaactgcattctttaataggtttaggtatcaaaaatcgtgtctcttgccatgatagtgatgatgatattatgagaaatgatcgtgagtatgactcaggagatacagatgaaattattgcgatgaaaaaaaatgttgctaaggtcaaaaacagtacagaattttcacaaatggaaaaatctacgaagaaaacttctttcaaaaatagagaaaactgtgagctttctgatcactgtattaaactacaaaaaagaaaaagcaatgtagagtcagccctcagtcatggattaaagtctcttaatcgtaaatctccctctcactccagtagcagtgaagatgctgattctgcatcagaattagctgactctgaaggaggtgaggagtataatgccatgatgaaaaactgccttcgtgtgaatctcactttagctgatttggaacaattggctggcagtgatctgaaggttccaaatgaagatactaagagtgatggaccagaaaccaccacccaatgcaagtttgacagaggctccaagagccccaagactcccactggcctccgcagaggccgacagtgtattcgtcctgcggagattgtggcttccctgttagaaggagaggagaacacctgtggcaaacagaaaccaaaggaaaacaatttaaagccaaaatttcaggctttcaagggagtaggctgtctatatgaaaaggagtcaatgaaaaaatccttgaaagacagtgttgcctctaacaataaagatcagaattccatgaaacatgaggatcccagtatcatatccatggaagatgggtccccatatgttaatggctcattaggtgaagtgactccatgccaacatgcaaagaaggcgaatggcccaaactatattcagcctcaaaaaagacagaccacttttgaaagccaggatcgcaaggcagtgtcccctagcagttctgaaaagagaagtaagaatcctatttctaggccattagaaggtaagaagtccttaagtcttagtgcaaagactcacaacataggctttgacaaagacagctgccatagtaccacaaagacagaagcttcacaggaagagcggtctgattcaagcggcctcacatctctcaagaaatcaccaaaggtctcatccaaggacactcgggaaatcaaaactgatttctcactttctattagtaattcgtcagatgtgagtgctaaagataagcatgctgaagacaatgagaagcgtttggcagccttggaagcgaggcaaaaagcaaaagaagtgcagaagaagctggtgcataatgctctggcaaatttggatggtcatccagaggataagccaacgcacatcatcttcggttctgacagtgaatgtgaaacagaggagacatcgactcaggagcagagccatccaggagaggaatgggtgaaagagtctatgggtaaaacatcagggaagctgtttgatagcagtgatgatgacgaatctgattctgaagatgacagtaataggttcaaaattaaacctcagtttgagggcagagctggacagaagctcatggatttacagtcgcactttggcaccgatgacagattccgcatggactctcgatttctagaaactgacagtgaagaggaacaggaagaggtaaatgaaaagaaaactgctgaggaagaagagcttgctgaagaaaaaaagaaagccctgaatgttgtacaaagtgttttgcaaatcaacttaagcaattctacaaacagaggatcagtagctgctaagaaatttaaggacatcatacattatgatccaacgaagcaagaccatgccacttacgaaagaaaaagagatgataagccaaaagaaagtaaagcaaaacgaaaaaagaaaagggaggaagctgagaaactacctgaggtgtctaaagaaatgtattataatattgctatggatctgaaagaaatattccaaactacaaaatataccagtgaaaaggaagagggcacaccctggaatgaggactgtggtaaagagaaacctgaggaaatccaggaccctgcagctctgaccagtgacgctgagcagcccagcgggttcacgttctctttttttgattcagacactaaagacataaaggaagagacctacagagttgaaacagtgaaacctggaaagattgtctggcaggaagaccctcgtttacaagacagcagttcagaagaggaagatgttactgaagaaacagatcacagaaactccagtcctggagaagcatcattacttgagaaagagaccactagatttttctttttctctaagaatgatgaacgacttcaaggttctgacttattctggagaggagtaggaagtaatatgagcaggaactcttgggaggccagaacaaccaacctgcgtatggattgtcgaaagaaacataaagacgcaaaaaggaaaatgaaaccaaaataataaatgtcagctggttttgatactgaatgtgaacaaggctcacctaaggaaactgacccagaaaacagttttagctgacaaagaagaaatttcagagtgaaggaattttaaaaatctggctgacggaatatcattctggttgccatctttttctgtggaactcctctgcatttcttcctaagtaattacttcaaaaattaaattcaacttcttataaaggaagaacaagatagtccttgaaaatactttttgtatataatctctttgccctctatcctgagtaactaatggacatcttctcatgcaaggtttacatgaagcctttttaaataaatgagtcaaagcacttgtattttccagcctaggctttgtgtgaattataggctatttgaaattttatttctgattatgtcaaatacaccttccattttgtcatttttgtttaaactgataaattacaagtcaacattgagnnnnnnnnnn

SEQ ID NO: 20950 - DNA, 421 bp, Homo sapiens
  misc_feature 1, 2, 3, 4, 5, 6, 7, 8, 9, 10, 11, 12, 13, 14, 15, 16, 17: n = A,T,C or G
nnnnnnnnnnnnnnnnngctgcttgtatttattgtagtcaaatgctttacatcagaatgatgaaaataggcttgccactttctcttattttaattccatggtagtcaatgaactggctgccactttaatataactgaaaaatcattttgagaccaagcaggatcaagtttgtagaataaacactggtttcctagccatcctctgaaaacagtatgaaacatgaccaagtacacatgctacatggtttgccatcttaaaatagggataatataacttgccatggaatattgctctgaacgttaaactacatatgttaatgtctgcaagacacctaggacagcacctggcactcagtaggtccaaagacatggtagccagtgtgattgttgttggtgatagtgtagcaagagcattaagaagt

SEQ ID NO: 20951 - DNA, 509 bp, Homo sapiens
  misc_feature 508, 509: n = A,T,C or G
acttcctctcttttatgcttgaagcagcctcacttcggttctagtttttgaaatttgattaagtcttattcattttcaccatgctcttaatgattttattgattttagttatattccttattcacgttcatttctttcattcagaaagtcctgttatcctgaataaatccagtctataattgtggtcattcagttctcttttgctagatcttctttacctctactctgttcatcacaggggagtcccgcactgactccaaatccatgaatgaaagagatgtccataacaccatagaaattgtctacacactgttatttcaaatagaggaagcactcacaatcccatcaccatttcacaacaactactttcattgtctacaagcacttttagggggctgtttgtttgtttgctttttgagatgggatcccactatgttgcccaggctgctttcaaaccgctggggtcaagccttcttaggtatctggaactacaaacgcacactactgnn

SEQ ID NO: 20952 - DNA, 431 bp, Homo sapiens
  misc_feature 1, 2, 3, 4: n = A,T,C or G
nnnnaatttaaaaaaaaaaggggaaaatgggaaaactcccctggaacggcccaaaaatgggggaaaaaaccggggcgtcttatttagaccccacctcaaaaaaatttatcccgttaaaatcttgggcaataaagcaattttgaggcgattttttccaccttctcaatataatattccaactggcgttaaaatgcattttaaacattggggaagactaaattaatttttttaactgacatttatgtttcatttgacaaccttttgctgtatattttatgtggacttttaagtattgtagtgattcctttaatgaagaaataaaataattgtcatttaaaaatgcatattattattaccttatgctataaaaatagttttaaaatagagtatgtttattaagatttaaaaataagtatagtcatgcactgcat

SEQ ID NO: 20953 - DNA, 880 bp, Homo sapiens
  misc_feature 880: n = A,T,C or G
acttgaagatagggcctatgaaaagataataaaggttacatgaagtcctaagagtatggcttttacccaacagggctagtgtaaagctcttatccaacagggctagtgtaaggctcctttccaacagggctagtgtaaggctcttatccaacagggctagtgtagggctcttatccaacaggactagtgtagggctcttatccaacagggctagtgtagggctcttatccaacagggctagtgtagggctcttatccaacagggctagtgtagggctcttatccaacagggctagtgtaaggctcttatccaatagggttagtgtagggctcttatccaacagggttagtgtagggctcttatccaacagggctagtgtagggctcttatccaacagggctagtgtagggctcttatccaacagggctagtgtaaggcttttatccaatagggttcgtgtaaggttctcatccaatagggctagtgtttttacaagaggaagagacaccagagctctctctgccatgtgaggacacagcaggaaggcagttatctacaaaccaggaagagactcctcaataggaactgcactggccagcaccctgatcttggacttctcaacctccacaactatgaaaaaataaatgtcctttaagtcacccagtctgtggtattttgttatggcagccctactgactaatacagctaaggagctatgatacttaccaagttactatgactactgactgaggtgggtactaatttaaacgcagaactgagtgacaaaaagagcctaacagtttgcaaagagaccaaacctaacaggatgacattcaatacagataaatatatgattccacaccctgtgaaaagtagggan

SEQ ID NO: 20954 - DNA, 475 bp, Homo sapiens
  misc_feature 1, 2, 3, 4, 5, 6, 7, 8, 9, 10, 11, 12, 13, 473, 474, 475: n = A,T,C or G
nnnnnnnnnnnnngatggtattttttactgctttaggacctatttttaagtgccataaaatctgctgtcattaaacttggcaggctggccaagattgggccagggcactttctgagttggttagtgcataatagcacaataggaaccagacccaaatgctttggggggatggagtggggggctggctcttccttgaggagaacggcttggaaaaaatctgcagctaactgaaactgctcagaaaaccaccctgtctagaggctgaagggaagccctgcttacctcagctttttagttctgggaagctatggtctgagaaggcagaggggaggaattgggctgagctgtgaaggtaagggggaagaaaaaaatcaaagtagaatttggtttaataagggccatgcagacctaatagtccagcccacagaggctgaaaaacaaatcaataaaacaaattggattctaactaatannn

SEQ ID NO: 20955 - DNA, 278 bp, Homo sapiens
cttttaaaatgtatgggatttaccttgacaaccaaagcttacaaaaggatgtggaaatctgatttccaccagcccaacttgcacttcgacagggattctgtaatgttaccagcctgagaaagaactgatctactgagtaatacatttccattcccgtatggaggaagagaagagaaaattggctaaatcatgtaaccgcagataggaagggctcacctggggaaactctggtttccgatgggacaggaaagtcatacgggcaacagtatgcggaaagt

SEQ ID NO: 20956 - DNA, 320 bp, Homo sapiens
  misc_feature 1: n = A,T,C or G
ncatatgtaatttaatcctgttttattaactttgtagtcaaaatggtttttttcaagccagtgaaagtaagctgcttagacatctgaaatgaatctccttctctgggccttgtctgtttcagcacggcggattccttgcaatgtgtgtttatatctgatatccgttgactagataaccaaagaagataacccctggcctctgggagttaataattgtgtttgttttccagctgccttcactatgattggcacttccagtcacttatctgataagtgttctcagttcgccattccttccctgtgccactatgccttcccgt

SEQ ID NO: 20957 - DNA, 367 bp, Homo sapiens
  misc_feature 366, 367: n = A,T,C or G
actgctaacaagtattcattaagtgtatgatttcatttttaatgacagttgccacagatctgatgttgtgtctacttgttcactccagcccctgccccctacaaagatataatttgtctttattcatattgttaaaatgggtttagtttctctagggaaaattgttatctcagaatagggacctggaaagtgaacgatattttatactctacctgtgttcatattattttgtaaccaatgttttaaagatagagaagcagaggcggatagaacggataaagcagaagcgggcccagctgcaagaacttctcctacaggtaaagataccaagatgttttcattaccttccctgtttctccactggcnn

SEQ ID NO: 20958 - DNA, 439 bp, Homo sapiens
  misc_feature 394, 438, 439: n = A,T,C or G
acttttcattagtctgttgtcttatctaattttttcttctgtaacagaatactacaacacatctttgcaggattctttgcaaattctgccattcctggatctccacaccctttttcctggtaagtaactaattgttttctatcttactctattggagtgacatattttaggtgctgtcatttctgtgcagtagagaaaaagagctgcataggccgggtgcggtggctcatgcctctaatcccagcactttgggaggccgaggctggcggatcacgaggtcaggagatcgaggccatcctggctaacatggtgaaaccccgtctctactaaaaatataaaaaattagccaggcgtggtggcatgcttctgtagtcccagctactcggaggctgangcaggaagaatcacttgaacccgggaggtggaggttgcagtgann

SEQ ID NO: 20959 - DNA, 491 bp, Homo sapiens
ttttgttattctgacaactcctcatcccccctacaaacccagtatcttgatagcagattaaatgtcatgtttcaatctacaataagatgatactacattaagagactacaaatattaatgcttactgtatgacctcatgtaaatagctgaacccctgagctgcagtgtcttgatctgttaaaataaaaaggctagatcagatgtccctttaaccctaaaattcaatgactcaatgaaatttctgtatacttaaacatatttctacaaatctataaattatgtaaaactcccagtttatattattcaatttaaaaactcacaaaaataccccacaaatgtcattttaataacatcctcattaatagatttaattccaactcttcagcatagtgtagttcaaatttctggtccgctcaattctcttatgcagagataattttcctataatttttattctgtagagacactgggccttgtataaatcggacgcg

SEQ ID NO: 20960 - DNA, 420 bp, Homo sapiens
cagggatgggcccaagtcagtttgggtggaatggtatgagtcaaagtttaggtctgcttccgcctccttgggtgatttggcctgtaatttatcttgtaactccttattgtgtaaggtaagggaagcaacttttgcttgcaatagagagagaagatcttgttggtcagcttcagaacttatatccaataagctatcagcaccttgggaaagagaaagccatttaaaatataaaacaattaaactcttatttctctaacctgagacaaattcacttcctagcctaatccagttcttcttcctggccctaattataaaacgccctagcagctggatgggtgaactaaaattttcattttatatagaaaggaaactggggtttccttactgtggtattgctagcacaatactagatacatgtgt

SEQ ID NO: 20961 - DNA, 499 bp, Homo sapiens
acaaaactaatgatcttcagttacacaagaacatttaaaagttttacatttgaaatagataattaagcaatgctgtgtgaaactgaaaaatgaaaactttgattaaaaaaagtattttcaaatataggatagtgcatgtatatgagaatacttttttgggtataatcttagtaacatcattatggtgttatgtaaacatatgacatatgacatataaaattatagtagatagatcactgtgttacccacttacacattcttctgtcgtattaagcaacaaacattattcttatctataataaagcagatatttctgtctgccatacatatgaaatatttgtatgtatttattggaagtaatttttaaggctagtctttttttataatttcaacttttattttagatttggggtagatgtgcagatttggtacattggcatattgggtgatgctgaggtttagggtatgaatgatcccatcacccaataatgagtatagt

SEQ ID NO: 20962 - DNA, 2506 bp, Homo sapiens
  misc_feature 2503, 2504, 2505, 2506: n = A,T,C or G
tagggcgaattggagctccccgcggtggcggccgaggtacatagtgtttataatattgtaataatatattttacctgtggtatgtgggcatgtttactgccactggcctagaggagacacggacctggagaccgttttaatgggggtttttgcctctgtgcctgttcaagagacttgcagggctaggtagagggcctttgggatgttaaggtgactgcagctgatgccaagatggactctgcaatgggcatacctgggggctcgttccctgtccccagaggaagccccctctccttctccatgggcatgactctccttcgaggccaccacgtttatctcacaatgatgtgttttgcttgactttccctttgcgctgtctcatgggaaaggtcattctgtctgagaccccagctccttctccagctttggctgcgggcatggcctgagctttctggagagcctctgcagggggtttgccatcagggccctgtggctgggtctgctgcagagctccttggctatcaggagaatcctggacactgtactgtgcctcccagtttacaaacacgcccttcatctcaagtggccctttaaaaggcctgctgccatgtgagagctgtgaacagctcagctctgagtcggcaggctggggcttcctcctgggccaccagatggacagggggtattgtttgcctcactcctggatgctgcgttttaaggaagtgagtgagaaagaatgtgccaagatacctggctcctgtgaaaccagcctcaggagggaaactgggagagagaagctgtggtctcctgctacatgccctgggagctggaagagaaaaacactcccctaaacaatcgcaaaatgatgaaccatcacgggccactgttctctttgaggggacaggtttaggggtttgcgttcgcccttgtgggctgaagcactagctttttggtagctagacacatcctgcacccaaaggttctctacaaaggcccagatttgtttgtaaagcactttgactcttacctggaggcccgttctctaagggcttcctgcgctcccacctcatctgtccctgagatgcagagcaggatggagggtctgcttctagctcagctgtttctccttgaggttgcggaggaattgaattgaatgggacagagggcaggtgctgtggccaagaagatctccgagcagcagtgacggggcaccttgctgtgtgtcctctgggcatgttaacccttctgtggggccaaaggtttgcatcgtggatccagctgtgctccagtctgtcccctcctcctccactctgactgccacgccccggaccagcagcttggggaccctccagggtactaatggggctctgttctgagatggacaaattcagtgttggaaatacatgttgtactatgcacttcccatgctcctagggttaggaatagtttcaaacatgattggcagacataacaacggcaaatactcggactggggcataggactccagagtaggaaaaagacaaaagatttggcagcctgacacaggcaacctacccctctctctccagcctctttatgaaactgtttgtttgccagtcctgccctaaggcagaagatgaattgaagatgctgtgcatgtttcctaagtccttgagcaatcatggtggtgacaattgccacaagggatatgaggccagtgccaccagagggtggtgccaagtgccacatcccttccgatccattcccctctgcatcctcggagcaccccagtttgcctttgatgtgtccgctgtgtatgttagctgaattttgatgagcaaaatttcctgagcgaaacactccaaagagataggaaaacttgccgcctcttcttttttgtcccttaatcaaactcaaataagcttaaaaaaaatccatggaagatcatggacatgtgaaatgagcatttttttcttttctttcttttttttttttaacaaagtctgaactgaacagaacaagactttttcctcatacatctccaaattgtttaaacttactttatgagtgtttgtttagaagttcggaccaacagaaaaatgcagtcagatgtcatcttggaattggtttctaaaagagtaaggcatgtccctgcccagaaacttaggaagcatgaaataaatcaaatgtttattttccttcttatttaaaatcatgcaaatgcaacagaaatagagggtttgtgccaaatgctatgaacggccctttcttaaagacaagcaagggagattgatatatgtacaatttgctctcatgttttaaaaaaaaaaggtaaatgtaacttaatagttttgtaaatgggagagggggaatctataaactataaatacagttattttattttttgtacatttttaaggagaaaaaaataaatattcataacataagaggaaaaaaaaaaaaaaaaaaaaaaaaataaatattcataacataagagtaaaaaaagtcgacgcggccgcgaannnn

SEQ ID NO: 20963 - DNA, 605 bp, Homo sapiens
  misc_feature 479, 483, 486, 599, 600, 601, 602, 603, 604, 605: n = A,T,C or G
cttcttcctcctcttcatcctcttcctcttcttcctcctcttcttcctcctcctcgtcctcctcctcctcttcttcttcactgctctctttagacagctccagcagctgccctctctccgatctgggccgtctctcctacctggcatattggaagagcgtcatcttggagtatctctaccaccaccatgagaggcacatcagcatcaaggcaattagcagagcgacgggcatgtgcccacatgacattgccaccactctgcagcacctccacatgatcgacaagagagatggcagatttgtcatcattagacgggaaaagttgatattgagccacatggaaaagctgaaaacctgttccagagccaatgaacttgatccagacagtctgaggtggaccccaattttaatttctaatgctgcagtgtctgaagaagagcgagaagctgagaaagaggctgagcggctaatggaacaagcnagcngcngggagaaggaaaaacaatttttcctgtctactcctgctaccccccccccatcacttgcaacagtaccaggcagggcggccgcccccgcggtgtggccgttcttttcctcacannnnnnn

SEQ ID NO: 20964 - DNA, 523 bp, Homo sapiens
  misc_feature 522, 523: n = A,T,C or G
acacatctgtgtctaaatttcctcttctggaaggacaccacgcctattagattcgggccacccagatcacctcattctaacgtttcctctttcaagcccttatctctaaatacagtcctgtttctgagagactagaggttgggacttaaacacatgatttttgggaggataaactcagctcataacacgactcggtaaagattcatggaatggattaattaacaaagtgtgtgctctgtttagattaggtttggcttttgctttcaaggcatgggttagccagacagtccttttgccagaaactcacttgctgttcccccttgcttctgggcaccactgctgcttcgacccctcagcatggaagttcctggacttcatggatgtttgttccctctgtagcccaagatcctgagttccacaaggtatgtgatgagttcggtttccagtgtcagaatggagtgtgcatcagtttgatttggaagtgcgaccggatggatgaatgccgcgaatattctgatgaann

SEQ ID NO: 20965 - DNA, 847 bp, Homo sapiens
  misc_feature 1, 2, 3, 4, 5, 6, 7, 8, 9, 10, 11, 12, 13, 154, 155, 156,157, 158, 159, 160, 161, 162, 163, 164, 165, 166, 167, 168,169, 170, 171, 172, 173, 174, 175, 176, 177, 178, 842, 843,844, 845, 846, 847: n = A,T,C or G
nnnnnnnnnnnnngtcccagtcagtgtttctgcagcttccatttgttgtttttatccagtgtaagcacctgttgaatgcagatgtgctgagttagaggtgggatttggaaaagggctgctatttctgctgttgagatttcagaggctatactcnnnnnnnnnnnnnnnnnnnnnnnnnacgcgccgagatcgtgccactgcactccagcctgggtgacagagcgagactccatttcaaaaaaataaaaaaaggataaagtaaacaataggaaaggatttggtggggtgagggtggggtgttgagggctgggcctcatcttgtattctgaaagctgagaaacggctggtcagctggaaggctggtggatgggcaggagtgagccaagctgaggcgttctgcaagaagcaggtctgagtctgtccaaccaatttgtatcctgtggggagaacaacttcattcttaacataccctacaaaccagaaaacaagtttttaaggaagatgctgggcatgctgatagcttttctggtctcctaaggaagagtttttaaaactaaatccaaggaagaaaaatgtaacaacacgtggaagtgaacactggatgaataagcttgtttcccaaattagaatcctaacgtccatatttagcttcatgtattcccctttggcttccacagttcaactccttttattttgagacagggtctcgctgtgtcgccccagctggagtatagtggcgctacctcggctcactgcaacctccgcttcccaggttccagcaattctgtcttagcttcccaagtagctgggattacaggcatgcaccgctactccaggctaannnnnn

SEQ ID NO: 20966 - DNA, 4029 bp, Homo sapiens
aaatctgtctgagtcttactatacccaagaaaaagtctactcactacgtagcaacctaggtaggtgccacccagctacatttccagttctcatgaaaagatctgaaaatcccatcaatagacaattcagcacatttggaaataggaagagccctaacaaataattgaatactccaaattactgagtgtttgcacacagcatgctgcaaacaggaaatgtaaatggtctgcagattagaaaagcactcactgaagcaattaacagcatctccataagacatgcaaaatgtaatttcttgacatacaaggagtaggaaaataatgaaactaaaagacatgccatgttaagacatgaaaagagcaggccaggtggattacttgaggtcaggagaattgcttgaatccgggaggcggaggttgcagtgaactgagattgcaccactgcactccagcctgggcgacagagtgagactccgtctcagaaaaataaaaaacaactttggacatagaggagttgggggcagaggggggaggatgagagaattttccatgtaactccttttccttaagaaaaagaagcaaaaatccctcatgcagtgccatctgactttatggtgtttcacattatatagttactttttttaataaacgcataagattaactcttcctgcaacccaaggtggatacttggatgtttgatttttatttatttatttatttattttttgaggcagtctctctctgttgcccaggctggagtgatgcgtgatttctgctcactgcagtctctcccacccgggttcgagcgattctcctgcctcagcctcccaagtggctgggattacaggcgcgcaccaccacgctcagcctgatttctaggctgaaaaggctgggactcaggtactttccccagttgggactgaactttctcatcagagaatgggcctcagaagcaatgttcccaaacttgtggttgggtcatcgtggaaaagaaacctcaaataagaaaaataattacaataagaaatggattttcttttttcccacaacagttatacattataaagaacagactgtcgtagaaaactgtctttgcttccaaatcagcagaggaccattgtatgtattgtcaggtctttatataagagtgaaacctttatttatgcttcttgtgagtagagaataaattttaaaactaattagatgaaattaagaacagagtattggaacatctctgtgttttccggaatgtttactcaggtccatgaatgctgtgatgctgggaacttagggaagattcaccaaaatttgagagtgataaaaatggcctaaaatgggaaatggtgagcactcttattattagtgagattggtcaatcagcccatttgaaatgggtaaaaaatactttcagtaaaataattacatattatatataaaatatttctttttttgagggcagctactgagtgataaaagcatagtagaaatcactttggttaaaagtaactcaaatttttctcttaagtaatctaccaacttcctgatgtttttctttaatattttggaactgttcaagacagaatggagcctacatatatggtgttccactagtatgttgaaaatgtcatatcatggagaatggagacaccttccaggtgtctgttaaacccatcttctctgtgtacttctggcatcttttttggtaggatcatttggcagggggtagagtacctgtacttttggcaccattgaaaccagctctggcccacttgtttgaatagctatcagactcagcgtctctatatgctttatatacagttgagagaaccagtgtttaatgctcttgaaattgtatcttccatgcttcagaccagatgcatttaacaaaatggatatattccagctgtagttgcccagtgtttacttaacacatctacatttttttcttgtctattttggtccccttgataggaaaagctataattttaggcaggactatacgtcgatttgtagccatgcttccttcctttcccttgctcatccatgttagctggcagtttttcttttgaaaagttaaaaccgggatatgtgcaatagaaatatatatatatatatgtatattttaatacttgtggacaaatgttacaagttgtttaagaacaacaaaatcaccaatgtcttccattttgagatgtgtatagttttgtaagcattagtgcttggtagcatattgtagtgccatgttaggggttagtgcatgagtctagtgattttaaacttcaggatgaattattgataataacaaatagtgtaaaaagagtggaaaatctaaaccttttctttttccataatgtctaaatctgttatattcttcctggggaaaagagattaaggcccaaaagactcatttatgaatagaaatgtggggtcaaaatctgagatactatatttgaggacatttcagctttccataaggtatctggaaaccagctgtctttgtgtcttatgaaacctcaagtcaaaatgagaccgcatttaattattctgctttgctctttttttggggtgggggggagatagagtttcactctgtcacccaggctggagtgcagtggcacaatctttgctcactgtaacctctgcctcttgggttcaagtgattctcgtgccccagcctcccgagtagctgggactacaggcacgtgccaccacgcccagctaatttttatatttttagtagagacggggttttgctgtgttggccaggctggtctcaaactcctgacctcaagtaatccacctggcctgctcttttcatgtcttaacatggcatgtcttttagtttcattattttcctactccttgtatgtcaagaaattacattttgcatgtcttatggagatgctgttaattgcttcagtgagtgcttttctaatctgcagaccatttacatttcctgtttgcagcatgctgtgtgcaaacactcagtaatttggagtattcaattatttgttagggctcttcctatttccaaatgtgctgaattgtctattgatgggattttcagatcttttcatgagaactggaaatgtagctgggtggcacctacctaggttgctacgtagtgagtagactttctcttgggtatagtaagcctcagacagctttcacttttatctactttacttgtggaaataaaacagtcattttgttctgaaagaataagatagctttctgtagagaaggaattcctacctctaaaagctgccttgagaactcagaactggcagttttctgaggtgatttttaaatttcagtattagggagagtccagcatttgctgacacagattctacataactaatgtatgatagcaaatgcaaaactattataatgtggtgtatcttgcgcatacacaggttagaacaagtagactctggcagcagatctccagagacccaagtttaggttctcatagtgtatttgaagtagttatactcctggcttaagtagtttagtgcctgggagaatccattactgaaaagcatttaacttaaaaaaaaaaaaaaaaaaaaaactgaaaaggtagtgaatacagaatagcacaatatataggaaaggatatttcctgttgaaaaaaaaagccataaaattaatagtaattttcaagaggtagaattttagtagcaataagtttgtgcatgtatagtaatttgcattagcaaggttgtacaatagaataagtgatactactgggattataggtgtgagccatcgcgcccggcctgattattcttttaggaaaaaaaattatattcaacttccagataagtggatgtaaatataaaaattacccccaaatactcaaaaatacatggctatttttatcattgggaatggtaaaaggctttcttagcatgatgccagtggcacacgatagacaactaagacccaaccttcatcaccgacaagtgtgaatgacacgctggttcacctaggcggccggattcagatttctcagcatgcggg

SEQ ID NO: 20967 - DNA, 752 bp, Homo sapiens
  misc_feature 568, 571, 699, 752: n = A,T,C or G
agtactctgcagacaattgctcggatccctttattgtctttttaaagatgcctatacaggtgggtcctttttcggtttttgaatgatggatgctgtggtatcataggaaaaagaggaatctctgggttagcttttcattagaaaatccttgtcatgtttaagctcctaagcaggcagcttgaaccccccaccctcttcctgcatccagtagacttgcagggaatgagaaggcaaaaccagcatctgtgattgtccattcttctttgtcaggcctttcagagttcctgttctagagggacaaatgactggaggccatgatacagactaatggtgcataagcccccaaaggtttggattgaattgaggctcagctgacttcacatttttaggtcttcagtatgtttatttgtccctcacatagcggcttgatctgtctgcctgtgtgttcacatagttaaccagaaacgctaggaggaagttgtaccagtgggatacctccttaggtgccaaagttttattttgagaaataatattactttcctcttctgaaataaaataataataatangantgaaacccccaaaccacagtgtgagtctcaggttagcatttgaaaacatctccagagacattgttattcctcaggaggtttccctgactccttaaatgtggctgatgtttcatggttaatttatttanttttaataaggtatgagcaatcgaaggggctgatcatctgaggttttgtaccn

SEQ ID NO: 20968 - DNA, 602 bp, Homo sapiens
  misc_feature 602: n = A,T,C or G
ttggaggggtggccgcatggagtgagtactgtctctggccaccgagcagagccagtgacagcagcgttctggtaggcaggcaggcgtatcaggtttcagaggatgcggctgggaacgggagtagaggtgaggggtcgttgcatctgtcgcggtgtgtatcttttgggggttcagcgccaccagcgacttgggcctcattcatcgcgcttacatttctccacctcatttgaagaacgagcttcgtagcccacggagctgaggtatatgagctccctgaaagcacaaagcagttatttccatcttcagatcattcagagattatgaaggcacaaaccctgccttcaatttgcttatagtcaagtggagcagacacaagtcaatgattgcagtatagccactgaagtaatctaaaagaggtgagtgtggcacttaacctctcctgggagggggaggaataaggcagtgtttccaagaggtgattttggagctatacaggcattaggtagacaaggaaggggaggtccattctgggtgcctaggactctgtggctgatttataaatcgtaaatggtacaaaaaacagtgttgagtatcttttaccn

SEQ ID NO: 20969 - DNA, 1421 bp, Homo sapiens
  misc_feature 1401, 1402, 1403, 1404, 1405, 1406, 1407, 1408, 1409, 1410,1411, 1412, 1413, 1414, 1415, 1416, 1417, 1418, 1419, 1420,1421: n = A,T,C or G
actcaagttataaataagtaatttctttcatttcttattatgaagtaaaccactatatagtaatatacttttaagcatttataaaatttgatatgttctgataggactagaaaactgtgaatcttaataatttaaataaaaccttaaagtttataacttattttaaatagcaaacagtttgtggctttgatttgttacgggccaatggacagtcctatgtctgtgatgtcaatggcttcagttttgtgaaaaattccatgaagtattatgatgactgtgcacaaaagacttggcaattatgggaaatgcgagaacgtgcgccacaaacccaagatgcaaaggctccagacccatagaagaggaagatatctgcaactggacctactacatccttggaactatgatggaacgtagatgtgtcatacctgttatacgtcatggggatcgaacaccaaaacaaaaaagtgaacatggaagtgagacatcagaaattttttgatcttttagaaaagtgtgatggatataaatcagggcaaattaaaactcaaaaaaccaaaacagttacaggaagtgctagatattgcacgacagcttcttatggagctagggcaaaataatgattctgaaattgaagaaaacaagccaaaacttgaacaacttaagactgtattagagatgtatggtcatttttctggaataaatcgtaaggttcagttgacctatctccctcatggttgtcctaaaacatctagtgaagaggaggacagccgaagagaagaaccatctttactttaggttctaaaatggggaggtgaattaactcctgcaggcagggtccaggctgaagaacttggaagagccttcaggtgtatgtatcctggaggtcaaggagattatgcaggatttcctggtatgtggaaaacttagattacatagcacctacagacatgacctcaaaatatatgcctctgatgaaggacgagtccagatgactgcagctgctttagcaaaggggcttatagctttggaaggagagcttacacccattcatgttcaaatggtgcaaagtgcaaatatgaacggtctatgggatagtgatagtgactctctgagcagatgtacagcaacgtgtgagggccaggttcatgaaatacttcaaaaagacagagattaactgatgacgactcatgaaaaggataacccaacggcaagcatacaacctaattaaaatagcaggcatacataagatacacacgggagacaactgtgaataacagatcacatcataaaccagagacgacacaaaaacgaaactcgcaagaagaacacagaccaaataagacaaacaaggacctaggacactccacacgaacaacgcataaaaaaaaaaaagaaagacannnnnnnnnnnnnnnnnnnnn

SEQ ID NO: 20970 - DNA, 1662 bp, Homo sapiens
  misc_feature 1, 2, 3, 4, 5, 6, 7, 8, 9, 10, 11, 12, 13, 14, 15, 16, 17,18, 19, 1662: n = A,T,C or G
nnnnnnnnnnnnnnnnnnnttttttttttttacatagaaatgattttttatttactttgatgattagggaaagataccaacatagctttcatcaaagctaacaaataactttactggcagttaactaattttattagactaaagacatgtctgtttaaactgaaacaactggccctttgctttggctgggaccttgggaatcacggccaaggtgctgatcagaaaagagtcaccattacatcaacctcctccccagcacacagcacagagatgccacgaaggccccataggtccctagaagagcagctggggctccacctaccgagtcccagtggcttattttgaaaagatttgctttccacaggtaaggtgtcgcccgagtacatttcttgagactgccattggctcatcctgcatatgaggtagttctctttgcattttgcagatgctctcacttgcccagggggtggatgtcacgaatccgaaacctctggcttcacattcctactgggaatgcccccccagcccgcagtcacaagtcagtctccaatcctgctgcagactctttagctcttcaaatccaaacagatgttttcttcacccacaggtttaggttttaactggctgctcagtgttaaaaaggaatatctcaagccccctgccatgcaaatatttaaccctacaaagtttaacaaagagaaaatgtagtctccaccgattaatatcccaatgtaggcaacggatacattcttgatggctccaaccactgctgtcgtcagggctgaattgtaatagctgcacagaaccgtggagtacatcagcagaaaccccaaaaaacaggaaagaagaaactgtaggataaacacaacattcttccattggttgaattcagtagcctgttgcacggtctccagtggagacactaataataagagttgggataatcatgaagcaggcattgtagaaaagtactccgtatttccctagctcctttgggtccattttctgtttggtataaactccatttgctgctgtgaagatatcattcaggaatacaaaaatatagccttctaagttaaaagcaaggtcagacccagctgctatgaaagccccgagaataatggcaaagacactgaggatgatgttgagtgaatactgcttcccaagtatgatggtttccagaagtaaggtaagtggaatggtgaatttcctgagcacggtgaacatcggtaggcttaatttacttgtgcttgataatccacttatgtggtttccaacgtagaggagaggcagaggaaacagctttacaggaattttcttatcaaaatcagggaagtgaatgattttgtttagcttggacacatatagtatcattatggtggctgccatctgtccaattccaaggaaaattggtgacgggaaaccgtaggtggtcagcagcgccttgttgacaagcacgatgaggaaggagcaggtcccgtagaagagcgccgacagcagccgggccacccgcgagggcagccgcgccgcgccgggctccccgccagcgccctcggcctcggcctggccgccggccgtcatctcctgcggccccgcggaccccgccgcccgccagcgccggctgcgcactggtcccgcccggccgggccgcgtaagcggacn

SEQ ID NO: 20971 - DNA, 756 bp, Homo sapiens
acgcgggggcttttgctcggacctggagtaatgagagtggacgtttgattccaacaggatggcccatttctccagcgaggaccaggcgatgctgcaggcgatgctgaggcggttgttccagagcgtgaaggagaaaatcacgggtgccccttccctggagtgtgccgaagagattcttttacatctggaggaaactgatgaaaattttcacaactatgaatttgtgaaatacctcaggcagcatataggcaacactttgggttctatgattgaagaagaaatggaaaaatgcacatctgatcggaatcagggtgaagaatgcggctatgatacagttgtacagcaggtcactaaaagaactcaagaatctaaagagtacaaagaaatgatgcattacctgaagaacattatgatagctgtggtcgagtctatgattaacaagtttgaagaagatgagacacgaaatcaagaaaggcagaaaaaaatccaaaaggagaaaagccatagttaccgcacagacaattgctctgatagtgattcatcattgaatcaggtgtgttgttcagttttgcatttatgtcttgaaatgctgtttaataataattagcttcaataaattatttcttagccatatttttcctgccttcttaagattcaggagaaaaataataaaacttaataccctaatattaaatatttagtccatgaaataacatcttatagaattatatttggtgagtagctacgttatatctg

SEQ ID NO: 20972 - DNA, 523 bp, Homo sapiens
  misc_feature 1, 2, 3, 4, 5, 6, 520, 521, 522, 523: n = A,T,C or G
nnnnnngcaggtactagagtggaaatcatccaatgttggcaaaatacacactccagcctttttctttttgtttcttgtcctttatttgttttcttggtttgaaagaactgaggtcttgcttctagttgcccagtgcctgaatgccagcagccttgaacttcctggcttcaagctcctcttgccttagcttcttgagtagcagggactccaggcacgcaccaccctgcctggctgatgactgttccttttttctaaagtcttttttgtttgtttaaagcagtttgtggactatcggatctttatttagaatgaacagttgcacaacaacaaaatggctcttccatacaaaatcagaatggatccacttgggaaaactcaggcttttagtgtggatattgatattccagagaaaagggagtagagctcttcttactctgccaattgagggagtttctcactctctcatcataacttgtaaagtttcatcctttacctttgattccctccaccatgctttagnnnn

SEQ ID NO: 20973 - DNA, 1485 bp, Homo sapiens
  misc_feature 1, 1465, 1466, 1467, 1468, 1469, 1470, 1471, 1472, 1473,1474, 1475, 1476, 1477, 1478, 1479, 1480, 1481, 1482, 1483,1484, 1485: n = A,T,C or G
natggccgggagtggtgaacgacacgttcattccttaggcccctattcaccccagggaagggaaagaaacaataccttttacggcatgtaataggaagaagacctggattttagttgctgctctgatgtcccaacttgggtaaggcaacataacataaatgtcagtttcttcagatttgtgatgaagctgataatccatgctcagcttcctttatgggtctcttgcctatcaaataaggtacagtatgtgaagatacattgcagattatcttatgcattgcttcaggggatgattaaaccatcctttattatagccagagtctagtctaagggaagaaggtcattctctataccagtgaaggctccatccaaaccagtgtttgggggcatagtcataattgaaaaatgattgttttccttatctgtaaaacaggtaaatggtattaatcctcaggtggttgtgaggattaagtgatacatgtaaaaaaaagaaagctttggatagtacctattataagaaactcagtgttgctgcaatgtatgtattataatggatttgaaatttgccctaaccaagagtcacagacagaaaaaaggaagttaatgtatctcttgatcactatcaagatgtggtattgaaccttcaagatccttttcagggaatatgtgagatcaaaatttttatactggcactatgatgttatttgccttttcctcatattcacaagtgaacagtggagttttacagaagctatataatgtcatgacatcactgatgggtaatagaatgtgtgcttgtatattccgaaactttcagttccaatttcttcgatcaatgtaatcctcataagtaaaagttatttgaggacctcagacatttttaaaaatgtaaagggggtggggtcaggctcagtggctcatgcctgtaatcccagcattttggaaggccgaggcgaacggatcacttgaggccaggagtttgaaactagtctggtcaacatggtgaaaccccgtctccactaaaacaaaaagttttctggatgtggtggcacgcatacctgtaatcccagctactttggtggctgaggcatgagaatcacttgaacccagaagacaggttgcagtgagccaagattgtgcccctgcattctagcctggtgacagtgagactgtctcacaaaataaaggtgtcggggattgtctttttgacacttggtatgttgaagttgctacctcttatgtttccttgcgtttccttggttctccttcactctatatttggggaattgtcatattgcccgtggtcctttatcttccggtgttcgccgattaatgttttctcgacattggaattcgggactccagctttgttctcgaactcggtttccccccaggtgtggaccctccactcgattgatggccagggcgttaactaaggttccgtccgcttaacagagccgcctcnnnnnnnnnnnnnnnnnnnnn

SEQ ID NO: 20974 - DNA, 604 bp, Homo sapiens
  misc_feature 595, 596, 597, 598, 599, 600, 601, 602, 603, 604: n = A,T,C or G
acataggcgttaatgttcagacttttttgttttcacttaagtatcattgttgtgtctgaaattcttttctattggagaattaggagaaatccagttttgggcactctgcctaaggaatagcccttcttttattcctttactttcttaataaacttgctttcacttaaaacaaaaagtcactgcaagttgggctgtcttatttttttaaaaaatcatcaattaattaattctatttatttgcatggagcccatctacacaaaccactggcactttggacggggcatttagctggctttacccacacgcttctgcccttttatgcttcatcaatctctgagcccacccaaaagcctcacagttactgggactcccactgctcattattcatctccccctaaatccacatcatttggcaatttcaaagaaaaaaaggacaacaacctttatggatataacatagacatatatattctcaatttttgatagctcaacttgacaactccaaatggagcaatagaaggagagagtcctgtagttttcacgtgaaacaaaacaaaaacaagctggtgtccctggccactacccttctctagnnnnnnnnnn

SEQ ID NO: 20975 - DNA, 843 bp, Homo sapiens
  misc_feature 1, 2, 3: n = A,T,C or G
nnnccgaaagaggataaagtctcaggcatgggctgattggtgagcaaaagtttatttgacattttcttgggtcttcttcctctgtctggtcagattgcagaggaggatcgtaattccattttatgcaattttatctccactcacctttcataggaaatctctagaactctgagtaataattgctttgaattttagagttcaatgactgtcacattttcatctctcttttctttcttaatcatctgtctttggtggtttgatgtttttagttctatagaattcataagctacagggaggtagaacacaggacacattcagatttctttttctttctttcttctttttttttagccctgagatgtatttgacttctgaacacctagaaccctttgttttcttctttcctgtattccctgaccctttattccagttccagcttgctatttttgtttgatacatttgcagattcactgaagaccacccagcccatatatagctagctcttctgtgagatgtgtatttaaccctgaaaaaactaatgcaagaaataggagagatgaccgaagggaagactcatagattcttttccccctggcattgccaggattttcatacatctcaccactagtgagaggctgagctgcttgctttaatatactgtacctcctgctagtgacccaaacagtgtggctttgagagaccctaagttcccataaagtttgtagtactggaagcatcttcctttgcttttatttagattgctgtcaatagactgcaaaagattacatgctgtaccttgtcatctggagttctgactttaccagttggcattatatgcttgt

SEQ ID NO: 20976 - DNA, 266 bp, Homo sapiens
  misc_feature 266: n = A,T,C or G
ctaagttataaaaaaaaaccccatcaccaaagacacctgtgcacaagtgtctgtcccttctgtcaccaacctagggcactaactcctaacactgggaatggacacttgaaggaagatcagtaattatcctgtcttttctctacaaattgcaagtcagggaaaccttgttgattagggaaagttctttacataagaattcctgcaagtaagtgagtaaagaatgacagtttaagaattgtcccagcctggccaacatagtgaaaccn

SEQ ID NO: 20977 - DNA, 1445 bp, Homo sapiens
  misc_feature 1445: n = A,T,C or G
tcactaaagggaataagcttgcggccgcagttttttttttttttttttgcagtttttgctctcagctgtagccctgacatgaaacgcttgctacgtttctgcagcaaagtgggccgagcgcagtacgcacaggtgtggtgttagccagggagaccgaagccacacagaaggggagtcagtaaatgtccatctccacggtgtctgcctttgccattgggaggcctgaactaatcaaacgttcattaataggatcccagcctaacagcaacgcttatgtagcaccattcttagaaactaccaagtatcacacaggtacatgtgtatggggaccttcctcttgactgcttgtcaagaaaaggatccagagggaacttctgcccctacttccatgaagtgagatgcaacaatcatttccaatctatttttttatctcatgctaaaatgaaagtggaggggagagggaagaaggctcccattctacaattataaatgctgtcctggtagcctttcttctcttgccggctaacaattgttctaacagcatcccatggaggccagcaaatgaatgccccagggactacagccagaaaattgtgcctgtaaaatatcatattcctctggagcttggtaatatagaaattttacctctacagatgaggcaaactaaaatattgttgtaactcaaaaaggcttctgaagtgctgagttagaataaatatatatagatacatacacacactacattgctttggatgcaggttcttactaatttatatacacatgtaaagagaagatactgaagtgtctaactgtaatttagcagcagaaaaagaaaactgcttaacatatttgcttcttaatcaagttgtgtttaaagaaatgcattaatactcctatgaatttgtatcattgatagtgtatctggataatcccagtaactacagacagagaccttgtggtatggaggttgctaaatgaggggaacactaattcccccagagataacatctgagctgctttagactctggaagtggttttcagtacctgcccgggcggccgctctgaaaacacgaacatgatttccaaccaaatctttgtgctcagagccatattgctaaaaagaaaaaggcattgcagaggcaaagtggacatggggttaattaaacaaggcctctgaattcaggtgtggcatttagatcctgcaatgaatggacctattttacagaagtcagcggcaaatcttttgtattttttggtacagatggggttttgccatgtggaccaggctgctctcgaactcctggcctcaagtgatgcacctgccttggcctcccgaagtgctgggattataggagtgagccaccacgcccggctacgagttgggttttaacagaagaggaccttgaatgctgaagcttcacagggcggccaaactaaccctcgn

SEQ ID NO: 20978 - DNA, 919 bp, Homo sapiens
  misc_feature 917, 918, 919: n = A,T,C or G
ccacgcgtccgggaagggagcgtaactcttagaagtcactatggtgacggggaggtaccaggtatttgagagcaatcgccaccgctttcctggaacttgagtaaatacaatcaagtggcatcttaaatttttgctggaagtggagtcatgagactaaagatatctcttttaaaagaaccaaagcatcaagaattagtaagctgtgtgggctggactactgctgaagagctgtattcatgtagtgatgatcaccagatagtgaagtggaacttgttaaccagtgaaacaactcaaatagtaaagcttcctgatgatatttaccctattgattttcactggtttccaaaaagtttgggtgtaaagaaacaaacccaggcagaaagctttgtcctcacaagttctgatggtaaatttcatctgatttccaagttaggaagagtggaaaaaagtgtagaagctcactgtggagcagtacttgcaggaagatggaattatgaaggaacagcattagttacagttggagaagatggacaaataaaaatttggtcaaagactgggatgcttagatcaactttagctcagcaaggaacaccagtgtattcagtagcgtggggccctgattcagaaaaggttctttatacagcaggcaagcagctaatcattaaacctcttcaaccaaatgctaaagttttgcagtggaaagctcatgatggcattattttaaaagtagattggaactcggtcaatgatcttattttatatgctggtgaatactgtaaatataaggtatggtatagctacggcacgtccactgtacaattcacaacctgatgggcattccattacttcaattgcctgggctccagatgtgagaattatttgctgatggatcgtttcatactttacccttgtgtgannn

SEQ ID NO: 20979 - DNA, 463 bp, Homo sapiens
  misc_feature 1, 2, 3, 4, 5, 302, 310, 462, 463: n = A,T,C or G
nnnnnacacagaggcaaaatctgtgtcttctagatgttcctaagcaaagtgaaagcataaaaggctggagagacagccctctataaatcatgtggccttttcagtgggaaaattttttaagtcctgttcaaagtttcttttcatcttcacagtgccattgcaaatgttgccaaaatacagacaccggatgccctgaatgacgcactggagaaggtgagccgtgggcaaatcacatagcgctcacaaagtcaatctgcaccagtgggatccagctcgcatgaggtgaatgagcggaatgaccnactgaggnttttttccacacccagaggctttgaggtcccttgtgaaagaatattgttctcttgtcagacggtacacaaaagtgatctgaagtgggaaaagctcgcttctctcaaattcctaaagtgtccatttaataaatcatttcaaaaataagataann

SEQ ID NO: 20980 - DNA, 3844 bp, Homo sapiens
  misc_feature 1, 3843, 3844: n = A,T,C or G
nagctccactcagggaccagtgcgcaagcaaagcaaaactttggaagacccaattattacaagctgcctgcagtaacttactcagggcattctgcaggagctaggtctaattgcaaactttcttccttacaggacatcatcaaaaccattactctttctaatgtaacataaacctatcaatgagctgaaattaactctaaacacatggtcattcaaaagtatagctttgaccttattccagtatctccacacatggatacatttgtttacatgaaattaagaccttttttttggatcgtttcaaacgtgcttatttgataaaaaggaacagtgtacctacagttgtactggggaagagtgagaagtgcatttgcaaaacattcctgaaaataaacatcagcagtttaatagtacagaagagagcaaacaaagcaggctatcaaaaatccagagaccctcccatgggcccgccccactcccgactccctcccaaaaatgaaaacatgttacctcaggtagcatatgtctaacaccacctgcagagggaaggcggccagcccccaagaaccaccgagtgccacctccagctgaggtcctgcaacgccggagcacacactcacacaaggcacattcagcaacagtattaaataccaggaagtgggaaggaatgtacttttattgaaaatgaaaaaatataaaagtaccatcttcaaagagcatctcacaaacactgtacagcaggtgaagcattgcagtaacatacattgaaacatacagagtcgagttatacaggactagccatctaacaggtcatctggtctccgacggttgtttaacgacacacagtagaaatagagaatagaacccatatctgtttccagagtccaaagtagtatatcaggctgacagcactcaatcagtgagggctcctgaggttgcaatgattctgcaacggagtagattctctaggaaaaaagaccttgctgctaaggaaagagaattaaaaacaaaacaaaacgaaaagctccccaaagaggtactctgctcaaaatggctggtgctactggtgcactaagttgtgaggaattacctctgctcgggacagaataaaaaatcctaggcctcaaggaaaaactggtggcatccttctgggtcttttcaagtccttgcatctaaaaatcaatcttgacaaaaataaaacaaaaaaccacaacaaaagaaagccaaaccaatcccccaccctaaaggaagaaaaaaattgatgtgaagcccatccacccttctacccaggtgccttatagcaaaggtgactgcagctgtaagtcagagctgaatgacagacaaaaatggaggccagacaccacggtctggaggtagctacgctgaattccagaacccagactctctctgggttaatttcttgtttttcctgagattaaattaataccagatgtccactaggtcctaggagatccccaccaatcagatttttgccaagtcccaggaaataacctgatcaaataggagacttcagattccaagaactactgtattccacctctcccctccctcagatttttaggtttatatccattgcttgggtcaccactgtatacagccgggttgctggtttactagcaagaagattggcttcttttccagtatgcaatccaaaatgtggaactgagtcacagggccaaagcccccttttcctcacgtgaagcaactcagtaagatggcggtgcagtgaagcctgttcccacacacctcggcactgatggagcagtctccaaaggaaggctgaaaggacagcaggtggttgccttgggctccttccttcccatacctttagagtgccatttttcagcactgggtaatagcatcagcgcctcccagatgggaggagcagggaaggtaaaagacatagtgaatgtttacactatgcgaaactttcaaagggggggaaaaagaggaaacagcagattaaagaagttccaacacatcgggtttttaaataacaatgacatttcaaaccattttttaggggataaagaaaaaagaggttttcatgaaaaatccaaccaaaatttagtttttaaaaagttacaaatgtatcatttaaatctaaacaaactggaagaaaacttgagactgttagcatagctgtctggctgtggaaagcattcccagtgaataaacattaccttacctgaactcttggcgagagattctgcccagcttgactctctcattctgaccgcagaatacagccatcctgaaaattctaaagaacagcttctgtcactggttccactacagagagactccccccaaatccagatcctgacagcaccaagcaagctgcaggtggagagaggttggaagggtgggaaacttacctctctaagggttttacactgtcctttccccaaaaggccctcgagcagagttagcattcaccaagagagagcactgcaggaggcggccttctcttgcagatctacagtgcgatgctaattctttatacacagatcataggtgaggcctggtcttttagaactgtcttaatccaaaaaggccccaaagcatctctgtaagtgtagcaatgtggctacacaggaccacactgttagagattctggtactccattaacattactatgacccccgggcaccctgcacatatagcggcagtccccaccggcgtcaccaaaaccttggatcatcttggtgtataaatgtcagcatcagctggctggcaggtaaaaacaaacagaacacaacaacttgactgtgtttcatttgttctgattatggctaccaaggttcggtgaaacccgagcagggacaagaaataaaaatgccattttatttggggagcccgtatgtgggcagtctgtccttacacaggtttctgtaagaacagattaagctagtttgaaagtcgtgccagattagaaaacttgtaaaaatctaaaacgaaatgttcctcaaaaggatttaagtccacagacaggaggtttactcactgctagtactaatctcaaaaccagcctggtttttcaatttccaatgaaaaagaaacatattagaattggagttccaaaaaaggaagtgtgtattgtttacactttcaaatctataaaagagattatggatgagtccattactttctcagctctagggcagaatcccatgaaataacactggccttaaggtgctcttccctgaaacggcagagagaagaaaaagcatgctgctgctttcctgttaaaggagggctcttagctttccctggcagctagaacagtttcctagaggttagtaccccagtgttctgcaccataaatgagagaataaggaatatacggatgttcaggggagggactgtgaagccaccaagctgaatacggataggtaccatttttttcaaaaaataaaaaataaaaatcccagcaatccatggaattttttttagaggggagccaatgaagttcttgcattggccaaatggaatcaagaaagcccatgatcactttattcgcaaagcctgcatatggtgctacccagaggaatgaattctatgagatcagagcagccaccagccctgtagtgaaacaatgacagaagctcttcttgggggaagctggctctatgaaaatgtttgccattttggtaaattacataacacaacatttcagttacatggtccttcttacttaaaacttttatataaagtatgttagttggtcaattattaataatatacccacccaataccagaaaagtacgtgttctctgcttcagaaaagagatcaatcatttacaagaggcatcaaacgnn

SEQ ID NO: 20981 - DNA, 1922 bp, Homo sapiens
acctccgtgaatgtgtattcctaaattcatgctggctgaattcaggtgtaattagagactgagacccataatgaggggcaaggagctaattactcttgtcggtaaccagctgtggccataagtaaccctgttttgacccaattaatagtaaatccaatttttaatcctacagacagttgatggtgcactcgtagctgcaaaatgaaggacattaaatttggctgtgacattgagtggttacacagaagacctgcttctacaacatttggaaacattgtgaaacattactattcagttgctatttttccatctcaaaatatttttttttagttgctgctcacttatggccacagaacagtccctttttgagtaaagcagcaaggttgcttaatgacatgctatgtggttaacaagattcaactgccacatcaaggactttaaataatttcaagattttaaatgtatttatgaaatgaactcattacagcagctaatcaatgcaaactttgtcctttttctttgtctttctaagagaaactgaatttaatttaaatttaaattacagtgtctaaaacttggtaaaatattttaaatttgaataagaggaaaaaaaaacatgaatttatttatgatggagcttcatacccaggacagtagcttcttaaatgttagtaaaataattatgttaagcattaaaacaattttgaatatgtaattaagcatttatgttaaaaaacatgtttcttacgtgtgtgtgtatatatttataactgacacatgtgattctttgtacagtatttagaatccttcccttcagatagcagtcctcttgtattcagtcttgtggctaaaatagatcaaaaacatattttaaaactgttaaagtaactgtatgactcatgcttgaagttctgaaatttgggagcgttatgaggtttccatgccattaaccgctagatcatttgcattctctcacagagtaaacggaaaaaaatttagaaaacttgtaataatcctgacttctttaataaaatgtgtcctgtgtattgcttaaatccatagtccagccttttctgagttcttgagccatgagatggaggtggcctgtgtaatctactatttttagaaagttaggaaagcaaaccaaatactctctgagaggaccctatgaaatggctgtacccttcagctgtgctgcttcagactttggccaggctcccaggtgacttacgttaatagcagacttctagttagaagaggagaatttatttcattaaaaaaaaaaataagtcaaacagttcaagaaagtattcatttatgtaaaagaagtcaattggtatgttactaaagataataggaagaaaattagctcactattttagttgcatactgatgattttaaggtttaaataattagatttaaatataccgtatgtaaatgtagaagtctgtatcgtaataaatctgttgctaagtaaaatgggaatacatgacaacgaggaatgtaggtattaagaatgtcagaattagaacgagaacagtaaaagagcaaaagctgtaataatgtgtgctagtatataaacaatactctaaatacttagtttctctaattttccttttacaattgcagttttaatttataatagtctaagagcgtattcaagctgagacttaaattgcttacgtgctatagatttaggtgtattagctatttcagaaatccagaacatttgcaaaggtgcattattttatgccaaagaggattatgttccctaggttttaagcgatggcacaaaagaaagaaaaaaagtggtgccgcgcgcccgaaatttcaaacattggccgcgccagagtaagaggtcctggtccgaacggggagcggggtccaaacggggtggcacaaggggtagataagaagaaca

SEQ ID NO: 20982 - DNA, 689 bp, Homo sapiens
  misc_feature 562, 688, 689: n = A,T,C or G
caagggacgctgctttcccctggcagccacactgctgagcataaatgctttaaagtgtcagcaattgatgtgtggagagaagtatgactgcattacagcttaaagagctttcacattcaggtctctacaggagaagacgagatcgccccgatagtttgagagtaaatgggttaccagaggaagagctaagcaacatggccaacgccctggccagcgccacttgcgagcgctgcaagggcggctttgcgcccgctgagaagatcgtgaacagtaatggggagctgtaccatgagcagtgtttcgtgtgcgctcagtgcttccagcagttcccagaaggactcttctatgaggaacgaacatgatggttaagctaccttcattaagcagcatgaccgcttcctgagctcctgctgccgcatttaggccctgtcagctgtgaggccactggtgctgagtcagagggaaaagctcagaacagccttgagcagtgaagaataaagtgtgactcatctcgtcctgcccacccctcacactggactataaataccctccctgggtctgngtgcctgtattccaaaagatgcgatgaatacccagaactaggctattcatgggctgttgcccagttcaagatctgttgggtcctgagggattactattttgctatggttatcattacagcccgggnn

SEQ ID NO: 20983 - DNA, 829 bp, Homo sapiens
  misc_feature 1, 2, 3, 829: n = A,T,C or G
nnngacctcatgatccgcccgcctcggcctcccaaagtgctgggattacaggcgtgagccaccgcacccggccaatgtacattctctaaagtcacctgtcaataacacactaggcctgcctcctgcctgctataaatatcctcaacaggttataaacagcagcaggctacctgtgttcattgcaagtaaattactcatcatttgtaggttaaaagcataggcccgacttcttaaataaacatagggaatttgctgcagcagcaggccagaaaccactgtttcaaatctgcaagattttcctatcaggtgggaagacagagataagaaatatggtaaggcctgaaaaattgcaaaagtagaagcaagtcaggtttgctgatctaagagctaagtttgatcccaaatgcactgaagaagttagaggagcttaaagaagtctcaggaagcattttttaaaatgtgaaaacatcaggctcactatagcttccaaagaacaacataaacgagcatcagcagtcatacaatgacagtatcagaaatggcactcaagtgcatccccccagtacaatgcattgcacacaacacaataagacatagtaaaaaacattaacacaaaacaggaattctacagcaaagatgcaaaactgaattctaaaatacaggaacaaatacttttctaaatgaaaagttttccatacttttcttaaaaaaaaaaaaaaaaaagtccccataagatgccccatatgggaaagtcaagaaaagaataaatagagctgaagggaagagggaaaagggagaaacaggtgggcagagtgccaatttacaggan

SEQ ID NO: 20984 - DNA, 1426 bp, Homo sapiens
  misc_feature 760, 1425, 1426: n = A,T,C or G
acaatgggcagtgtttggatccttccctggaatcagtgacgaatgcatggtgttctgcccaatgagaatgaaccatttgaacaaatcaagtaacctcaaaggtgtaattctcttggcatcgttaatgattattggtaggagtaaataagtgcaattcttttgttgttcttttttggagatgaggtgtctctgtgttgcccaggctggcctcaaatccctgggcttaagcaatcctgctgcctcagccttgagtagctgggatcacagacatgtacgcggggagctcaaagcccgcaagagggttctggaagcaaaggagctggcgttacagcccaaagatgatattgtagaccgagcaaaaatggaagataccctgaagaggaggtttttctatgatcaagctttgctatttatggaggtgttagtggtctgtatgacttgggccagtggctgtgcttgaagaacaatattattcagacctggaggcagcactttatccaagaggaacagatcctggagatcgatgcaccatgctcacccctgagccagttttaaagacctctggccatgtagacaaatttgctgacttcatggtgaaagacgtaaaaaatggagaatgttttcgtgctgaccatctattaaaagctcatttacagaaattgatgtctgataagaagtgttctgtcgaaaagaaatcagaaatggaaagtgtttggcccagcttgataactatggacagcaagaacttgcggatcttttngtgaactataactgtaaaatctcccattactggaaatgatctatcccctccaggtgtcttttaacttaatgttcaagactttcattgggcctggaggaaacatgcctgggtacttgagaccagaaactgacaggggattctcttgaaatttcacaagacttttggagttcaccccaggaaagtggccttttggtggttgcccagatgggaattcttttggaaagggatctccctggattggtggtccggagtcggggaatcccatgggaattgggcgtgtgaatccgggaaaaaccccagttcgaggggaatcctggttgttgaacccggtcgtaacgcgaaagcgtgacggtcgcggaatccacagaattggccaagggctttcgcgcttgcttgctgctgctgggaggagagagttggtgtcgcggtcactctgacaagagcaacagacagaagagaacaggaaaaaaagaggaaggagaaccaaccagcaatgagacagcacaccaaacgtaaataacacacaagcgcactaaacgacaccgacgacaaaacacacacaagcaaagaacaaaaaagaatcagaaagacagcaaacaaaacaacacacacacacaaaaccacacaagcaacgacaacaaagaacaccaccgagacaaaacgann

SEQ ID NO: 20985 - DNA, 491 bp, Homo sapiens
  misc_feature 1, 2, 3, 4, 5, 6, 7, 8, 9, 10, 11, 12, 13: n = A,T,C or G
nnnnnnnnnnnnncgaaatacttctagaattaattaacgcgggtacagcctgcagaactatgagcaaaagcacctcttgtcttgataacttacccagcctctggtattcctttccagcaacacaaaggggctaaggcagtgacaacattcagaatatattcttcatttgggggatgagtattgactggcaaggaccacatcagaactttgtggcatgggggaaaatgttctctgtctttaactgggtgttactttacaattataattatattaaaatttattaagctgtgcctttaggtttttttgcagtatactctacgcaaattttacctcagtgaagaactgttagcatacaacagacagataacaaacactcaaaaaggtgaaaattgacagaaaataggtaacaaatatttagcatataaataagagggatccgttgagaagaaaccaaaagcaacggaatagaacatagacaaaaaaaaaaaaaa

SEQ ID NO: 20986 - DNA, 743 bp, Homo sapiens
  misc_feature 714, 735, 736, 737, 738, 739, 740, 741, 742, 743: n = A,T,C or G
acaaaattaacaggattttaaagggaaatgaggaaatcacaaagagccagtgttagaggctgagtgaaccagagatctgaccccaacacacagcacacacccagatatgttgcctaatatgtgtaagggtttgttttttgttttaacttccaaactaaaacccctgatgatttcagaacactgtaacactggacagtttctcacagcatggttgtgaggatgaagtaaaaagagaatgtaaagaataagtgttttctttgtaagtgtggtcccggtatcacttatgcatatgcatgtccctctgtataaagaagggtttaaactctcgaagtcacctataattgcagttaccctttcgtctgcccactcttgcattttctctgcctcttggccaaggcagtgacttggaggaaattcacttggtggaagagatatggaggtgagaaatcggactgagtagaaggcatcttacattacacgcagaaattaaaaagcacttacttagtatcggggaccatacgctggcatagttctgtgttagctcattcccacttatgtaagtcgccccaagcagagcgtaaaacattaagtaaccttctcctcccttttgtctttcagattcctttgtgacactgaatggtaaggaagatattactctcataattccatactggtggaaacctatctgagaatgtctatttcattaatcctctngagtatgttcaaatcttaagnnnnnnnnn

SEQ ID NO: 20987 - DNA, 186 bp, Homo sapiens
acgcgggggtatttcggggccctaggcgcgcgagcggtcagcatccggaatctggcccctgcaggcgtggggttccacgtgggaggagacttgaatgaaaattctgtggagaatcttcaacagaaaacacttcaggatctgttacatgagctttcctcctgactagttttggaaggcatggccagt

SEQ ID NO: 20988 - DNA, 836 bp, Homo sapiens
  misc_feature 1: n = A,T,C or G
ncgtccgtgccttcagatccctgggatccttgaagttggctggatcccggcctattggagcgttggtcagggctgctgcacgtggaaatccagaattgaggccctccaacccctttgcctatggagggagaaggaaggttcactatttattcccagacggcaaggaaatggctgaagaatatgacgagaagacgagtgaactacttgtgagaaagtggcgtgtgaaaagtgccctgggagccatgggccagtggcagcttgaagtaggagacccagcgcccctaggagcagggaacctggggcctgaactcatcaaggaaagcaatgccaatcctatcttcatgcgcaaggacaccaagatgagtttccagtggcggattcgaaacctcccctatcctaaggatgtctatagtgtctctgtggaccagaaggagcgctgcatcattgtcagaacaaccaacaagaagcggactggttggaggcttctctggacccctctggccatgcggtgtgcaggtgtgcatggcaccccctctgaggtactacaagaagttctccattcctgatctagatagacaccagctacctctggatgacgccttgctgagctttgcccacgccaactgcaccctgatcatctctgtaagattcacccagacttcttggacactgcatcagggagagtcttcctctttccctgcccacttcccatcccataagagtcctcagttctagccccaagccctagggtatgcttgtgggagaataggcatctctaattcagcatgggggagagcagggagggggctcaggaaggagcctgaccatataattca

SEQ ID NO: 20989 - DNA, 902 bp, Homo sapiens
  misc_feature 901, 902: n = A,T,C or G
attaattaaggcgggaccattattagaattcagctatctttattcccaacctagtgtgttttccataataatgtaccttttaactatgtcaaagatagcaaatacagttcatctgtgtcaactttaatcagttgatagtggctgtctagcacattgtgaatggggtcaatcagaaagaatgtcattagatcaattagctattactttatattacctaaacttagtataatttaaaatttgataatgagtttattcagtttataaagagttctgtttttggcatggcctagtagctccattgcacaattccttctgcagaaaactactataacctatgaacaaaataggaaaaataactacccgaaagcactggagagcaaacaaaagcagacagaaaatagaagtcaaacattgaaggaaggaaatagcactgggtgagtcccctgccaggtagggtggctgaaactcttgacaaacaaaacccctcagtcttgttggtctgaagaaccaaggacagggtttggtgtagctgcaggccttggaaagtgcgtgtgcatgcatactcaaagtaaattaaattgcctgcttaaatgaaaaagaaaaaaattattcagaaaaaacagaacccaaactttctactcgtattactcacaacatttgcagtagaatgcaaaattattcagtgtacacagaaacaagaagacatgaaccattctgaaaagaaatcaatggactaacttcaagataactcatatgttgctattagcagacaagaatcttaaagcagctgttgtaattgcttaagaacataagggaaaatatgtttgcaatgaataaaaataggaaatattaacagagaatttgaagtaataaaaaagacccaaatataaattctaaaacnn

SEQ ID NO: 20990 - DNA, 1567 bp, Homo sapiens
  misc_feature 1, 2, 3, 1305: n = A,T,C or G
nnncagctatccagatagtcctttctagaaatgtttttttgcttactcaccttgcaattttcttctcatctacttaactggttatctggcctgtgtaagatttaattaatattgactaccttttcttggtgatgaacaaaatgatatcctatacagaaatgaatttcctaagggtttaaaccctgttttcactaacattttctactttttcctttttcagaacaggctattctatttcttagctcataggctttctttttaaagactatatgatcattcactcctttttctctggaagaactgtgtaagttgcttaaaatgcatagcagttagctagaaatatcagtgccatggatgatcaaaaatttgaataactaatttttaaagataaaattctttgcatgattttttttctagggccataccttttggtgcaaccagaatcagaaaatggcctctgttagtaagcttatagaaacctaaaaataataatggaattatattgtaatttgactgcttggaatttgtgtaagtaccatatggcccaaggcactattatagtatcctcactttaaaaaaaaaaacacttggaaccacaatgtgagtaaaatattatagcagaacgctttgtggtagacactgaaaatgttgttgattgatggatagaattaacttctcctcccccaccccagcacacacctgtgaagccaatgatactataaagacataaagaaatcagctactttatatttaatagagagtgaggggagggaaaggagagtgtaggaataagtgaactgggcttatagtcttgaagagttgcctaaaagataatattttctcattgactctgtttttgattaattttacagttatgattgaaaaagaacaaaatgaacttcctttaaaatgaaattaaaatgtgaaacttgctgacttatttttgtagtagaacttgttaacatcatgttaagggtgctttagtatcacagtctgtgatatatcagaaagggcattagagctatctctatgagccagggagtcctaggctttagtatcccatgtctgccgttttctaggctgagtctatttaattctcagatcctttgtttcctcaggctatcaaatgataaggaatgtaggtaggaccccaaactatgttctgtgggaccaagatcactgttttaggggataatcgtaggaatgtaggtataagtatgtaattggccatctaagtttaggaaaatctgtttgctacacacatacacacacacacacacacacacacacacacacacacccctnttagagagtcatatgtaggattatagaggtaaaaagagatgatattaatgctggaatagcgcctgtaaactggggctgtctacagcaaattaggatatatggtcactgtgctcattgtgaacagtagcttgttcgaggctttaagaaaattctggtataaatctgtcttactctgcatctagtagacagcctggcatgtaattgatgttccttaaatatttatcgaattaacccagaattttctaaactaaatttagcatgt

SEQ ID NO: 20991 - DNA, 674 bp, Homo sapiens
ataaataagtcaatggtataataattataggtttattaaatatattttgatataagaaaatatgccatcacttaaaaatagttaatgctacaagaaaaaagttaatgttatttatgatgttcaactttttggtataatattatattttctacagcttagtgcagattgcatttttgtttaaaagaaaatatgactaaggcatagaaaaaataccacacacacacacacaccaaaatgttaatagttgtctgctgtgaaatgatatcatgaatgacttttaaaaaaaaatttctctgcgcatttctgtattcttatatttcttttaaaatttacatgtattactttattttgaaaaacttctactttaaaaatgaaaaataaccttcttcttgttttttctatttcttctgtttgttaacacgaagtgtttttgcatttcttcaaggctgtattttcactcttcaagttcgcactgagaaggatggccatttcagaggactgggaaatcctgagggccacccaaatgctggacgcagtgttggccagtgtcatgcttctccctgcagtttaatgaaatgtggcaatggtgggacatgcatagagagtggaactagtgtttagtaagtatgacgttattaggaatgaaagtagcaggttgtttgcactctaaatgg

SEQ ID NO: 20992 - DNA, 615 bp, Homo sapiens
  misc_feature 593, 594, 595, 596, 597, 598, 599, 600, 601, 602, 603, 604,605, 606, 607, 608, 609, 610, 611, 612, 613, 614, 615: n = A,T,C or G
acctttaaaaatacatcttttaaatgaactcttactgagagaataactactaaaagtttaattgtagttttttattataatattttgctttgattttatactaaaaactgccaaccagataacatctaaatgtatctttttcaatatgacaaagttacataagaagactccccttgcacgtaaagaaaaatgcaattattttctattctgaatctccagactgctgttttagaaaatcatatctgattatttgctcagcagaagattattgagttgatttagctgtgattttacttaacaaagcttcaactgcattcctactgtggagtccgaaaaaggtagagagatataaatgatacattcaaactgtgatttttgtgaacagggccatcgatgcacccctcggagctaatagcggagatgagaaacagtgggtttgcactgaaacgaaatgtactggggagaaacttgaccgcaaatgatccatcacaggagtatgttgcaagtgagggtgaagaagatccagaagttgaatttttaaagtcactaacaaccaaacaaaaacagaaacttctcaggaaattagatcgacnnnnnnnnnnnnnnnnnnnnnnn

SEQ ID NO: 20993 - DNA, 340 bp, Homo sapiens
  misc_feature 338, 339, 340: n = A,T,C or G
acacctaggaggtaatactagaaacaattgggtatacccaaccctcataccacaatgcaaaagtaacattaattaacactgtcatgaaatgcagttctaccaaaacaataaagttgtttagtggagaaaatattttattttgctttcatttttaattttaaattaagtaaaatttgaaagttcttttgcactagcccacctatcaagtagtcagcagccacgtgactggtatagtggctctggccatcttttcctcatgtggaagaattttctatctttaataaactttttctttgttttttttttccagatggagtttcgctcttgtcccccaggcnnn

SEQ ID NO: 20994 - DNA, 1529 bp, Homo sapiens
  misc_feature 1528, 1529: n = A,T,C or G
gcgtccgcggggcctatttccggtcagcccccggcctgacgcggcgttgcgtcccccgggagctgcgctaggcgaacggctgcggcgctttgtgctccagtcgctcctaacgctccctggcccggccggggccgcgcagttagggcatctgaggcggggagaagcggcggggagacgccggctgccagcatgtcgctgcctccggagaaagcctccgagctgaagcagctcatccaccagcagctgagcaagatggatgtccatggtagaataagagaaatccttgctgagactatacgggaagaattggcacctgatcaacagcatttatcaacagaagatttgatcaaagcccttagacgtcgaggaatcattgacgatgtgatgaaagaacttaattttgttactgacagtgttgagcaagaactcccttcctctccaaaacaacctatttgttttgatagacaatcgacattaaaaaaaactaatattgatccaacacggaggtatctttaccttcaggttttgggtggaaaagctttcttggaacatctgcaagaacctgagcctttacctggacaagtttgttcaacgtttactttatgtttacattatcgaaaccaacgttttcgttctaaacctgttccatgtgcctgtgaaccagattttcatgatggctttttacttgaagtacacagagaaagcttgggtgatggaactagaatggctgattcaacaacaatgttatcaataagtgatccaattcatatggtgctaatcaaaacagacatatttggtgagacgactttagtagcatcatattttctggaatggcgatcggttttgggctcagaaaatggagtgaccagtctgactgtggaacttatgggtgtaggcacagaatcaaaagtttctgtgggaattttaaatataaaacttgaaatgtatccaccactcaatcaaacgttatctcaagaagtagtgaacacacagcttgctttggaacgtcagaaaactgcagagaaagagcgattatttcttgtatatgctaagcagtggtggagagaatatttgcaaattcgaccctcacacaatcacgactggttaagattttgcacaggatgaaaatgggataaatagaccagtctgttcctatgttaaaccacttcgagctggaaggttcttgatactccaaggaagcagcaagattgtaatgttcctggttatgaacgagccctgttatgggggggaggtcaccggagccagggtgacctctgctgggctttctcgtgaaacaggtgccgggagatacgctacctcgtgcagctcgtctgacttgattagagcttggggtgggccacgcaagggacccagaagggtgaactgggacgagcgcccatttgggactaaggaggcatcctagcaacgtaacgcagggcacacaggccacataagggccagttcgaagaccttgacacttggcgaacacaggcaagtgacccgtaggtagaggcgctccgcgtctcgnn

SEQ ID NO: 20995 - DNA, 883 bp, Homo sapiens
  misc_feature 881, 882, 883: n = A,T,C or G
acaatcttttagactaaaatggttttgctttgaccccaataatcacaattattattataacttcggaaagatttcaatcattcattcactcaatcattcaattggctttttttcttaattatctcatctgaacagtgttgctaatggcactgtgaaggattttataaaaggaggaaatataatcgttctctcatcaactgtagtagaattggagagaaaagaaaaccttgaagaactaattgaataatataataaaattactgttagcaatcataccttagtagtgtgaagggaaaagctatttctgcacaggtaggaagcagtattaacaatcaaatacaacttttaggctcagaatataggttcagattatgtgttgtgagaataatgagaatattcagaataaaggctaattcttggaaatggattttagaattttcaactgatttcatcagcaaaaacataaggctttcatttcataaaaactttaaaaaatgtaactatgtcatcctgttagtgattaattcaactgtctaaaaattacaaatattttactttattgaaggtttatagtaaaatacgtgtgtgtgtttcgaaggctgggggcttggtggatttattggtgcccttattcaactttgcaatagtcttccatagtttggacatgaatgtaaattgaactgttttaaaaatagtttacatcattgcttgtgcctatcttttgaaatatgtcaacttcctcactatcttgagaagatagtctaacacattctatgtgatggaaaacttttcaaagctgtctttcacatcccaggatgtgtaaagccctgcccatagcttcattctctggcagaaatattataccatttacccacatagannn

SEQ ID NO: 20996 - DNA, 867 bp, Homo sapiens
aagaggctggccaaaaaaaaataaaaagacaaaatgaggagaaaagaaaccagtgacaaaagggatcagtgaacacagtgcctgaattagggagaagaaaagcactgattaagaacacaagccctgtacccaaattaccttgatttaaaccccagctcgcccatttattagccgtatgaccttggacaagttatagaatctctttgggtctgttgtaacatggtaataataatacctacctacctaacacacagggtggttgtgaagattaaaggagttgccacatgttggaagcatgcttatgctaacaggcatactcatgaagtatcagctatttaaattatcatcctccctcaacaggattctataaactggttccaagataaggtaacctgggataataaagttttctgatttggttagaaatacacctagaaaacttagaaaccaggcaaatgtgaaacataaagagtagatatctgggaacaaaaaagtatattataaaatgccaatactgtcaattcatataaaaggcatcttaatcaatctcccactccccacaaatggaaagcggaggatggtacccttttctttttttgatgggggcaggaaaaataggtaatggggaaaaaaatttccaaaagtaaagttttcacaaattaaagatatcagttaaatacacctacccctacagctctaagaaacgctaagtactatgtatcaggatttagaacaactacatcaatgcatattatttcttgcatatttgtttttaaaaacaactctccctttattgaatatgtgcagcattatcataaacaattcataagtacttgtgtatatttttaaaggtttcttcggacgcgt

SEQ ID NO: 20997 - DNA, 2631 bp, Homo sapiens
  misc_feature 1, 2, 3, 4, 2612, 2628, 2629, 2630, 2631: n = A,T,C or G
nnnnagccgacccacgcgtccgcttaacactgaacccattacttttccaagaccagaaaaaaatattacatgaacaggaactacttctccttcagataagaattcaagctttgacattgtaaaccacagacgaattggagcttggcattgaaaggaggtgttctgcaatgattttttttcttgtttagagaagtttacttctacaagaagaaatctgaaaaatgacaggagcaaagaggaaaaagaaaagcatgctttggagcaagatgcataccccccagtgtgaagacattatacagtggtgtagaaggcgactgcccattttggattgggcaccacattacaatctgaaagaaaacttgcttccagacactgtgtctgggataatgttggcagttcaacaggtgacccaaggattggcctttgctgttctctcatctgtgcacccagtgtttggtttatatgggtctctgtttcctgccataatttatgccatatttggaatgggacatcatgttgccacaggcacctttgccttgacatccttaatatcagccaacgccgtggaacggattgtccctcagaacatgcagaatctcaccacacagagtaacacaagcgtgctgggcttatccgactttgaaatgcaaaggatccacgttgctgcagcagtttccttcttgggaggtgtgattcaggtggccatgtttgtgctgcaactgggcagtgccacatttgtggtcacagagcctgtgatcagcgcaatgacaactggggctgccacccatgtggtgacttcacaagtcaaatatctcttgggaatgaaaatgccatatatatccggaccacttggattcttttatatttatgcatatgtttttgaaaacatcaagtctgtgcgactggaagcattgcttttatccttgctgagcattgtggtccttgttcttgttaaagagctgaatgaacagtttaaaaggaaaattaaagttgttcttcctgtagatttagttttgattattgctgcatcatttgcttgttattgcaccaatatggaaaacacatatggattagaagtagttggtcatattccacaaggaattccctcacctagagctcccccgatgaacatcctctctgcggtgatcactgaagctttcggagtggcacttgtaggctatgtggcctcactggctcttgctcaaggatctgccaaaaaattcaaatattcaattgatgacaaccaggaatttttggcccatggcctcagcaatatagtttcttcatttttcttctgcataccaagtgctgctgccatgggaaggacggctggcctgtacagcacaggagcgaagacacaggtggcttgtctaatatcttgcattttcgtccttatagtcatctatgcaataggacctttgctctactggctgcccatgtgtgtccttgcaagcattattgttgtgggactgaagggaatgctaatacagttccgagatttaaaaaaatattggaatgtggataaaatcgattggggaatatgggtcagtacatatgtatttacaatatgctttgctgccaatgtgggactgctgtttggtgttgtttgtaccatagctatagtgataggacgcttcccaagagcaatgactgtaagtataaaaaatatgaaagaaatggaatttaaagtgaagacagaaatggacagtgaaaccctgcagcaggtgaaaattatctcaataaacaacccgcttgttttcctgaatgcaaaaaaattttatactgatttaatgaacatgatccaaaaggaaaatgcctgtaatcagccacttgatgatatcagcaagtgtgaacaaaacacattgcttaattccctatccaatggcaactgcaatgaagaagcttcacagtcctgccctaatgagaagtgttatttaatcctggattgcagtggatttaccttttttgactattctggagtctccatgcttgttgaggtttacatggactgtaaaggcaggagtgtggatgtattgttagcccattgtacagcttccttgataaaagcaatgacgtattatggaaacctagactcagagaaaccaattttttttgaatcggtatctgctgcaataagtcatatccattcaaataagaatttgagcaaactcagtgaccacagtgaagtctgagacccttttgtcacagtacagctcttgtctttaccaactgcctgaagaggccatatgctggcattttgcacaactttttggttgtttagatcctacagatgacctctgctacaataagtacgatgtgacttagtaactgcatagcagttggaaagaactgccaacttttttttctcatttttgttagtaagaagattcgcttagttattttatgtaaaaatcagtatgtgtttagttttagtgtactgaagggtaaacatggttttattttattttaccatattattttgtgttgttttatttctattgtgctgtaagttgatgtttaaaattgagaaatacttttgtcataggtaatttggaacatttacaatccatttgtaaaattttaagagtaattctgtaactaaataccataanaaacaacttagcaaannnn

SEQ ID NO: 20998 - DNA, 1941 bp, Homo sapiens
gcgtccgacatatctgaagtatatcgctcagagtttttacatgtgtaactaccatgtagattaagatgtaggacatttcctgatgctttagagggttctcctgtgcccctcccaattcactaaaaataaccactatttcatttctatctctgtcagttacttggaaacttaacttcaaatggtgtgatggaaatcaacatgcagagaaagagaaatgcatatacgaaaagataatcctataatctaaagatggcgatggcaccatcacaacaaaggaacttggaactgtcatgaggtcactgggtcagaacccaacagaagctgaattgcaggatatgatcaatgaagtggatgctgatggtaatggcaccattgacttccccgaatttttgactatgatggctagaaaaatgaaagatacagatagtgaagaagaaatccgtgaggcattccgagtctttgacaaggatggcaatggttatatcagtgcagcagaactacgtcacgtcatgacaaacttaggagaaaaactaacagatgaagaagtagatgaaatgatcagagaagcagatattgatggagacggacaagtcaactatgaagaattcgtacagatgatgactgcaaaatgaagacctactttcaactcctttttcccccctctagaagaatcaaattgaatcttttacttacctcttgcaaaaaaaaaaaaaaaaaaaaaaagttcatttattcattctgtttctatatagcaaaactgaatgtcaaaagtaccttctgtccacacacacaaaatctgcatgtattggttgggtggtcctgtcccctaaagatcaagctacacatgagttttacaatataaatacttgtactaccttaatgataaggactccttaaagttccatttgctaatgattaatacactgtttgggctggccagtttttcatgcatgcagcttgacgattgagcacagtcaggcctttgtattaaaaatgaaaaatgaaaaaacaaattcaaaacctattcaaatgggttctagttcaatttgtttagtataaattgtcatagctggtttactgaaaacaaacacatttaaaattggtttacctcaggatgacgtgcagaaaaatgggtgaaggataaaccgttgagacgtggccccactggtaggatggtcctcttgtacttcgtgtgctccgacccatggtgacgatgacacaccctggtggcatgcccgtgtatgttggtttagcgttgtctgcattgttctagagtgaaacaggtgtcaggctgtcactgttcacacaaatttttaataagaaacatttaccaagggagcatctttggactctctgtttttaaaaccttctgaaccatgacttggagccggcagagtaggctgtggctgtggacttcagcacaaccatcaacattgctgttcaaagaaattacagtttacgtccattccaagttgtaaatgctagtcttttttttttttttttccaataaaaagaccattaacttaaagtggtgttaaatgctttgtaaagctgagatctaaatggggacaaggcaggtggaggggaggccagtgtacatgtaaatgcccacagcccagcattgggtttccctcccaaggccccagcaccaacctctgagcccaagaccttgcctgaaaacaagcagatattgatggagacggacaagtcaactatgaagaattcgtacagatgatgactgcaaaatgaagacctactttcaactcctttttcccccctctagaagaatcaaattgaatcttttacttgcctcttgcaaaaaaaagaaaaaaagaaaaaagttcatttattcattctgtttctatatagcaaaactgaatgtcaaaagtacgtgccaagcatcctcgtgcgaccgcgagagcccggggagcgggggcttgc

SEQ ID NO: 20999 - DNA, 390 bp, Homo sapiens
acaaattagccattcatgcaacaggcagtgttcaaagaggcttcaagttcaagggagctcagagttccattttccaccgaaaagctttaaacagactgaatattagtggacatttttgaatagttttaaaacataattttacacctgatcttagccagaaggctgagaagtgataacaaaagtgtcagtattctggagagatattcctcagttgttatcacttaccacagtaactaacatcgatgttggacatgctgtttttataacaacattctttttttatattattctttaattttataagacttcataggacacaggcaatacaaatctgctatgttattcctttttgtctctccttgtaatttacaacctgaaaatgttgactgt

SEQ ID NO: 21000 - DNA, 3499 bp, Homo sapiens
  misc_feature 3490, 3491, 3492, 3493, 3494, 3495, 3496, 3497, 3498, 3499: n = A,T,C or G
gggagtcgacccacgcgtccgaaaaaaaaaaaaaggggggggggggctgcttcctgccgctcgacgccgcggcaggccgcatgggggagcgctggcgaggcacggacggcgggcgcccggtacctctgcccgcggtcctcgctctcgggcggggcggcggcgacgcggacctgcggactagcgaacccggagcacgacatcataaaataaatccatcagaatgacaccttctcaggttgcctttgaaataagaggaactcttttaccaggagaagtttttgcgatatgtggaagctgtgatgctttgggaaactggaatcctcaaaatgctgtggctcttcttccagagaatgacacaggtgaaagcatgctatggaaagcaaccattgtactcagtagaggagtatcagttcagtatcgctacttcaaagggtactttttagaaccaaagactatcggtggtccatgtcaagtgatagttcacaagtgggagactcatctacaaccacgatcaataacccctttagaaagcgaaattattattgacgatggacaatttggaatccacaatggtgttgaaactctggattctggatggctgacatgtcagactgaaataagattacgtttgcattattctgaaaaacctcctgtgtcaataaccaagaaaaaattaaaaaaatctagatttagggtgaagctgacactagaaggcctggaggaagatgacgatgatagggtatctcccactgtactccacaaaatgtccaatagcttggagatatccttaataagcgacaatgagttcaagtgcaggcattcacagccggagtgtggttatggcttgcagcctgatcgttggacagagtacagcatacagacgatggaaccagataacctggaactaatctttgattttttcgaagaagatctcagtgagcacgtagttcagggtgatgcccttcctggacatgtgggtacagcttgtctcttatcatccaccattgctgagagtggaaagagtgctggaattcttactcttcccatcatgagcagaaattcccggaaaacaataggcaaagtgagagttgactatataattattaagccattaccaggatacagttgtgacatgaaatcttcattttccaagtattggaagccaagaataccattggatgttggccatcgaggtgcaggaaactctacaacaactgcccagctggctaaagttcaagaaaatactattgcttctttaagaaatgctgctagtcatggtgcagcctttgtagaatttgacgtacacctttcaaaggactttgtgcccgtggtatatcatgatcttacctgttgtttgactatgaaaaagaaatttgatgctgatccagttgaattatttgaaattccagtaaaagaattaacatttgaccaactccagttgttaaagctcactcatgtgactgcactgaaatctaaggatcggaaagaatctgtggttcaggaggaaaattccttttcagaaaatcagccatttccttctcttaagatggttttagagtctttgccagaagatgtagggtttaacattgaaataaaatggatctgccagcaaagggatggaatgtgggatggtaacttatcaacatattttgacatgaatctgtttttggatataattttaaaaactgttttagaaaattctgggaagaggagaatagtgttttcttcatttgatgcagatatttgcacaatggttcggcaaaagcagaacaaatatccgatactatttttaactcaaggaaaatctgagatttatcctgaactcatggacctcagatctcggacaacccccattgcaatgagctttgcacagtttgaaaatctactggggataaatgtacatactgaagacttgctcagaaacccatcctatattcaagaggcaaaagctaagggactagtcatattctgctggggtgatgataccaatgatcctgaaaacagaaggaaattgaaggaacttggagttaatggtctaatttatgataggatatatgattggatgcctgaacaaccaaatatattccaagtggagcaattggaacgcctgaagcaggaattgccagagcttaagagctgtttgtgtcccactgttagccgctttgttccctcatctttgtgtggggagtctgatatccatgtggatgccaacggcattgataacgtggagaatgcttagtttttattgcacagaggtcattttgggggcgtgcaccgctgttctgggtattcatttttcatcactgagcattgttgatctatgccttttgggcttctcagttcaatgaagcaataatgaagtatttaactctttcactacagttcttgcaagtatgctatttaaattacttggccaggtataattgccagtcagtctctttatagtgagaaaatttattggttagtaatataaatattttaaactaaatatataaatctataatgttaaacatatgttcattaaaagcatagcactttgaaattaactatataaatagctcatatttacacttacagcttttcatttgatcaggtctgaaatctttagcacttaaggaaaatgactatgcataattatacctgaccatgaaaaaaataagtacctcaaatgcatgcatttgcactggtgattccaactgcacaaatctttgtgccatcttgtatataggtattttttacatgggttgacatgcacacaacaccattttcattcagtatgaaccttgaggctgctgccatttttccacttaaccaaaccagcctgaaggtgaacctcgaaacttgtttcataaatctttcaaaagttgttttacatcaatgttaaaatttcaaaatgctgcagggtaatttaatgtataaaatattagtaagaaaaagtatgtattgcatacttagtagaatagatcacaacatacaaattcaattcagtgcatgctttaggtgttaagcatgagattgtacatgtttactgttaggtccttgcatctgtggtgctaggtgagtatgagaagatgtcaaggactggacgtattttgttgcctaaaaaaaaaaggctgtttgtaggcgttttaaatatgcttattttgtgtgtctctcactacctattacacactgttgctttgtgggtttgttttgtatgtgcgtgtgttatacagtagttaaatttccatgcagaaaaataaatgtcctgaattctcatattagtattctttattgtatatcatgcatgtaatttatttagaaatgtaggtcttactaaatgtatatgcatgtatttcagattatactaggatttcttggattagaagcagattgtgttaactgtaacttaaagaatgaatgttaaataaaatgatacagatttattttcttcattacaaaaaaaaaaaaaaaaaaaaaaaaaaaaaaaaaaaaaaaaaaaaaaaaaaannnnnnnnnn

SEQ ID NO: 21001 - DNA, 562 bp, Homo sapiens
  misc_feature 1, 2, 3, 4, 500, 559, 560, 561, 562: n = A,T,C or G
nnnngctttgcctcactaacagttaacataaagacgtatttctgtttcttggacccatgtgctaaaggtacaactgttaggataccacttcatttcagttagactctagtttaggcatacaattgtaatccaagaagactgatctcttctagtgattcagattggttttatctttgatttttagatttcatctgcatttcttgattaattactcattttggtttagttgacagttgagcaaaaaaaaaattactttctccggagtaaatcatctgttttatttatgctttctatgttgttctatgttgtagtgcagtagcacattaggaggtatctttgtggagtgaaaagatttttgtggctggacccggtggtggttcatgcctgtaatcccagcactttgggaggccgaaggcaggtggttcacctgaggtcaggagtttgagaccagcctggccaaaatggtgaaaccctgtctctactaaaaatacaaaaattanccgggcgtggtggcgggcgcctgtaatcccaactactcgggaagctgaggcaggaaaannnn

SEQ ID NO: 21002 - DNA, 3041 bp, Homo sapiens
  misc_feature 1, 2, 3, 4, 3040, 3041: n = A,T,C or G
nnnnctgatttcctttgctctataactaactttgaaataacctaaaaagctagttatgttttctctacattaataaagtttcaaagacttcaaatttataacatcacatcacttgtagtcaatcagtccacaaatatacaacatgggatgaagcagtttacctttgcttttcaacccatttccaagattatgcacaaatgtaaattacagggaatttttaatattttctaaaacctgtagagaatcttaaaagatacactgattacaaatcactgctattaattaaagcaggattacttggaggtagtctgtcatttatgtactttcatataaaaacatacaaataaacaaaaaacccttatagtattccataattcaaacttgtaagccttaagtacaaagatatctgaattatacataagtcaaagttcattaaggtgttccccttaccccaattagtctaaattagtacacttgcaaagaaatctgaattaaatgtcagtcaataaaattcacaaagccagaagcagtttagtgctcacaagtttatatttttaggtttgaataaagattcttgtgtattttctaaatacacagacaaaacagttccggaagtttacatacatgtcttaggacacttatattaggtaggtaatttacattttaaaaagttggtcttcgtaaaagatcttcccaaagagcttttacaaacagcaggcggaagtgttcttttgtttacagtgttcaaaatgccaatgctcccactaaataatggcctcaaccatctctcctcaacccaaaatattgttctcaatagctagtgtactccaaatttaagtacccaatgtcataaaatttagggctagaaaacatcttttgaagtgtgcttatccctaacacattttaaactatctagaattctttaacttcagttgaaagcagagatacagcaggaaaaaaaaaaaaactttccattttaagtcctaaagtgactaaacacctgttagttccaagttgtggtgtatatcccaatctaaggcgggtccgcgcccaagcggggtttatgagttccacggaacgccgtcgttgtaagtgaggccccccctttggggcctgcggcaccgggagggttctaaattgagccaaggcccaaacctttgtcttatgaagagggctactaaggaaattattggggggaggcatagcactctccaaagttccaaacccacctcttttataggacacaatcatccctagggctccttaagcgctgaccattctaccagaagttctttaatgaggcagcacatagagcctcccctacagagtatgggcttcagtatcagacgtgctcaaattcgagctctgtcacagctgtgttatattagccaagtttctgcatttctctgagccctgtcctcatcgataaaatggagacattagcacctaccttatagaggattaaggtaaaatcatgtatacagcacaacggcaagtgtgggcactcgaaaaaaagaaattaggtagtttttttacatcgtttttcagaaaaatgaatctaaaccctcctcatgctatgttcagaaaatcctaaaaaatataaataaagcttactaaagttttaaaaattaagatttttaaacctattttccatcacactttcccccgtatgatactactacagtgatattcaggccgtttacaccattttgtattaatataaatgcccaagtcctaatcctttcatttcctattttctccttcctttcccccatcttttcttatttctttttcctcttggttcttatctattattaaacaactttaagatgtgttatgcacctattatgtaccagtgttctaagcactttacatgaattaacgcatttagctcactcttctccattaggatagctgtacctaacccagctagtgtgttttccccaatttcaaagctactcattactgttcagtttccctttcctataacgtttcttcttttttaaactcttaattgctagtgtgctaaatttagcaaaatatctagtaaataagaaaaatgaacaggggtccatatggaagtatctgtctctgagaactctaataatgcacaatcttgatttatgagacggtctgtaactacagagtgaatatgaaagaaagtttatactcttccccttcattaaaagctctaaaatactttttcatttaaaatataaattacaagagacaacttcgccaaatgtgtaacataattctgccagagttccacagacaaaattatgagtatttcattgttacctctgagaccaatcataagttcttagtatctatcaacttcctgaaattttactgtaagtcagaaaaagaataccttagtactaaaactatttttttaaaagatctagatgggaaaaggcagtccctcgagatcatgaaacaaaataagttaggcagtcagcaagtagaaaaatctgtcaattctgtttccggtaaaatgtttacttcaaagaaatttttatataggctgaggctaatatattcaagagtataaacacttttcctttggattacctaaaaacaaacttttaaagtatcatatttcaattgactaaaaatatagccaaatctgtcacaacacaacataaagtaatggacaattatagaatattttaaattaacagtaacaagccatctacatcaaaccttatttccaactaaaaccaaacaaaagcacaacaatcccgtagtgtaccaagtgtgtatttcaatttactgtatgcaatctaacaaaaatttggtcataatttaccagatatacataaatgatttaagtagtaaaagaaaattcagcttcaagagagtaagttcatatcttgaggaaaagtaaaagtacattaagaatgtaaagccaagtccagtttctatgcaataagtgaactgtagtctaataaagcagatttaggtgatttttagatatatatcttggttctttaatatatatttatattagacagatctaccaattgtaacagttccnn

SEQ ID NO: 21003 - DNA, 1504 bp, Homo sapiens
  misc_feature 1501, 1502, 1503, 1504: n = A,T,C or G
ggccgcaagtgtttcttaatattttattccggaaccgtgttttggttacactattggggctactttgaaaggcgtcctccacccaccttcgcgaccatgagaatggtagataacgcagatcatctctggaaaggatattgatccgcctcatgtaaagtatgcttagttcctttccagtggttttgctggaaaccatgtctcattatacagatgaacccagatttaccatagagcagatagatctgcttcagcgacttcggcgtactggaatgactaaacatgaaattctccatgccttggaaactttggaccgtcttgatcaagagcatagtgacaagtttggaagaaggtccagctatggaggaagttcatatgggaatagtactaacaatgtcccagcatcttcctctacagctacagcttccacacagacgcagcattcgggaatgtccccgtcacctagcaacagttatgatacttccccacagccttgcactaccaatcaaaatgggagggagaataatgagcgattatctacatccaatggaaagatgtcaccaactcgctaccatgcaaacagcatgggtcagaggtcatacagttttgaagcctcagaagaggacctagatgtagatgataaagtggaagaattaatgaggagggacagcagtgtgataaaagaggaaatcaaagcctttcttgccaatcggaggatttcccaagcagttgttgcacaggtaacaggtatcagtcagagccggatctctcattggctgttgcagcagggatcagacctgagtgaacagaagaaaagagcattttaccgatggtatcaacttgagaagacaaaccctggcgctacactaagtatgagaccagcccccattccaatagaggaccctgaatggagacaaacgcctcccccagtctctgccacatctggtactttccgactgcgacgagggagtcgatttacctggagaaaggagtgcctggctgttatggaaagttacttcaatgagaatcaatacccagatgaagcaaagagggaagaaattgcaaacgcttgcaatgcagttatacagaagccaggcaaaaagctgtcagatctggaaagagttacctccctgaaagtatataattggtttgctaacagaaggaaggagatcaagaggagaggcaatatggaagcagcaatcctggagagtcatgggatagatgtgcagagtcacgaggccactcaacagtgatgatgtcgacgggaatgactactctgagcgatgacagtacgagccataggacacgagacccattcattaggtgggaatggggcagcacacactattgggtgggcgaaagggccagaataagaaagccggtgaaaggtcggaggtaaacgaaaggattttagagacctagagtcggctaaaggttaaaacaggttttcacgaggtgaaagggccaatttacaaaaacaccccaatgtctgatgtggaattcnnnn

SEQ ID NO: 21004 - DNA, 692 bp, Homo sapiens
gctgtgtatggagccacagcttgctgccaacaacgcagccctggtagcaggggtggtgcgaccagctgctgaggatcttccacgtgaaactacccaaatacttatatgtccagcacgatgtacagggagtatcaaacggtctgggttctacatgtgctcttccctgagactgggttttctaatttataaagcaaagagtttagagggatgatcttcaagcctcttgtagttctagaattctgtagttctgggagtttgtaaactattaagttttcttttagcccagaacttccattttcctgctctctcgtgtctgctctagactcagctctagctcggctaagtgtggagctctctgctggggagatccctagaagctttgaaggagacattgtgaggctggagaactgggttcaaattcagtgctaccattaaatctctgaataacatcctcagtcttccatctataaaagtcttggcatctccaatcacttcttgttctattatctcctaagccctatacatattactctgtaatactcctttgatccctatttctcacagtgctctatcctccaaaggttggaagactcactctatctacagatacctctctgggcatattttattactgcgctgacctcctggccctgccttcccccttcagaacctgtgccaaattgtgcagatgt

SEQ ID NO: 21005 - DNA, 764 bp, Homo sapiens
  misc_feature 761, 762, 763, 764: n = A,T,C or G
actggatgttagtatgcatggtggaccttttttgggccttttattacttgattgcaaatcattcttcattgttgccaaatttatggaaggacattgctccctgaggtgccatttcctttcaggtctgtaactgaacatgactgatggcaccagagtaacagttgcttattacagcgttcactgagctgtgattgctccaatactttatgttggcagatgtgtttccctaggaacagcatctctgagacagaggtcattgatcaaaccccctctggctgttccattatgtgcaaattattgctaaaagcagagaggctgcaagggaggtggtgtgtacaaaagatctcattgaaaatttaaagtcatcataatttgttgccataaatatgtaagtgtcaataccaaaatgtctgagtaacttcttaaatccctgttctagcaaactaatatttggttcatgtgcttgggtatatgtaaaatcttaaatttatgtgaactattaaatagaccctactgtactgtgctttggacatttgaattaatgtaaatatatgtaatctgtgacttgatattttgttttatttggctatttaaaaacataaatctaaaatgtcttatgttatcagattatgctattttgtataaagcaccactgatagcaaaaaaaaaaaaaaaaaactcgagggggggcccggtacccaattcgccctatagtgagtcgtattacaattcactggccgtcgttttacaacgtcgtgacnnnn

SEQ ID NO: 21006 - DNA, 3991 bp, Homo sapiens
ccgcgtcgcagctcttcaacatcatgatcaccccattagcctccggcggtggctgcggccccatcgggagcccctccttggggcctttcctgtccacggagaccgcgggcaccgccagcagctgcccccccggaggctctcgggcaggggccgggatcgacgaggggggcggcggaggtggcaggggctgccggaagccgtccaccgcaacctttctatagtgacttccagtcaaggttttgttgtattaagagctgacccatagccagctgcagtcactgtgcaaaaatttagagaaactaaattttgcaaactttactttgcccactttttattaatacatacatagtaaaaagaatatatttctccatgaacttaataatgcaaaagcatccaaagattttaatgccaattcacattatactgtgatgcttttatagggaaagttcttttgtaaaagaatgctctctcccagaaaaagcatttgggtatattattaggatactgaagaatttctccacatttagaaacattccaattttattcctttcagaaaaattattaataccactcactcagacttcagttctaggtgtgattggtaagcctgaagcaagcattccattgagaaaagtaaaatgtgaatgtcatgatgaatggaattctccttgatactagaatgttaccagtgtagcaacttaaactgtccaggtcatagtgagagcctgtctatgttcttacagtaattcagtgttcatcgatgcaatccaggatgctcacagagtgaattgagtccaattaaagtccacaaaatccacgaactctggttaagtactttaaaaaataaatctgacaacctttatctttacttctctgtataacagttttacaaatcaaggacttcaattattgggtgacttacttgctcccaatatcccacttctaactctcccacccacaccactccccccaaaaaataaactgaattggcagaggcagctgtatgaagaacctgcagagcagacatgcgacagcatccctgggatgtttcttttcccctcaagttctctgaagaggtaaatactattagtctgatgttgcctagtagagaagcctatgctcaattaagattcaagcaaaattgagaagaaaagtatttttctcttgccacatctatttttcttgggctttcaacaacagctagaataagcttcagaaacttttatgatggactaaaaagcactgtggatgtggagaaacagaaatatagctttgccacagctggaagggagccttaggacagcagtgctacttcttccctatcacactcaaatataatgttcaaatgacagactttttttaagtaattatctcattcatttaaaatgaagtgatcaggaaccccacaccactgtgtatttggacttaataactgtatctgcttcctagagcatcgcaggaagtagctctcaataatactaagggaagcttccgtgctaaagtaccgcccatccctaaactagagtactgccaatactatagcagctggtgacagacatcgtgttaagtggcacagggaatggaaatgctctaggagagttggtccccaacattaatatgaatatgctctggtgaaccaggggaaaatccgacccatgtgcaaaaggtttctattttcccacttaattagcatcctgctacagggccacacctgccatcttggtgggtgagtttagataccatacacttctccaggaggagtttgacaacatggtcacacagttgcaaagtgcacaaagctcaaggcacagagtagaagaaagttgtgaactgatgggggaaagttctagcaaaagcagagttagcattttcctttaacaagactttctaatgctaaacaaagaccaactcttttaaaaggggttgttttggttgtgggtgaaaaatactgtactgtaatgatctgcttggttttaaagcaaaagagatcctgacatgtgaaaccaatacaccaaaatgccaagtccacaaatgaacaaaacaagtgcttaaaaaaaaaattcttctgctcttatatttttggaggcaagctgctgattttggctgtcagatttcacttagaaatggtcactttctgagatgctttttcctcacagaatctgtagataaactcattaaaagattgtcccatttcaaaatcacccccaagtctagcagcaacgttttttttttttagtttttgttttaaaattacaaaccaagtaagaagtccaacatcctcttccatgaacagctttgtgacagagctcctgagtgtgtgcagcccccactgtgctctgaatacagtctctgcagctccagtgtgtcctcttttcaggaaggaaagcatattcaatacattcactatctgtaccccctggaacttgcacatgctgacgagctattataagccaactcatccccagctctcttccgggactggtcaccccttgtaaaaccattctgtataagttctctttgaaatttctgatcttgagcagcatattcagaaagttcagattccaccgccggagggagaatgtttggaataaatttagaaaatagagttggagccatctgaacccactctggtctgagggtatacaggcctttcacaatatttgccatagttgaaggtgtgacctgaaatggtgttgactgggcttctaaaagtaaaggcattaggctgtaaatgtgcttttctgcaacatgttccgtaaacagctttataaggtcatcttttaagtctctgttaagcttggtttcgatgtaaaacttattcatatatatgaaaagaggcacaatgctctgcaatgctcccatatattgtccaagagctatattaaatctttcaatatagagatctggagggctggcctgcagctcctttgagactctctctaagtgattagttatctttttaatcagatcactatacatctgttccgagtgctgctggcatacacatttatacacacaactgtatatctgttcataggatatggggatatagtcaccaggactctgagttaaaagttgatctatggcaccatccaattttggccagtatgtgctcttataatcttcaatagttataacattcattaagaacttggaggtggaggtgttgatgttgatggtggagctggcggtgggggcgggggccgccttggccacggcggcggccgcgtcgcagctcttcaacatcatgatcaccccattagcctccggcggtggctgcggccccatcgggagcccctccttggggcctttcctgtccacggagaccgcgggcaccgccagcagctgcccccccggaggctctcgggcaggggccgggatcgacgaggggggcggcggaggtggcaggggctgccggaagccgtccaccgcagcctcccagttgttgtggttctggtcgtccatcatcgcctcgtagctgcccccctcctcctcttccatgctttcctccatcctgctggcccccggcacccgcccgcctcacaggcacctgccgcctgtctcaaccccgggccagcgggcaccgctgcctccccgagttacatcgccggcggcaggaatgggcgcagcggagagggctgcggtgcgcagggtctctcgctctccgcggggccgactagcttgaagacgcggctgacggcggtgggcgctccggggctctagtctgggagaggcagccgtaaagcagcggcgctcctcacgacgttttacagcggcttccaacaggcagttggaaagggcagctgggggcgcggccaggagggcacgtggtgcgagggactggccgcgagaaagcggagccaaaaggggcgggagctgtgagtcactcccacgcaacagggcagaggttcgccccgcctcggctggcagggagctaacaggggaggcgcgacgggtcgggacgggcattcgccggctccgccccccggac

SEQ ID NO: 21007 - DNA, 2694 bp, Homo sapiens
  misc_feature 1, 2: n = A,T,C or G
nncagttattacctcagcattttgacatcagatatgcaaacttaatggcgttttgtttttttatattctatttgtattctttccccagtatttcccatggggatctccacaagtttggagttttttcctggtgcacacacgtgaggagatttaaggtactatatgcaagtgttttactaaaaagcactgaaattcttctggcaatacaagaaccattttcaggatcttggagttacttccttcttaatctttcttaaagcattcactgatgtttttgttttttcaaaatgaaacaaaaatatcacattgagaagctagtctatgttctgtcactaacatttaaactttgcagactctaacaaaaagcacaagaggtcacgtactattatacaaatttagcggtactggatttacctctgacattaacacactcaggcagagaccaggagtgatcagcaggtcttcagaaccaaaaaacctttctgttcacatttcatctgatttttaaactgaggcaggctttgattcttctgaaggatgccaagaatcaaactaagggaggactcactgttaaagatgtgttctgatgtcttatattaagaccaaatgtgacatgatgtgattatcttccagtactttgcttttaggtaccatttcatgacattttaggaatgagtattggaaaatataaagaattagaaaagcagcactttttttttaatggaaaagtcttcggtccagtgttacaccttatagtgtaattcagtccctaagcacagaatgaatgtctggcctgcatatggtagttacagtgtaacctctggctgcagaccacacaggacaaccctaacagcctagtcttgtatggtgtaaatatcaagagtacagcttcaatttcatttgctttatcttagcaacaatgccaactcaggagagcagacggccgatttcagtgaagtctggtagtcaacagatgttatttcagtctcagtgcatctcctctggctttctttgactgaaggtgtttataggaaggaagttaaaaaaaaaaaaagctcattgagattctttaccaattctttacaagatttctgggggtgacagggaaagcaaaaggacttcaaagcaaaagggtgcacaagagcttacttcaccctgaaaatcagtattattaatgaaaagtactgttttcttaaagaagtcgaatgtcctttagatgaacaagaccaagtatacatctccattagattaaaatgtagcacagggttaaaaattatcagtttaatctctttaagaacagtattatcagagtttaaaatgagttagctctgtttatctacacacagcaaacccattcgcagcctcttggccacatgtattcagatgtttgaaatagtgaatcatttcattttcattctaaaacaatactgacttagccatataccttctgtttgtcaatctgaaacttgcttacatctaataagtagacctcttataacactgcaaccattctaagagttggaatttatttttgccaagtattaagtactgttacatctaaaatacagaatgtcaaatggttgcatagcttgtttcccacaacaaggaggaaaagaacaggaatacaaactctgtaatatgctgataaagaagccttagaactgccaactggcttgatggttcaattagtaagctaatttctcccacacccgctccttgatttttagactaattttcccaaagcaaggtttagtcacacaaacttgaaagtacatttaaaatgttcttagttgtcatcctacttttattgcctatggaatatgctaatttctaaaaaaaatacgggagaggcaccaaacccctaaattctagtgcaataatttaaaaaaacaaaaaacaaaacaaaacaaaaaacatgttatatgcacccccctcccaaagctgattttaagactggctagaattcaaaatataaaaaataaaactatgaagtgatttgaaatcggttttaaaaagttgttagtgcaagagaaattttatgtttaagccatcatggcaatatatgcaaagtttaaatgaatgacagaaatcttgattttagactgtatgttgtgctgttttgagtacactttatttcggaaagtgatatttagtattttctatacactctgaaatcatgagcatttcactttttctaagtcaattatttcataaggattttattaatagatattggtaaatagaactttggaaatcttaattcagaattcttactatacctgagtcttttgtaagctatagttttatgtacaaccttgtacagtttttttgacatacaattcagaactttgtttattctcttggactttgttctggccaatacattttttttaaatctttaagaagaactgtgattgttttagtgggtatttttctaattaaatgaaaacttgtataatggtattttagagaatgccagtaagtgcatgtttcaagttaatgtttttctcatcacttgtatgtttctaacacagcatgggactttaataaaaccatcctggaaacttaaggattgtttttcttctaaatatgtaagatgtggccgggctcagtggctcaagcctgtaatcccggcactatgggaggccaaggcgggtggatcacctgaggtcaggagttcgagaccagcccgga

SEQ ID NO: 21008 - DNA, 610 bp, Homo sapiens
  misc_feature 600, 601, 602, 603, 604, 605, 606, 607, 608, 609, 610: n = A,T,C or G
actccagcctgggtgacagagtgagaatatgtctcaaaaaaaattatcagcagaagataatatagaccccaaggctaaagggaaccattatcatctctaggcctgaaagcctaggagagggtgctgtatggagaggactgcttctgacagagggatatagccaaccttggtggcctaatagagaggaaagtagggaatagcttcaccttccttctctaatcttctgctagtatccctattaatttagcctaattagaagctggaaggtaggagagcctccatgggcaaaaagctgtgtagagaacatggatcctgagggggtaaatggcagataatctagcacagattggtatgattatctatacttttcagatgagaacactgagagtcaaaattaagtagatttgcccaaggccatatagctggtaggagctataaataattatctcaagaagtcattattacgtggatcattcaagaaatttctggatttagaaaatagccttaaaatatgaaacaaatattagcatttgttaatttgagatgttatgttcacagatattggtaagattatcatttttaatttatgtgttttaaaannnnnnnnnnn

SEQ ID NO: 21009 - DNA, 1728 bp, Homo sapiens
  misc_feature 1725, 1726, 1727, 1728: n = A,T,C or G
ggctgctcagcgccaggcatcagctgggaagctggcgtgggcaggccagctgtacctggcctggagctccagattagaagaggagccatgtcagaagaaacagtaagtgaatcacagttttccttgaagacagcagcgctaagagtgtttgatcttcctctgacttggtactattctctctcccagatcaaattttctccggtggctaaaaagttgtttgtggtaactgcagtgagtgctatatctgtaatttttctggctcatcactttaaaagaaaacgtggaaagaagaaaggaaaaatattaccatgggaaccagagcacctcatacttgaatacactaaaagagcagcatcagacaaaggttcaagttgttccagtagcagacagaatttgacattatctttaagttctaccaaagacaaaggatctcaagtttgtaactatgctaatggaggacttttcagtaaatattcaggttctgcacagagtttggcctctgtccagagtgtcaattcttgtcatagctgcgcttgtggcaattctaattcctgggacaaagcagatgaagatgatattaaacttgttaatattcctgtgactactccagagaacttatacttaatgggtatggaattgtttgaagaggcattgcgtcgatgggaacaagctctgacctttcgcaatagacaggctgaagatgaagcctgtggttccattaaactgggtgcaggagatgccattgctgaagaaaatgtagatgatattattagtactgaatttatccataaactcgaagctctgctgcaaagagcctatcgtctccaagaggagtttgaagctacccttggggcatctgatcctaattcccttgctgatgatattgataaagatacagatatcaccatgaagggtaatgtggaagactttggcctgcgagacaccttgagcatcgcatccacggattcctttgcttccgcagcagagcttgcagaacacagagaagtacggcatacctacagcctggagtccctttgtcactgcccattttacgaggaagccatgcatttagttgaagaaggaaaaatttactccagagtactgagaactgaaatgttggagtgcctaggagacagtgattttcttgccaaacttcactgtattcgacaggcttttcaggtaattctttcagaatcagctaacaggatattcctcgctgagagcggaaggaaaattttatcagctttaattgtgaaagcacgaaagaatccaaagaagtttgaagatgttttcgatgaaatgatctattttttagagcagaccgatcactggggtagtactgaaatggaacttgctgctagaggggtgaaaaatctaaatttttatgatgttgttctggattttatattaatggactcctttgaagatttggaaaacccacccacatccatacagaatgtagtaaataatcgatggctaaactcatccttcaaagaaacagctgtggcttcaagttgttggtcggtgctgaaacagaaaagacaacagatgaagatcccagatggattttttgcccatttttatgccatttgtgaacacatcagtcctgtcctagcctggggctttttgggtcctagaaattctctgtatgatttatggtgcttttttaagaatcaagttcttttatttctcaaagacatttttgactttgagaaagtgcgctannnn

SEQ ID NO: 21010 - DNA, 877 bp, Homo sapiens
  misc_feature 1, 2, 3, 873, 874, 875, 876, 877: n = A,T,C or G
nnngtgacagggaaactatgatcttgtttttcttatgccttaaaactgggatttgaggtcaattttgtctggaaaggattgatctgaggctttcaaggagaaccagaggaatgtatagtgtctcagaagccaagagtttggaattttaagatagagcatgatccccaaatgcacagaatcagtatcacctgggaaattatgaaaatgcatattctcaaactccacgtcagacttacagaatcagattctggaaatgggacctaacaatatgatttttttaaacagtccttcaaatgagtctttgacaaacccctgaggtaaaggaatccacctaaagtaacatgttaagaaattgttatggaatgaggactgaaagaatactgttaagggtggcatttaaggtgttaagagtggcatttaaggtgtttagtgaccattggcatggtagggaaagttaaaggtctgccaaatagttgaaagatattcaataaggtaaaattcaaataagcttgcagttaagagaaaggcttttcttgggtaagaggaaaccagttaagagggagagaatgaaggaagaattgaaaaataagggtgagtctcattaaacaacatctcggaaagttgggaattcaagcatatatatgaatacagttacattgagaacagtatataagagaacaaaaagaaggatgaagatggagaaaaattaataccgatttggatctaagacagtggtgctcaaccaagaaagattttgtgattgtcactatttgtggggaacatgctactggcatctagtgtgtagaggcgagagatgctgataaacatcctgcaatgtacagggctcaaacataccccgccctcaaccaagannnnn

SEQ ID NO: 21011 - DNA, 1501 bp, Homo sapiens
  misc_feature 1, 2, 3, 1484, 1485, 1486, 1487, 1488, 1489, 1490, 1491,1492, 1493, 1494, 1495, 1496, 1497, 1498, 1499, 1500, 1501: n = A,T,C or G
nnnctatcacaatcatccggttggttcgccgtggcacctggactcgtactttaaggctttatgatgtaattttgcctgaaagtccttatcccaatccctcgtttaaagtaaggctaagaataaaggtgggaccatctttaataattttaatggaggttattttctagtagaagtcatcatccatcataaaatactaaaaaacctgacagtgagataggtgttaagtcctttgctaggttatgtattgctatgctgggaggcagtgggccttccactcccaattctgatatgaactagctgtgcagccgtgggcaccccgccttgctggtccctagcttccgcatctgtgaaaggaggcgaccaccccttctaactctaaactttaaaaaaaactgataccgagattcagtggtagctggcttcccagaggtctgtcattcccattcagaaaatcacttcattgtcctttctctctaaaatgtctgcaagcagatttttttctaagctattgtagcagaagagtcaaaagaaactcttcagttttaagatgacattatttagatcacaggttatcctgattcatatttctttgaaggtagtcttgggaaagcatgacacttaataaggctctttttctcttttgtagtttcgggatgtgaaaatttctggctcataaattgaaataacagccacgttcccaaggttgtaacagaagattcaaaacatcccattctagccacacacaaataaatatctgcggcttagtgataggactctaccttttctcctagaagcagttactgaacatccaggagtacaactccttcccatcattcccatgtggaagggtctctcccatcaaggagaacatgtggcatctctgatcctttacattgagaacatttgttggatatgttcatttattcaatagtcatttattgagcacctactacgtaccttggtactgttcaagctgtgggagatacagcggtaaacaaacaatatagagcagaaagttaaatattttatggttcatatgtgaaaaagtaattatgtttataaatagactaactgctggatgttaccaccaagtaagaaagcaacaggtaagataggctttctctctccctataccaagtaatttatacctacacagattgggcaattctagctaatgaaaatatacttaaaagtatttcttaggccgggcatggtggctcacacctgtaatcccagcactttgggaggccgaggcgggcggatcacctgaagtcaggagtttgagaccagcctgaccaacatgatgaaacctcgattctactaaaaatacaaaaattagccaggtgtggtggcatgtgcctgtaatcccagctactcaggaggctgagacaggagaattgcttgaacctgggaagcagacgctgcagtgagctgagattgtgccattgcattccagcctgggcaacaagagcgaaattccgtcnnnnnnnnnnnnnnnnnn

SEQ ID NO: 21012 - DNA, 644 bp, Homo sapiens
  misc_feature 1, 2, 3, 4: n = A,T,C or G
nnnnaggtcatctgaacaaaatatatatcaaaccatattgcataagaaccgctcgtggccctgttcttttcagtatatgggaaaacaaaatggaaacaacaaaatagcatcaggtttacaaaacttcccaagatagatggtcacacatgttttcaggagacctctatataaatgactttgatcacttgataccttgaaaagaggtcttggggcactagaatgacatctataagtgacaagtataaaatgtagtgctcagtgacattaaaaaacaaatcaacccacatagaggaagagctttggacgtagggatgtcaaactggtctagaatgtaatgaaaacccaagaaggtgccccagtaagaaagaagaaatcaatctaacaatgggatgcagcagcaagaatactgagacaggaaagaaaatatttttaaaaaatgaattattcattcactttctagtggatacagaaaaaactgcagaagacccggaggatatcagggcaggctaaaagtttgatatcttacacctgtggaaaagccttaagctctgttttaactgagagcaggtggggtgacttcatgactaccattaagaaaatataacctgttgggaaactgtttctgccttgatgatgttgtacag

SEQ ID NO: 21013 - DNA, 1037 bp, Homo sapiens
  misc_feature 1034, 1035, 1036, 1037: n = A,T,C or G
acttccatttgaaagcttaaaaaagtgagtgtaacaacaagcactcaggaaacttagaattaagacattaatagcttatttcttttaagttttaaaattatagaaaaatagtaagtggcatggtattgtttgacttaattagaatgtgaaaactctagtgcttttgtaatgctccaagaagaaatccaaatatttgaaataagacattattattggtcattttaagatacttcatgtttttcttagatgcctttgagtaatggacagatgggccagcctctcaggcctcaggcaaattatagtcaaatacatcacccccctcaggcatctgtggcaaggcatccctctagagaacaactaattgattacttgatgctgaaagtggcccaccagcctccatatacacagccccattgttctcctagacaaggccatgaactggcaaaacaagagattcgagtgagggttgaaaaggatccagaacttggatttagcatatcaggtggtgtcgggggtagaggaaacccattcagacctgatgatgatggtatatttgtaacaagggtacaacctgaaggaccagcatcaaaattactgcagccaggtgataaaattattcaggctaatggctacagttttataaatattgaacatggacaagcagtgtccttgctaaaaactttccagaatacagttgaactcatcattgtacgagaagtttcctcataagcactgtggacaaaaaaagcggggaagacagcaagatttattggaagatacttacaggggatggacacctgtgatactttgcctatttctccacttcactgctgccatagacaatgtagtgattttaagggaaagaagtgaccttgagtcagccattttcaaatataatagcaaatatttggccaccagcaactagcggagaagtctgaaagcaggaattgtgtataattcaaaaccaaatatgatttctgaagtagttattttgaaaaggattgaaatatttcaataaatatgtctttgaatannnn

SEQ ID NO: 21014 - DNA, 970 bp, Homo sapiens
  misc_feature 1, 2, 3, 968, 969, 970: n = A,T,C or G
nnnagattcccaaatgcctttttccccctcatcttgaaatgagatgagtttttatgtgtaagcaatatttatttaactattctataaaattattgagtgcctactgaggcctttaagcaccgctaacattcctttccatcattcttttaaatgacataaaataattgtgcaatgttcctgatgatgtaccccacaagctgcattcaaactcaaatctgtgggaatgagtgactcgacaaaatgtaattcggatcagatcctcatcccctgactgtgtgaaaaaagtactctccttctagtgaaggattgtcacagagtttcactggatgaaactatgacccagtattcttactgtattttacatatgcctgtaaattatttgcaaaaaagaagaagaagaggaagaaagaaaagaaagaaaagaaagaaagaaagaaagaaagaaagaaagaaagaaagaaagaaagaaagaaaaagaaagaaagaataaaaaaaaatgataacatggcaaccaccaaactcccttaaaaacaaacattggtgacatggccaattaagtatcagtgagcctcctatctgggacttatctgttcctattgtttcaaaaccatttcatgtacactactgaggtaagtttataacttgaaatgtgaactttttttttttttagtgttaagaacaaactatataaatgtaaaaaaaaagttttagagttctgttttcaaacattgctagtggtttagttaactttagctgctttatatttgaaaagcttttatttagatcttgctccatttacagtacattcttaggatgtatgtagtaaataaagctttctttaaagcaaaaaaaaaaggggggggaaaaccagggcagaatcacatttaagggccaagtgattatataaacggggaacaagaaaagagctgtagcatgtgttgacacacgaaattgtatcgcagcatgannn

SEQ ID NO: 21015 - DNA, 535 bp, Homo sapiens
  misc_feature 1, 2, 535: n = A,T,C or G
nnagcaagagcaagtctagtgtgagaagcacttttcaggcatcatgtttgctgaccaccctttggcccaaacactcacctcactaagcctagactcaaaatatgagggcactgcaaagattcacagcaaagattcatggcacagggcctagacacagggaggagtctctgtatttgttttttctttgtatttgttttatcaagtgaaaaacaaataaggatctctgcttccatcaacattattcatctttgtttcaggggtccctgtgattttagttggccaagatgtaactggcataatgaatacaaccaaatgagaaatattacctttttttgttgatgatgtgattgtatacctgtaagagtggaaggactccagtaaaaaactggagtgcaacaatcagtaagaatatttgacaaggctgttggactaaaaaataaatgtagaaaaatcagtaagtcttctttatagccattcgttcaacaaatatttattaaacactcactgaataataagcattcatctggtccctagn

SEQ ID NO: 21016 - DNA, 1894 bp, Homo sapiens
  misc_feature 1, 2, 1891, 1892, 1893, 1894: n = A,T,C or G
nnatcgaccgcgcgtcctaggagactgagtaccaaattcatcattgcatttctccacctggaaatggtaagaaaggaatatcttcatcatgctcttagacttagtatgatggacactgtgatattggaattactctttcttggtcatatccatctgcttgcataggacgagactgaaaatctttagcaggatttataaacgtctttggaatgatgtagcacaacagtgttttactgtggggaatggggaatgactatctgaaagggaaaattgtttggcattttatattatttccaggcagtgcaaactgtctagcaagtagaatgttcatatatgaatctaatatagcaaatttatccctcataatactgtttttgaaacatcaagtttattctcaatgtgtggctctaatgacaatttcttgggaacgtaatagaactgcaataatgactaatggaaaagactctaaagctgtatctgatgggaaatgatttactttttaaactctttctatttaaggaattagcttaccgaaaggagatggtgagagctgacctaattaacaaaaaagttggaatcaggtatgctctgaaaacttcacttaattcaagaacaaagtacacgtatgactaattttttttttgcgatccttcagagtctgttaaggaatgataaaacatcagttaagatatctggtttctgatagaactcaaaaagaaaagttactgtttcagctagtagcatatgttgaaacaccaatgtaactttccagaattagcttaccgaaaggagatggtgagagctgacctaataaacaaaaaagttggaatcagagaaactccagaaaatcttgccaaacttctgaccaggatgtatttaaaatcagaagtcataggtgatgggaatcagattgagattgaaatccctccaaccagagctgacattatccatgcatgtgatattgtagaagatgcagctattgcttatggatataacaacattcagatgactctcccgaaaacttacaccatagctaatcaatttcctcttaataagctcactgaacttctccgacatgacatggcagccgctggcttcactgaagcacttacctttgccctgtgctcccaagaagatattgctgataaactaggtgtggatatctctgcaacaaaggcagtccacataagtaatcctaaaacagctgaatttcaggtggcacgcactacccttcttcctggcctcctgaagaccatagcagcaaatcgtaagatgccccttccactgaaactgtttgaaatctctgacattgtaactaaaagattctaataacagatgtaggtgcaaaaaaactacagacatctctgttgctgtttattacaacaagaatcctgggtttgagatccttcatgggctgttggacagaattatgcagttgctcgaaagtgcctcgctggtgaagaacaacggggggataatgttgagtccaaaagcaatcagaaagggctgctataattccccgagcgaagttgcacaagaatttttggccgagagcaacacgctcggaacaatggggcctccatcacgacgattcacccaatttggagcggcaaaggcgaggagtgaccccggaaacaagataggagcccttgtggaggaaagggcaccgcaggagagacaacccaggagagaggtctacacaacaaggtatgttagtactcccaggagagaatatagatgacgtagaaaagaggcggggagagaaaagggggagaaataacgagcgcaagcgcagaagatcacgagaggtagcaatgatgagaccgaaaagcgagactggaaagacattagatatagttatgatatcactaccatcatcactgacctcaannnn

SEQ ID NO: 21017 - DNA, 1673 bp, Homo sapiens
  misc_feature 1, 2, 1652, 1653, 1654, 1655, 1656, 1657, 1658, 1659, 1660,1661, 1662, 1663, 1664, 1665, 1666, 1667, 1668, 1669, 1670,1671, 1672, 1673: n = A,T,C or G
nngctttagaagctggattacaggcatgagcacagtccccggctgtgtttttttagtagagacagtgttttcaccacgttggccaggctggtcttgaactcctgatctcaggtgatctgcccgcttggacctcccaaagtgctgggacttcaggtgtgagccaccacgcccagccaagaaattgattttttttagttaataatgtttaccaagtattgtagttgggtgaagtcttcaagcttaaaagtaaacctccagcatgttattacctaaggaatttgtgtcaaggctgattgaacctgaatctcttaaatgctttgtttttgtagagaggaaaatatgatgttcccaagtggctctctcccagtagcattctgcttcttcaacaaatgctgcaggtggacccaaagaaacggatttctatgaaaaatcgggggggaccatccctggatcatgcaagattacaactatcctgccgcgtggcaaagcaagaatcctgggcggggtgatcacctgacgggtacctatcttcggcttctagccaagaaggctcggggaaaaccagttcgtttaaggctttcttctttctcctgtggacaaggccagtgctaccccattcacagacatcgaagtcaaataattggagtctggaagatgtgaccgcaagtgataaaaattatgtggcgggattaatagactatgatgggtgtgaagatgatttatcaacaggtgctgctactccccgaacatcacagtttaccaagtactggacagaatcaaatggggtggaatctaaatcattaactccagccttatgcagaacacctgcaaataaattaaagaacaaagaaaatgtatatactcctaagtctgctgtaaagaatgaagagtactttatgtttcctgagccaaagactccagttaataagaaccagcataagagagaaatactcactacgccaaatcgttacactacaccctcaaaagctagaaaccagtgcctgaaagaaactccaattaaaataccagtaaattcaacaggaacagacaagttaatgacaggtgtcattagccctgagaggcggtgccgctcagtggaatcggatctcaaccaagcacatatggcaggagactccaaaaagaacgggagccaaagtgttcgggagccttgaaagggggtcggatcacggttatcactgtgctcaccatgagcaaaggaagggtctgccagaagaaggggcccagaaagaactaaggctcccgcaataatgggagtacaactcagattagggaatccagatcaactgggaactgcaatcaggacaaacgtccgaggaagcctgtgacttgtgcacacagcggaatccacggacggcacacaccgcgcgactcggggcaacggaccaaggcatggactaaaagaggtactccatgtacaaacccgagatagtaggatattaaaagaagactgatatgggaacaccgggcgtctaagagcatgggtgacaccactcagcagggaacatgagtgatgatacacgacgagcaagggatgatcaacaacacttgttgcggatgattatagtaataatatgaagagtcgactactatacgacgtgtatagcgtcgagatatatagttgttctgttgcnnnnnnnnnnnnnnnnnnnnnn

SEQ ID NO: 21018 - DNA, 544 bp, Homo sapiens
  misc_feature 1, 2, 3, 4, 5, 6, 7, 8, 9, 10, 11, 12, 13, 14: n = A,T,C or G
nnnnnnnnnnnnnncaaacattgcctttttaataataaaaattttcctctggagtattcactattgtcaatgaacatttaccctctacacagcatatggtacagatggcaggtacccaggtaccaaggggcaggtaccaaacatctgaaaataagaagacagcgctgcagagccctacacagtcaatggggcactttggccgagcctgtctcacctcatctttacaactcttggaggcaggtcctattacctccaatgaacacaggagaatatgagcgttagaaaggagagtgacttgggcagggccacagggcccccaaactggagagctgatccttatcctctgcttctcaactctttcactatgccatgctgcctttctgaccctgtcttagtcttgattgtctgctgaaaactgctgtgagtaagaacattcaccttccccaggtcgagcaacggttgcacctcagtccattctctgcaggcagcatctgcttggtgttatacaaagagcgacacattttcaaaactttattccccaatc

SEQ ID NO: 21019 - DNA, 673 bp, Homo sapiens
  misc_feature 672, 673: n = A,T,C or G
ggagtcgacccacgcgtccgtatttatctttgattccccagggccttgcacagtgcctggcatgtggtaggtacttaatgtttaataattggagataggatatataatacattaatatatattctgtataatatatagttgttccactctttattggtatactgataaaatatattcatatatgtaactttcctgccttcatctaaacttaaatgagaagagtttgtgacctccatttttaccccttttctggtataatcttttgatagcaacaacttctgttcataaatggatttttcattccctgtgtaaccatagaggagtggccaattagcctttgactgacacagtcaccccataccagggccataggagcagtaagtggtgacagcccataaatgcacttgatttctacctttgtcactgaaacttctaaaacccacgggccctgtgtccctagtttgaaggagccattatgggatgattgtgcccccttactaatggcctaagacccagaaggatacagaagattcaaaaagtgcaaaaggccttttctaagacattaagctctttatttacacctcacgtaagttagtcttcaatccagtctgctcaatcttggctagaattgccgggggagtaaagcaaccaagtaattgtataggtcccgcnn

SEQ ID NO: 21020 - DNA, 923 bp, Homo sapiens
  misc_feature 904, 905, 906, 907, 908, 909, 910, 911, 912, 913, 914, 915,916, 917, 918, 919, 920, 921, 922, 923: n = A,T,C or G
accaggttgcagttaagaatttttctcttttctttggagagaagttaaagtccctggcagtgtttttcctcagatcatctgcatcacctaagctggggttggccagatctttgaacctacaacacttcattccggttttcattttctttgtgttcatggactctagagagcacggaagtaattgggtttcattgggtagcagagtaaggtagagtgcactttctcaagacatgttcattggtctgagcaaagttctgtctcttggaaggagacagtagcttggtggtgctattaggcagatgagggcttgttagatcaagatgtaaactctctttcttcagtctgattttaaaatgaactgtcatttgtagtaattattaaatgagaagcataaattaagtattttactttttttatttgtaggaaatacaactggagcacgcaaagcaagcctttgtgcaacgggacaatgctaggactgggagagtcacagccatcgacttccgagacatcatggtcaccatccgcccccatgtcttgactccttttgtagaagaatgtctagtagctgtaagttgtaacttgccctaatgaagtggtttaactcagtaaataaggaattataaaaacaattcttataagttatgtagtgttttttttctgttgcaaacactaacattttaatgtgatcacatacattactaaactcaaacaaagagtgtgttttggctagttttagtgggtaggttaatttgttgtctgggtaatacggaatatcttcgagaaatacattagctttttaaagataaaaggaaaaacagatttgtgatctcatgttaattttgttttagattttgaagtatatcaagggctgatttttgctaatcttcttagatgctctaannnnnnnnnnnnnnnnnnnn

SEQ ID NO: 21021 - DNA, 2902 bp, Homo sapiens
  misc_feature 1, 2, 2887, 2888, 2889, 2890, 2891, 2892, 2893, 2894, 2895,2896, 2897, 2898, 2899, 2900, 2901, 2902: n = A,T,C or G
nncgtccgcggacgcgtggggcacttccgggttcggcaataacctggagccggcggcgtaggttggctctttagggcttcaccccgaagctccaccttcgctcccgtctttctggaaacaccgctttgatctcggcggtgcgggacaggtacctcccggctgctgcgggtgccctggatccagtcggctgcaccaggcgagcgagacccttccctggtggaggctcagagttccggcagggtgcatccggcctgtgtgtggcgcgaggcagggaagccggtacccgggtcctggccccagcgctgacgttttctctcccctttcttctctcttcgcggttgcggcgtcgcagacgctagtgtgagcccccatggcagatacgaccccgaacggcccccaaggggcgggcgctgtgcaattcatgatgaccaataaactggacacggcaatgtggctttctcgcttgttcacagtttactgctctgctctgtttgttctgcctcttcttgggttgcatgaagcagcaagcttttaccaacgtgctttgctggcaaatgctcttaccagtgctctgaggctgcatcaaagattaccacacttccagttaagcagagcattcctggcccaggctttgttagaggacagctgccactacctgttgtattcactcatctttgtaaattcctatccagttacaatgagtatcttcccagtcttgttattctctttgcttcatgctgccacatatacgaaaaaggtccttgacgcaaggggctcaaatagtttacctctgctgagatctgtcttggacaaattaagtgctaatcaacaaaatattctgaaattcattgcttgcaatgaaatattcctgatgcctgcgacagtttttatgctttttagtggtcaaggaagtttgctccaaccttttatatactatagatttcttacccttcgatattcgtctcgaagaaacccatattgtcggaccttatttaatgaactgaggattgttgttgaacacataataatgaaacctgcttgcccactgtttgtgagaagactttgtctccagagcattgcctttataagcagattggcaccaacagttccatagtttaacatctagttaagctacaaatatagtataagcattattagcagctggtacttctgctaggggttgtaaattccaggtgttacactgacctcaatccaatttacataatttacataaatgcatctcggtggaaaaataatcattttcttggcatgttaaatcaagcttaaaaagttttgagaaaattttactgtgctgtgttgctaatggttaaagaagtctgtatctagtgataaatataccagtttttttaaaaagatgctgttgtgcctatatcatgaagtacattaatttctcatgtaaaaaaaatagctctaaaatttgtttcaacctaattggtaacctgagtttatatctggcatgaattcattatggtgatacacatatgtgaattcagtacattttgagacagtattctaccattcagtaattttggttaatgattttaacacttctcagtgtatttaatttcaaattgtttttttaattggttttatgctgctttgttaggacagatgtgttttgaatgtaccattataagaagaattctatgtatcttaaactatgatcttctaaaattttatttccgtaagtacttctgtggccttgagtattttttaaaaggctcaactgtaagcctcttagccagttggataaatatttggggtcacctagccattgaaagcagaaagcagtagtgacacagctttcccttcaaagagccattgagaaacatttctcaaacaggaaatccttcttttactaatgtggacatatagattattcgtattatagtttgtagaactacctagttcagaatcttgactgccagttttcttggtttcttaggcttgaattttcatagacaattgcaacagtttagatgccttttgaaaggaatgtaatgaagattcagcatctgactatatgtgtgtctatcctgaaataataatggagagtatactgtagattacatgtttacccatcaaatctgacttaaaaggttaaatggaaggttttataggtaaggtaattgattgggaatggggtagggggaggagttgtgggggaataatgtgcatttcagtctcaacgcatagataaatttaggggaattggatgtattattcaactttgatttgggttgtaaaatgtgttaaatcctgttcattgaactcccatcaactcttataaaattcatgctgatcttcattaccgttgcatgattggaaatgtttaaaacattgtacagttttagtatagagaaatgtaatggtttttgtgaccagtttctgtctgcatgtaatttggatttctcaaatacattcattagtaatttatcagtaacattagttttatttttgttcatctccttatctataaaaaggggatattcttaggataaatacatgaaaaattatacttgatagcttaactataatcagctatttttgtatttttgtaatatttgtccactaagctggagaagcagcctcatacagttgattttgtgtatgtggctagtcttattgtcactatgtaagtaatccaatggttttagaaactaaactttctagagcaataaaatgactataatgttaagtaaacataatgttgatttctaattatgttttaaaaaatgaagtcttgaattatatcaagaaattttggcagctgaagtcatgtttattttgaagctgttagttttttcctataatttaaaaagatcttttagatttatagaagagtcagaaatgtacaaaagaatcnnnnnnnnnnnnnnnn

SEQ ID NO: 21022 - DNA, 507 bp, Homo sapiens
  misc_feature 507: n = A,T,C or G
gggacttgttcttgtttgttgtttttgtttttgttttgccctttagcttcacaggtttgttctgaaatttatgaggtataaattcttaagagcagcaagaaaaatttcgaatctatttgtagaaactgcatatgatgatggttcataccagtagagagaaagattggatttgggggtattactagtagtaaggggattcactagtagtaagggaaatgcaaaataaaatcacattgaactagttcaaaatcatcacattggcaaaagcattagagtgccaattactggaaagatgtggagcaataggaacactcatacggtgctttaggaaggagctgtgtttagcataatttggcaatgtctagtaaagttgaagatgtgaataatctttgacccagcaattccatgtttaaacctctacatagtctctcctcgtgtttcaaggagatacatatgatggtccattgcagaactgtgagaatgagaagttgaaagcaatctaaccan

SEQ ID NO: 21023 - DNA, 280 bp, Homo sapiens
  misc_feature 1, 2, 3, 4, 5: n = A,T,C or G
nnnnnaacctgcatggatgatcatgaataatgtggctgctacaagcccgggtcctagttattggagctactaatcgaccagactcgttagaccctgctttgagacgtgcgggaaggttcgaccgagaaatatgcctaggtatcccagatgaagcatccagggaaaggtatattcttatagaatgaagtttgtatgccactaagtcatcttaactgaatggtttgaaagtaagaggtgagaaataccaagtagccttttctttctctctctttctttttgt

SEQ ID NO: 21024 - DNA, 870 bp, Homo sapiens
  misc_feature 1, 2, 868, 869, 870: n = A,T,C or G
nnatatggcgaatatggccctctatatacgtcgcgctagcgcgggcgacagtgataggtatatgtgcaaaattcccttttaagcgggcggccggccaggtacctgtaatcccaactactctagaggctgaagtgggaggattgctttagcttgggagttcaaaactgcagtaagccatgattgtgccactctactccagcctgggcaacaaagtgagaccccatctcaaaaaaatttattcagttaaaatctttaacaataaagcaattttgagtcgtattttgcgacattctcaatatagttttccaacttgcattaaaatacattttaaacatttttgaagactaaattaatttttttaactgacatttatgtttcatttgacagcctttcgctgtatatttttatgtggacttttaggtattgtagtgattcctttaatgaagaaataaaataattgtcatttaaaaatgcatattattattaccttatgctataaaaatagttttaaaatagagtatgtttattaagatttaaaaataagtatagtcatgcactgcataacagcgttttagtcagactgcataagattacgatggagctgaaaaattactgtcacacaaatacttaccattgtgttattatttcgactacactgttcagtaccgtaacatatatgctgtacaggtttgtagcctaggagcaacaggctatacagcgtagcttaggtgtgtagtaggttataccatctaggtttgtgtaagtacactatcatggtttgtataacaacaaaattgcccaacagctcatttctctttatgtatccatgactggatattttttattgggggtaaaaaacacttaacgnnn

SEQ ID NO: 21025 - DNA, 301 bp, Homo sapiens
  misc_feature 1, 2, 3: n = A,T,C or G
nnnactgcgactctccgaagaattcatttccttgctcctttgggttgttggctgaattcacttcctcacagttgcaagactaaacgttcagatttgttgctgactgtgaaccagaggctggacttttctcctagaagcctctctctagtcctcctgtgtagttcctgcatttcagagcaggcaatccgcaaaatcccacgtgtcatgcaagatagcgcattcaaagatctctgggattaggatgaggacatctttgttgggggtgcaggaggggaagcatttgcctactactacagggggt

SEQ ID NO: 21026 - DNA, 1805 bp, Homo sapiens
  misc_feature 1799, 1802, 1803, 1804, 1805: n = A,T,C or G
acgcgggggggacgtaaggtggggcggtgaaagaagtttgctgacgaaggtggcgactgaggcacagagtgaaggggaggtgccagcccgcgaatccggccggagtgatgccatctgcagttttgtgatctgcaatgattcttcccttcgaggtcagcccattatctttaatcctgacttttttgtggagaaactccgacatgagaaacctgagattttcactgagttggtggtcagcaatatcacaaggctcatcgatttacctggaactgagttggctcagctgatgggggaagtggaccttaagttgcctggcggggctggcccagcatcaggattcttccggtctctcatgtctctcaagcgaaaggaaaaaggagtgatatttgggtccccactgacggaggaaggcattgcccagatataccaactgattgagtatctacacaaaaacttgcgagtagagggtttgtttagagtaccgggtaatagtgtccgacagcagattttaagggatgctctcaataatggaactgacattgacttggaatcaggggaatttcactcaaatgatgttgccactttgctgaagatgtttctaggagagttgccggagcctctgctgacacataaacacttcaatgcacacctcaaaatcgctgatttgatgcagtttgatgataaaggaaacaagaccaatataccagacaaggaccggcaaattgaggctctccagttgctcttcctcattctccctcctcctaatcgtaatttgctgaagttattgcttgatctcctataccagacagcaaagaaacaagacaagaacaagatgtcagcctataaccttgcccttatgtttgcaccccacgtcctgtggccaaaaaatgtcactgcaaatgaccttcaggagaatatcacaaagttaaacagtgggatggcttttatgattaaacactcccagaaactttttaaggctcctgcttacattcgggagtgtgcgagattgcactatttgggatccagaactcaggcatcaaaggatgaccttgacctcatagcttcatgtcatactaagtcctttcagctggcaaagtctcagaaacggaaccgggtagattcctgccctcaccaggaggagacccagcaccatacggaagaggcactgagagagctgtttcaacacgttcatgatatgccagagtcagcaaagaagaaacaacttattagacagtttaataagcaatcattgacccagacaccagggcgagaaccttctacttcccaggtacaaaagagggctcgttcgcgctccttcagtgggcttattaagcggaaggtcctgggaaatcagatgatgtcagaaaagaaaaagaagaaccctactccagaatctgtggccattggtgaattgaagggaaccagcaaagaaaataggaacttattattttctggctctccagctgtcacgatgacaccaacaagattgaagtggtctgaagggaagaaagaggggaaaaaaggatttctctgaaggatccagagttgtctcctatggtccatgcagaattttctgtttagtgggcaggtgttattcctgcccacagcaaagcttggacttgcagcttgcttgctgcattttgaattgtcaaagccaactaataccgtgacccgactgatacctctaacccctgtctttagatttacagtccaatgcttcactcagccattttacctcaccccaaaaaaaaaaaaaaaaaaaaaaaaaaaaaaaaaaaaaaaaaaaaaaaaaaaaaaanaannnn

SEQ ID NO: 21027 - DNA, 439 bp, Homo sapiens
cataagaattacatctcagcaaagttgaaactatcacacaggatagatgctcagggttgcttgagaatagccaaaactgagtattaacttcataagtgccaaagacttcaactgcatgtatttaaaaaatccagaggagtatgttatggtgagttattttgtaaaatgataattgtccctgttaatttaaatttttccctttgggatttgcttaaagtagggctgtgcctgtatatggaaagggacaaaattggcctttggttttgggcttaattttttattccccaaagactacttgaaaagggttaagatttctgtttttcttcctctctgtaaaggctacagctatgagcgtgtggatggttctgtgagaggagaagagagacacttgaccattaagaactttggacagcagcccattttcgtttttctcctgagt

SEQ ID NO: 21028 - DNA, 834 bp, Homo sapiens
  misc_feature 1, 2, 834: n = A,T,C or G
nnggccgtcgttttacaccccggaacacagcgtgtacacatgatgggtgccgggcccctcctcgagagtacttgtagaattaattaaggcgggggagaagttattttggatatatggctttaatcaggatagactagtttatattactgcctgattacttttgaaattccagaagatgtgtaatcctaactgcatgatcacagtgaatcttatataaagtgaaaaataccactattactgaattataatatgctagaaaagctgttgatggtaatgtggtctatttttaatttacttcatttggaccatcaccatgaaaataaatctcaggatggtttgaacaaatgaataacccacttgcccagcctatcctccaagaaaatatattgtggcaaattccattcttcagcttttgctgaccctgttgtgttattctccccattccctccctcctgccagtcaaatatttgtgtacccgatgttacgtgccagactccgggaagaataccagcagtttaagacaaaagccccttccttcaggaaatgtgtgatccaattggcttgttataaaatgttgttttgtaatgttgaaatttctgagtgtaagccatccttactgttaatatgtgtttgaaaaccctaatgtgtgcaaacatttaaaaagatatgaataatcagcctgggcaacatggcaagactgtctgtacaaaaaaataaaaaattagccaggttgtagtggcatgtgcctgtagttccagctaccaggtaggctgaggctggggcatcatttgagtccaggacgttaaggctgcagtgagccatgatcacactacn

SEQ ID NO: 21029 - DNA, 653 bp, Homo sapiens
gtccgaacatattggaagaaaagaaaggctcttagatggaggcaggctgccactgattatagcacaaatcaccatgagagaggaggtagatcctctggtatggttaggtactgtttgataattgatgtttattatgatgactgagtcatgacttatgctcaagtgtgtcagtctgttttgttcagggacatcatcaagtattgggcaatgtttctcaaactgtgttccatgaactgtttataagtattctacaaatgtggtcgattaagttttagaaatactaaaatttattaattttagaaaattaataaatatattagaaatataggacagcttccttttgggaattcataatacacattagtatattaaatgctttgcaactttttatttcagtaaaaagtttactctagtttttctaaacttatttgaccgtggaattattttttctccctgtggaacatgtcgccatcttttggaacaatttgggaaactttaatcttctatattttacaaatttttttgtcaaaagtttttaaaaaacaaagcatttaaagaaaattgcttttctgaaatgttctacttttgatgatgctagacagtgacacttacagtaacatccattgttcttaagttcgttttttaaaagttgt

SEQ ID NO: 21030 - DNA, 786 bp, Homo sapiens
  misc_feature 774, 784, 785, 786: n = A,T,C or G
ccacactggggagacagcatagaagttaagaatgaagatcagattcaagggcttcatcaggcttgtcagctggcccgccacgtcctcctcttggctgggaagagtttaaaggtggcgtctcaccaagcctcagaacgacttacataaggggcaacaaacactcctctttttttccttctccttaactcttcttttaggttgacatctaatttgtcttaaaaatttatttgtttcaaattaatttgtttttaaaaattaagtaaagccttgggatggggaaaaggaattttattattttatgtgtttattcaagaagtaatttaaaatccaaattcaattttaactagcagaattctagagatactttggtctcagtcaacctatccaagttgatcaatggcagacagctttgatttttgcccccctactcctgcctgtagtttcagcttttactccccacattatttctgtgtgcttgaagatttgctctaccttgtcctttttctcctattttcttgcatttgccctgcaaagaaagatcagatcacatacacaaagctgtaggtaatatagcagtgtaattacatacaacttcctactacaagatttagttcttttaggccaggcgcagtgactcatggctgtggatcatttgaggtcaggagttcgagaccagcctggccaacatggtgaaaccccacctctactaaaaatataaaaattagccaggcatgttggcgggcacctgtagtcccagctacttgggaggctgangcaggagaannn

SEQ ID NO: 21031 - DNA, 265 bp, Homo sapiens
  misc_feature 265: n = A,T,C or G
accactgtctgttttcaggggttaaatttggagaatatctttagagcctcaatctggctattttggaagattattttgaaaataatttcaaggaaaatactagatgtcttttagataaggcttttcaatttgaactcggtatacatgtaaattgctttttcttcatctagatgaatttaaaggccactcgttgctgcaagctgcacgagaagctgatgttactcaaatcaaaaaacatctctttctggaaatggcgaatttcaan

SEQ ID NO: 21032 - DNA, 285 bp, Homo sapiens
  misc_feature 164, 165, 166, 167, 168, 169, 170, 171, 172, 173, 174, 175,176, 177, 178, 179, 180, 181, 182, 183, 184, 185, 186, 187,188, 189, 190, 191, 192, 193, 194, 195, 196: n = A,T,C or G
acaagcagttaacttagcaattaggcctgggcagggcataaagtcctcctcagcaagagttctttatcataaaagattggggacttaaatctcaacaagtaaattttaaccgtgatcatagtttctctttttccaactttggaaattctagactggacaggacnnnnnnnnnnnnnnnnnnnnnnnnnnnnnnnnnaccctctgattctcactagttgaatgcaagaacttgaaaggttcaggtaagtgttttgaaaaattttgactttccaaacttttgccact

SEQ ID NO: 21033 - DNA, 2139 bp, Homo sapiens
  misc_feature 2139: n = A,T,C or G
aggtacagtgtagaaagcagtgggaactgtgattggatttggcaacatgtcagctttatagttgccgattagtgatatgggtctgatttcgatctcttcctgatgtaaaccatgctcacccatatcccactatacaaatgcaaatggttgcctggttccatttatgcaagggagccagtactgacttatgccttggcagaggggagactccaaaagagtcatcgcaggaagaagttaagaacactgaacatcagaacagtctgccaagaaggacattggcatcctgggaaagtccgccttttcccttgaccactatagggtgtataaatcgtgtttgcaaaatgtgttatgatgtgtttatattctaaaactattacagagctatgtaaagggacttaggagaaaatgctgaatgtaagatggtcccatttcaatttccaccatgggagagcctaaaaataaattatgacatttagtatctaaggttagaaaaccacgcccacatgctaaaatgggtgttgaaaactaggttacttataatgcaaggaatcaggaaactttagttatttatagtataatcaccattatctgtttaaaggatccatttagttaaaatcgggcactctatattcattaaggtttatgaattaaaaagaaagctttatgtagttatgcatgtcagtttgctatttaaaatgtgtgacagtgtttgtcatattaagagtgaatttggcaggaattcccaagatggacattgtgcttttaaactagaacttgtaagacattatgtgaatatcccttgccaattttttttataataagaaaacatctgactaaagtcaaagaatgatttcttatggtttattttgatgaaagttcttttaacatgtcttgaatgtacacataaaggaatccaaagctttccattctaacttaatctttgtgataacattattgccatgttctacaaccgtaagatgacagttttcaatgtagtgacacaaaagggcatgaaaaactaactgctagctttcctttcatttcaaaagtccaagaatttctagtatatttggattttagcttctgttcaaagcaaatccagatgcaactccagtaagtggcctttgctcttttttgtaccaaagagcccagatgattcctacagtccctttcttctctaacatgctgtggttccttaaatatgagtaatttctctaagatataacccaggtgctttgagaagctgcattaaggtgttcaggccctcagatatcacatggtacacttgattagtaataaaaccagagatcaatttaaattgctgataggtcctgtctcagtgtgtggcattgactgttttcaggaaaatagatacagattaatatgagttatgcgtgtaggttgtgtatagattgagaagatagatacttctcaatctagtagtttgatttatttaaccaatggtttcagtttgcttgagcatatgaaaatcctgcttaatgtgcttaagagtataataaatgtgtacttttgtcctcaaacctagtagctgggttttaacactcatggacatggtcttaatcaatggagttaaataaacaaattcagcaagttattaaatctgacatggtaggagaggggagatgtgtcctgcttattaaatgtgttggtccattgaaagttacatggattgccaatttttaaaacactaaagttgaataaaatgcatgaacaatagaaaaatgctgaacattattttggatgctagctgcttggacattaactgtgttatttctgctttgagatgaaaatatatatttatctttgcttattttatcccagatgtgttctgaatatccttcttcataaatcatggaaaactcactgctgagatagtaaaccatgaaatcgccttttcagttggtgccatgtatctgacagttccatcttggaaggtttcaaaattaccttttaaaatgatctcagaagtctgtagattctcaatgatactgaaagctttgcacctctttggtagaaaccaggtctatttagaaaatggctttatgataaaatgtgcctcctgagtgataatgaaagtgttcctggatattgtattggaatttaatgtgcttaccacan

SEQ ID NO: 21034 - DNA, 643 bp, Homo sapiens
  misc_feature 1, 2, 609, 610, 611, 612, 613, 614, 615, 616, 617, 618, 619,620, 621, 622, 623, 624, 625, 626, 627, 628, 629, 630, 631,632, 633, 634, 635, 636, 637, 638, 639, 640, 641, 642, 643: n = A,T,C or G
nnactacttctaaatggaggaatttgtgatgagcgtggggtcacttttaaagaccatgcgtgtattcagtgcatttatccagcttggggcatgatcaacattgccaacacattaagagtttggaattgttataatatcatttaaaagaacatgtgccctagatttttttaactttttttgctcacttctcaaagcatgttgggaacaccatcattttctgaggctgaatttggtctgggtttctgaggatgcctgaaatggcatcgctgaaaataaatcaccccaatcacatatgtgcttttaattttgtccacattgcatttcagaaaattgtgagtaacgtgaacataaacttctaactaagaaaaagggtaactgatgatcttgctttcttaacaaatatactgtctttttaatcatagttctattctagacctatatataaataagctgtattccactgtaatcatactgtgatgtttggctttattcaaaaactatgtattgtaagtatcattcctgtgactacagacttcatatttatcattttagtgactgcataatattccactgagaggatatactccttatggccctgttaatggacannnnnnnnnnnnnnnnnnnnnnnnnnnnnnnnnnn

SEQ ID NO: 21035 - DNA, 447 bp, Homo sapiens
  misc_feature 1, 2, 247, 248, 249, 250, 251, 252, 253, 254, 255, 256, 257,258, 259, 260, 261, 262, 263, 264, 265, 266, 267, 268, 269,270, 271, 272, 273: n = A,T,C or G
nngaactatatctaccccaccatggcttaaaaaaatcagtggtatatattgagaatgtcagtcatgagcttagtgtttaagtaacacatcccacttacagttgtttgcatgattagtcttgtgtatcatgatgttcaactttgcttttgctgtgccagttcaaaaatatcttttttgctaaaaactcttaaaattcatgacataagttttgttttgatcacccggttttatatagtatttctgggcnnnnnnnnnnnnnnnnnnnnnnnnnnnagcagtggtaacaacgcagactacgcgggcatgatgtatagaataaactactgcattattttaacagatacttgatattatatattatgagtatatcataatttatttggccattcctctactgatggcctttccggtggtttccattttttccccagtcactaacaattctgc

SEQ ID NO: 21036 - DNA, 1170 bp, Homo sapiens
  misc_feature 1, 2, 3, 4, 1162, 1163, 1164, 1165, 1166, 1167, 1168, 1169,1170: n = A,T,C or G
nnnncgtccgttccttgattttttcctggcaaacaattagctatttcatttaataatcacctaaaacttttcagtcttctgattaaaattacgctggagtgatagaatgtattttcatgatagaaattgggaaaaaaaatggggaatgaagtttatcagcatttcagacttgttttttttttttttttttgcaagactttgatgagattgttcacttttgtctatgtaaaatcccaaatccttgagaataaaaaagggggaggtttaagtcacttgttgcaatgccctttttaatagaggcaataaatctaaaggccataaatttagagtgacttacagaagatcgaactttggagtgtggcagagtaagggatggaaaccgggccctccagttcactatcagtagcttttgcactggtctgcccttcctaaattaagtatgcacttcaatttgatgagtggaaacagtctatctgggcagtaaccagggagctttgtgcctagtagattgcttctgttctgcacttctttggtttcccacctcaatgtaaaaaatagctagcaatgaagtccagaagttgtcaatggttcatccccagaagaatgcataatgtccaaagttgtatgtgtatgatgtcttcaatggtattaagttatttcaaattcttagttcacctacataaatcatttctaacaagcatcttcttaaccaactttatgcacagtgtatgtttgtaagtgcttctgcacgaatgtttatacatgactgtttccatagtacttatgtttttaaaaatattcagtcatttcctactataatcctcatgtatccatgtaactgactcaaagatacttcagacacagaaaggttaacttggagcaaatctcattcttcttttttccttcccctttgatgttggctggcgtttttaatgattatatattgcccgtgagtaccgaggtttgggacaccctcttcctccaagggggcgccagccgggtccttttggcacactcatggtggcgcctctctttaaggggagttacctcactcgacttggagaccctcatcgggcggtagaagtggccgcatttcagagataacgattttcgaagccgttttttttcacccctaaaggcgcctcctgtcatcgctctgtgnnnnnnnnn

SEQ ID NO: 21037 - DNA, 1156 bp, Homo sapiens
  misc_feature 1152, 1153, 1154, 1155, 1156: n = A,T,C or G
acccgggggaaatagggtgttttcttcccgagagaggactgctaatagggggttaaagggggacgatgtgaaggatagaacctgcggtccttcagaaggcgaagaagaaagaaaggggaagcagtgaagaaagggacggagatactgggacagggagaaaaaagttgtggagagtagcttttaaggactcatttggtggccatggatccaacgtgctcttctgagtgcgtttataacctcatacccagtgacttgaaggagcctccccagcctcctagaaaaaaactttgatcggaacgtgcccaaaaagcctgctgtgccattgaagactgatcatcctgtcatgggaatacagagtggaaaaaattttataaatacaaatgcagctgatatcatcatgggagtggctaaaaagcctaaaccaatttatgttgataaaagaactggagacaagcatgatcttgagccttcaggactagttccaaagtacatcaataaaaaggattatggtgtcacacctgaatacatatgtaagcgaaacgaggaaataaagaaagcccaagaagactatgatcgttatatccaggaaaaccttaagaaagcagctatgaaaaggctctccgatgaagaaagggaggcagttttgcaggggctgaaaaagaactggggagaggtgcataaagaattccagtccctctcggtctttatagattctataccaaagaagatccgcaagcagaggctggaagaagaaatgaaacaactagaacacgacattggcataattgaaaagcacaagattatttatattgccaataagtaagaatggatctttaaagtataacaatttcaatgtaggggaaaaaaacatggaaaatataaaaaactccaagtttttcaaaaaggaaaatactatgaagaggataaaaatagtcttaatcagaatgcttaggcaatatgcaaagaataattgagttattcacttacacaagaagaaattttgtttttactagtgtcacgttttccacatataaactattaaatttgagaatatgtgttccagttccacaatgtaattcattattattatgtacttgtttcacataaacattaatttctaggtcctgaaaaataaagtcagcactcagaacnnnnn

SEQ ID NO: 21038 - DNA, 2219 bp, Homo sapiens
  misc_feature 1, 2, 2213, 2214, 2215, 2216, 2217, 2218, 2219: n = A,T,C or G
nngatattttattatagtataatatgataattgggagctcctgttgcatctcactgccccaaaaatgttggaatgccatatggtacagggaaaagattggagttcagcgccgtggagtgcatggctgtcttaatgacacaacttaattttcatgatgatagatctctgaatgattaatccagaatgatttggtacagtgactggaagaaattgtttttctgggaatttgcttcccataatgacctgatatacaggtgaccttagtataattgaaattaattataattttaattagaacatgctctgtttacagattataattgcgcagcattttaaaaaaatatacataattatgaggatgagagaattgcaaacttgaacagttcttttgttttctctccttttacttgaaaagctttcagaaagcttttgaaagatgacacagttttcatagcaacagtatgcaaattaggtttttctgccaagaaactcataaactaaagtatggaataacacaaatgcttaatcttaatcttggctttggattttgtaagcaaaagcattttctgcatcaatttttttcagtatgcagttgcatatttcattttttgattatgtcaaaagttgaattctcattttatgctgtgtttctcattagttgcagtaaagtgttgatttcattgctgcctttcaggccttcatcatacaaaccctcaccatttttcactcctgtgcttttgccataggtttttttttgtttttggtttttttccagcaactagtttttctactttcactctttcccaccagagtggtctctctaaaacaaatttgctaaagttcttaagtaggctcttttttctctaaattacagaatagcaaactaactcctaagcaagatgagtcagtgtctatgaccttgcctctttcttcctttttagtatcctcaccaaccttccctctgttgacttttgtaatccaggaatttggaactacttatgacttagtgccttggcataatcacatgccatagatgaacatgttcaagactcagttcaaatttaactttctgtgaagccctacctgacttccctaggcaggtattttctccatgcctatagtatattgaaactttttctgttaaaataacataacatttcaattacacacacacaacctgtctcttccactgaacttctctctccccctttgtattctcagtgtctagctacacataataggactttgataaatatttttgaatgaaggtaatagaaaacccaaacttctctatatttgtgtactttcacaaacaaaggcttagaattccacatgaaagtccacatgaggtaagtgtgcattcatgagcatgtgtgcactctgggcaaaccaacagaagataaacagcaaggaagagcagttgttttgtgaaaaataatcatctgttagctgtaaatcagaaatattggccaaatcagaattcttgtttctaaaatgaggcttctaaaattttcacataactgccaaactcttatttgtaattcttaaatatgccctaaagatcatctttctcttttatagacatttagtgtatacagtccacataaatacatatactgattacctacagacaataatgagacttcagaaagaatcaaaagcaatagtgatggtggaatttttaaataatattcagctggggggaaatagactgagtttgtgtgatttcaggttatttagagttattaatgtaaacataagaaggcttgtgactcttatcaccctctatagaatataaagactaaaaataaaaactattacctctgggcctgtttttctttgggattagataaagcctttctaccatatcaccaaatactcataaaggctaacacagaaagcttttccaagttaataatttctaaattaaatatcagggccaggtgtggtggctgacacctgtaatcccagcactttgggaggccgaagtgggtggattacctgaggtcaggagctcgagacaagtcaacatggtgaaacctcatctctgctaaaaatacaaaaactagccaggcatggtgatgcacacctgtaatcccagctactcgggaggctgaggcaggagaattgcttgaacccaggaggcggaggttgcagtgagctgagattgcaccactgcactccagcctgggcgacagagtgagactctgtcnnnnnnn

SEQ ID NO: 21039 - DNA, 510 bp, Homo sapiens
acagtgagggagagccgagggaaccagcgcggtgcctagcggaactccagggctggaatcccgagacacaagtgcatctgctagctgttagcacttggcagacggagttctcctctagggtagttctaactttgggtaataatgtttgtcagctacctgatattaacattgctccacgttcaaacaccagtgttagcaagacctgggggagaggtaagccaaataaaatatcttgtcagaagttgtattttttttcagcattatatttcctcttctatctaccaagagggatcagggaatggaattttatggggtgcaaagagtaatgctttatattacttttgtaggcttctcttgccttttcttatatgaagacttcttttcttcttgaagaattttatactttctaaaatgtcattttgaagctgtctgtgcagttgccacactgggaagttgctctggccttggtgacagatgcctgtagcacgcacgcttctcctgctgtagcag

SEQ ID NO: 21040 - DNA, 531 bp, Homo sapiens
gcactgtcagatcctttggcatccggagaaatgaaaagattgctgtccactgcacagttcgaggggccaaggcagaagaaatcttggagaagggtctaaaggtgagcctaatcccctaatggagtgatattgatcagcactcctttagtaacacatgtagataagttacatttaatgttctgttctttggtgtcttgatatttatttacttaagcttctaaaaggctttttctacaatcagcagggttaaactgttcttggtggtttaaaagatgcttgaggctgggcacggtggctcaacgcctgtaatcccaacactttgggaggccaaggcggttggatcatttgtggccaggagttcgagaccatcctggccaacatggtgaaacaccatctctactaaaaaaagataaaaattagccgggcttggtggcgggctcctgtagtcccagctactcgggaagctgaggcacgacaattgctagaacctgggaggtagaggttgcagtgagctgatattgtgccactgca

SEQ ID NO: 21041 - DNA, 522 bp, Homo sapiens
  misc_feature 1, 310, 311, 312, 313, 314, 315, 316, 317, 318, 319, 320,321, 322, 323, 324, 325, 326, 327, 328, 329, 330, 331, 332,333, 334, 335, 336, 337, 338, 339, 340, 341, 342, 343, 344,345, 346, 347, 519, 520, 521, 522: n = A,T,C or G
natcacgccactcactccagcttgggcgacagaatgagactccgtctgaaagaaaaaaaaagaaaatccagaacaggcaaatccatgaccagagaaagatcagtagccgcccgggactggtagggttggggagaaatggagagtggcttctaatgggtacagtcttttgggggtggggagagaatatgaaaatgttgtaacattgattgtgatggttgcacactctgtgactatactaaaaatcactgaatggcactttcagtgggtgaattagatggtatgtgaattatattgcagtaaagctgttaannnnnnnnnnnnnnnnnnnnnnnnnnnnnnnnnnnnnngtaactcttctctgcatcaccttcaatggttcagcgcacattctgtgcttcggtcatcatctattaaggcgggttcttctgtaatcagggtatgcagacttaatctgttattacatttcttcatgccagcccttattggcttacaatatatcttccacactcatgtcgatcnnnn

SEQ ID NO: 21042 - DNA, 1222 bp, Homo sapiens
  misc_feature 1, 137: n = A,T,C or G
naacagccatcgagctccaaggacacaacgacagagtccaggccctctcctatgcacagcacacgcgacaattgatctcctgtggcggtgatggtgggattgtcgtctggaacatggacgtggagaggcaggagccnctggtggagctgcttcgtggttatgataagtgctgtgtgatgctcaccttgggaggtctgcgacatatattgaagtcatctctaacctgaagtactgacagactttctggaagaaaaggcttgtaggaggaaacttcagaattctattaaatggtgtaaatgatgaaattatagttgatatatgctagagcatcagtgctgggtattttagaagggatggagtcatcattggctaatgttcccagtgaaggattgagggaggaacattgtgctgaaggatcaacagagtctggatgtgctctgagcaggagcacatgggctttgcaggccacgaaacagcaagagtaaggacaaggtgaacacgataggttgatgcagtgcattaatgctcatgagcggtttagagaagcagtcagagatgagaggatggcagctagctgaaagataaggacagacaatggaagaccttgagtggctggatgtagatcgagtgacattgcataggttgaacaggtgttttatacagttaatgaaatccatttttgttttgttaacttttagcattttttaaaagtatatattgtatataacattcttggtagaaaagttacaaaatgctcattagtaaatagaaaagatgtcaattactcatactaccaccatccagaaatatcactctgaacatgttggcacacatccttcctaacatttttctctacacataacacgtgtgtaagacttttttttgaacaaaaaatagaatcacaaacatgctgatttattttttcccctttattggtctttagctcccaaatgcctcctcacagatacccactgtgatgtgtttgatgtgtgtcctgaacacgcatgcttccttataaaaggtgtgtgtgtgtgtgtatgtgtgtctgtgtgtgtgttttaaagtttacataactcagccgggcaccggtggctcacgcctgtaatgccagctgttgggaggccaaggcaggtggatcacttgaggtcaagagtttgagaccagcctggtcaacatggcgaaaccctgtctctacttaacatacaaaaaaaaaaaaaaaaaa

SEQ ID NO: 21043 - DNA, 791 bp, Homo sapiens
  misc_feature 681, 686, 689, 692, 788, 789, 790, 791: n = A,T,C or G
atcaacatagtactggagtcctatttcctgataaactttttagactagtgttattttgcagagatagttaatatcatgaccgtaaccttttaccaggagtttttcagtaaaataattttaagaacctgcggaaaaatacaaaatgaaacataatttaattgatttttactcatgtagcacaataaatcacttcatttcgagaggacctctgagcacttatttctcccaaatgggatcctcaccaattagtggaatgaatacgggtctagtttctgttaatgaaaactcattgacatgataaatacaaggcctaacttgtgtgataaagtttacttgataagcagaaaccaacatgaatttagaggagaaaaacagacgagaaatgaaagaccttttaatttagttatactgatattgctgaagttaattgtttattttaggacgccaggagaagaaaatcacactgttacctttttctttccttctttttactttcatctaagctgaaaggtatcactgatactattagcccctcaaattgcatctctgctttgctcactagtggtttgtattgtctggcatggccagtgcattttgacttcttatagttggcactagtgtggaaacacaggtacagtcatgctggagacagtaggatgagaattaaaaaaaaaaaaaaanagtcnacncgnccgcgaatttagtagtagtaggcggccgctctagaggatccaagattacgtacgcgtgcatgcgacgtcatagctcttctatagtgtcacctaaannnn

SEQ ID NO: 21044 - DNA, 409 bp, Homo sapiens
  misc_feature 1, 2, 300, 315, 399, 404, 405, 406, 407, 408, 409: n = A,T,C or G
nnagtactacctccccacaatgtggactgcaaaatgctggctggctgtgttgcttggtagcaaaaggggttgcatgctgctcagctctctgtttctctccaacccaagcatttggatgtgggactgtgccccgcctggtgtctggggctctgggaggggcatttttacttccctgtttacaagaagggttacatcctattccaagtccaaagtggacacttgttcctttgctcagcatcccatgcagactcagcaggttacccgctcccctgggagggtggctgtggccaagcactgctnccatgggacttacancccggctggtcaatggaacaagcatacagtttttgccctcaacttttggggaaaggggctaagatgttagaagtataccaatcnttaannnnnn

SEQ ID NO: 21045 - DNA, 1872 bp, Homo sapiens
gacccacccgtccgcccacgcgtccggcagctattgagatcttcgaatgctgcggagctggaggcggaggcagctggggaggtccgagcgatgtgaccaggccgccatcgctcgtctcttcctctctcctgccgcctcctgtctcgaaaataacttttttagtctaaagaaagaaagacaaaagtagtcgtccgcccctcacgccctctcttcctctcagccttccgcccggtgaggaagcccggggtggctgctccgccgtcggggccgcgccgccgagccccagccgccccgggccgcccccgcacgccgcccccatgcatcccttctacacccgggccgccaccatgataggcgagatcgccgccgccgtgtccttcatctccaagtttctccgactggccgaggctgcgcgcctgattcctgttttggcggctcaatcggttggttcctggagattgttttgtccggtactactgtgttatttctaaaaccctgcccgctttttccatccccgcacatgcacaacaacggatgcaatcctggacattttaaaaagttgatagttttcattttcgctcctcaaaggagcctggggtaggaggaatccgcagtgggagctaacgatcctaagcgttgtttctctgttcttcttttcttctatagaacattataaacatcactggttcccagaaaagccatgcaagggatcgggttaccgttgtattcgcatcaaccataaaatggatcctctgattggacaggcagcacagcggattggactgagcagtcaggagctgttcaggcttctcccaagtgaactcacactctgggttgacccctatgaagtgtcctacagaattggagaggatggctccatctgtgtgctgtatgaagcctcaccagcaggaggtagcactcaaaacagcaccaacgtgcaaatggtagacagccgaatcagctgtaaggaggaacttctcttgggcagaacgagcccttccaaaaactacaatatgatgactgtatcaggttaagatatagtctgtggatggatcatctgatgatgatggataaatttgatttttgctttgggtgggctcctcttggggatggattatggaatttaaaccatgtcacagctgtgaagatctggcacaagatagaatggtaaaaaaaaaaaaaaaattttaagtgacagtgccatagtttggacagtacctttcaatgattaattttaatagcctgtgagtccaagtaaatgatcactttatttgctagggagggaagtcctagggtggtttcagtttctcccagacatacctaaatttttacatcaatccttttaaagaaaatctgtatttcaaagaatctttctctgcagtaaatctcgcaggggaatttgcactattaataggaaagttaaacgttttaaacatggtagtactggaaattttacaagacttttacctagcacttaaatatgtataaatgtacataaagacaaactagtaagcatgacctggggaaatggtcagaccttgtattgtgtttttggccttgaaagtagcaagtgaccagaatctgccatggcaacaggctttaaaaaagacccttaaaaagacactgtctcaactgtggtgttagcaccggccagctctctgtactccctggcaccatctggttcatgccaggtttagagttcatcgtgtttggcttcctggtctttgagtttaaattcctcggctgtgaccttcccatctccattccggtcctggttggtgaacatattcttcacaatcagctcagcatcaaagccaggagcgagtttccctttgccagatgccacctgggcgtgaatgtacctgcccggcg

SEQ ID NO: 21046 - DNA, 462 bp, Homo sapiens
  misc_feature 1, 2, 11, 462: n = A,T,C or G
nnacccgggtnggaaaagtatacagattaacaaaagaaaccttggttaaaagaggaaatacaaatcaatttttataagaaattcatagtgcatctgctgggtgtaggagaggaggcaaaaaaacagtggaagcactctaggtatctctggtagaaaacagctttgattggtttttgatttgcattggcagggaaacctaaacgttagtcttcaaaaatcaaacatttctcaggtgtgagcaactttacttatttcttccccatcttttacaattttcttcaatattggtaaataaaatggattactatcaggctttaaaaactcttccttttgccaagttattctgaaataacttcttagactctaaagaaaattagccttgctctgggacttggagagagaggagccttcagtaagtaataaataacttatccaggtggtcacctccctttccaaccgtcn

SEQ ID NO: 21047 - DNA, 458 bp, Homo sapiens
  misc_feature 1, 2, 3, 4, 111, 112, 113, 114, 115, 116, 117, 118, 119,120, 121, 122, 123, 124, 125, 126, 127, 128, 129, 130, 131,132, 133, 134, 135, 136, 137, 138, 139, 140, 141, 142, 143,144, 145, 146, 147, 148, 149, 150, 151, 152, 153, 154: n = A,T,C or G
  misc_feature 155, 156, 157, 158, 159, 160, 161, 162, 163, 164, 165, 166,167, 168, 169, 170, 171, 172, 173, 174, 175, 176, 177, 178,179, 180, 181, 182, 183, 184, 185, 186, 187, 188, 189, 190,191, 192, 193, 194, 195, 196, 197, 198, 199, 200, 201: n = A,T,C or G
  misc_feature 202, 203, 204, 205, 206, 207, 208, 209, 210, 211, 212, 213,214, 215, 458: n = A,T,C or G
nnnnagttttataccaaaaaatgcatgttggaggaattgtctgaaattgggacaaaaccaccttcatgtaaaccagctttgcaaaattttccagcccagatactcttcatnnnnnnnnnnnnnnnnnnnnnnnnnnnnnnnnnnnnnnnnnnnnnnnnnnnnnnnnnnnnnnnnnnnnnnnnnnnnnnnnnnnnnnnnnnnnnnnnnnnnnnnnncaggtacttccgaaagactcatacaatctatccaaccctccagataggctggtcctctctctagtgctttatctttgcatctgtcattcctgctttctcaaggcccacactcaattttgaaatcagactaacttgatttatatgttgccttctatttttaagtgtgtgacttaacctcaacattttcttagtttttacctccacatttgtgaatggggcttgctaatacctactttttagagn

SEQ ID NO: 21048 - DNA, 1474 bp, Homo sapiens
  misc_feature 58, 59, 60, 61, 62, 63, 64, 65, 66, 67, 68, 69, 70, 71, 72,73, 74, 75, 76, 77, 78, 79, 80, 81, 82, 83, 84, 85, 86,87, 1458, 1460, 1461, 1462, 1463, 1464, 1465, 1466, 1467,1468, 1469, 1470, 1471, 1472, 1473, 1474: n = A,T,C or G
gcgtccggtcaggagttcgagaccagcctggacagcatggcgaaaccccatctctacnnnnnnnnnnnnnnnnnnnnnnnnnnnnnnaaattagctggctgtggtgataggaacctgtagtctcagctacttgggaggctgaggcagtgaacccgggaggccgaggttgcagtgagctgagatagcaccagcctgggcaacggagcgagactctgtctcaaaaaaacaaaaaacaaaacaaaaaaaacctctccaaaagaagtttgagataattttatgtttagaaaaattagaaattggattgagtaaaatttacatattttacacaagaggactaacatctttataatatttaacctttcagtaaatttatgttttatgtttctcagcctatcttttctagtataggtgatttttttagtgtggttactattgtaaatgagatcctactactttaaaaaatgaaaattaaatctatcgcttttatgactttaaaacattagacttatgtaagtgtaaacattatttaaaaacataatgtagaaaattaaagtcccccataattaaaatccctttcccccagaaaaagtcaacagcatattcatcagttttttcctaaagtatgttttagcactttgaccatatgagacaacccttctgctgttagcatttttctctttgcaatagatcttcctatgtcagtacacatcaatctacctcattcttacctctgcataagagagtagtgtgtagttgtataatagtttaacttggcgattggttattgattttgtaactagccagttactgaattattctaaaggttttgctgttgttaatttctttcgcctttttcagttgggtaatagttctgggtaggttgataattttattcccatatttgtaatcttatttcactttctcaactcatcacattgactggtacttttagaacaatgttaaaaaacatttacataattgtgctgatattgtacattatttgatatatatatattttttttacttagaagagtgtttctccaaaactataaatttgactcttagtgtaaaataatcttaatatttgaattatacattcaggttatgccctctatttctagtttgatgaaaatattattagtaatggatgttggggttttattaaatggcttttttccacatctgtcaagatgatcaactggcttttctctattatgactttagatgaatcgttttaatagatttgctaatgttaagacatctctgcatttctacaagaatctgatgtagtcatagtatactattcttttaatatacatctcctttcaatgttaacagtggttatttatgattggttggtccatagtagatttttattttgtgtttcttatctgtactttctgatttttctacaaagattgtgtattacttgtataataaaaataagagctttaaatngnnnnnnnnnnnnnnn

SEQ ID NO: 21049 - DNA, 666 bp, Homo sapiens
  misc_feature 1, 2, 666: n = A,T,C or G
nnaattatactttaagttttagggtacatgtgcacattgtgcaggttagtatatacctaatgctagatgacacgttagtgggtgcagcgcaccagccatggcacatgtgatcaaacttttctacacaaggggagaacttgacattatgttcacactaatggcaatgtacatttacgttttacattaaaataaagcatttaaggtatttttagatctgtgctataactcacttgttcactttatcactggtgtgctaaaatgtacacaacttcaccttaaaattaagaatccttgtcaaaatgtttaacctaaaacaaatcattaaaaacaatgagacagatctaaaatgtggaaggcttgtattcttccaaacctcactgacaggacaaacaaaaagaaggggaaccattctagattaagacagactaagagaaatatcaaaccaactgcgattcataaatcatttggggatgttacattagaaacggcggggtgggaactgcagaagacatttttgggacaagtttcaatatggactataaagtagctgacatgagattactgctaattttcttaagtgtgataaaatcgtggttatgtatgtgaatgttctcattcttaggaaattcatgctgaaatacgtaagagataaagtataatatctan

SEQ ID NO: 21050 - DNA, 1635 bp, Homo sapiens
  misc_feature 1, 1635: n = A,T,C or G
naacatttcaattgcttttaccacccacagacaaccattattggatgatttttctcaaatgtttctccattttatttatttatacagtggagatcaaatatgtaaaattttgtttcctacatgtttttttgatttttacctaacaagcatttttccactctatggcaaatcttcatatgcattattttaatagctgcataatattctgttttgcaggtaaattatcttttaggccattttccatgactggacaatatgtggatatactctaatagtaacacacattcgtggcctttctcataaaaaatcattacaaatttccaatttctacaattgctcatggaggacaactaaagccttggctaaaaacttagcgacttaagtgtgaaacacagacacctccccagtaaattgtttacttgtccagaacgcccacctccagccatgtcacagaaccatgtacaactcttccttagagaagcggctctccgccttcattttcttgtctctgttgtaggtaatatatttgacaccaggagagaaaacacggaggacacagaaccaggtttcattgcctagactttgattttagtgacattgttgagtggcatatgtaacttccgtttgaatttccacaaagatccacgtagcatttcaggttcctgcaaagtgtgggtgttctgtcaagcttacctgtcatgtttgaatagtttcatatactttctttgtaatgtgtgataaccaagcctccaatctggtataagattttttaaatcatttttagggttgatttgttaccctttaaaagtccagcacatgattcagtgagttcattgtccattataaagaagtggttctctcttccctgttttcattcaaaacctcagtatgaatatagagctttgaaacgtatttattttaatgtaaattgcttagatgcagtataaaggagaatggctctttccagtgctgagagagcagttgtgaaggccaagattaattagaccttcatcatcttagaagatgaaaaagttgttttgggagataggatagctctgacctgtaagatgaaatcattcatgacgtcagtgccccccaaatagccatttgtaactgagtaagtgcaaatgacctatgagttcttaggaaagaaaaacctttcacctaagttgcgtcaacacaatgacaaaataactaattaaaaggtgagaaaaccagtaaattatctacatgatacctgacagccattttaacagatggtcttaacggagtgctacagggttttggcaccatgtggtaactagctaaaaatgtacttaatattatgtcatttatttggttcctagtatacttgccctccactttatataaaactaatttatgaaaatctggatttattttaaaaagatatcttgccatgaaggtatttgttttatagaaatatttacctccagatttctttctctaataagatggtgaatttaaaacactgtgttatttagaaacactgcatttacacttcatttattgtataaagcaaattgcattgaatcttcgccacttgacccaaaggccaaaaattggcatgagaacaatttggactacacatcaccaaaacccggggttcacacctgn

SEQ ID NO: 21051 - DNA, 930 bp, Homo sapiens
  misc_feature 922, 923, 924, 925, 926, 927, 928, 929, 930: n = A,T,C or G
gctgagctctacgaggcggagcggcggcggtggcgacggcgatgggaccccagcgagagatctgcagctaggctggctgcacttgctccacgggtcaggggatcggagggggattgaagaatgcgccattaaaaggaaagatcaaggagtaaaccagaagaagaagaaaaagaggacttcaaagctgggaaggatgagttcttgcagcaacgtctgtgggtccaggcaggcacaggctgcagctgagggtggttaccagcgctatggagtccggtcctacctgcaccagttttatgaggactgtacagcctcaatttgggagtatgaggatgatttccagatccaaagatcacctaacaggtggagctcagtattctggaaggttggactcatctcaggtacagtttttgtgatcctcggattgactgttctggcagtgggctttcttgtgccccccaaaatcgaagcatttggcgaagccgattttgtggtggtcgacacacatgctgtccagtttaacagtgctctggacatgtacaagctggcaggagctgttctcttctgcattggaggcacgtccatggcagggtgcctgctgatgtcggtgttgtaaagagctactccaaagaagaaaaattcctccaggcagaagtgtaaagaacgaatcgcagacatcagaggccacacccagcggtttacaaaagctccaggggcggggaaacaaagattccagtcacttggtccgagggttcaagaggttcagtctctagtggggaactgagactttccaacccagttcttctggtgattatgcggggtgaaaagagggggcggttcggaaaagaaatggggggggccagggggtcgcgggataaggggggcaccgggcccgggcggggggggggggacggcgatacggaannnnnnnnn

SEQ ID NO: 21052 - DNA, 2404 bp, Homo sapiens
  misc_feature 1, 2404: n = A,T,C or G
nccaaccttggctcctctgacaagaagagcttcccaatcatctctggaaagttcaactggaccttcttactctcgttcatagcagctgtaaaaaaattgttgtcacagcaaccagcgttacaaaaaagaaaagcctgtttctaggggatacaaagcaatcctgtgttctcagaggaagttgcacacattgtgccctaaagaaggccctcaggtgaaagagcagagctgtgaagaactatcagatttggaattcaatgacactcgagttctggtccaatctgaagccatggattaatctcaaagaatcagtcagtttcatgcaacagaagcccttttcaatggcacctttatatttttatcattcctttttcttcatttatctaaccccaaagccctgatatgccacagaaatggagctatacagccatgaagcggtgttacaggtgaggagtgtaatcctaggaagcatcaggtgaaaagcaggagaccaaagaagtggtcaggaacaatcatcagccctcctctgggcgggaatcagagcagtcagtccagcaggaagagtggcagactttgtagctccatgggcacgtcatttactaatgctaagatgtgttggactctgaaaaacaaaattctgtggctacactgtactgaatgaaattaaagaaactttttttgcatggacacagattagctgaatacttaaattattttcttggggctgcaacttgcaaaaaaaaaaaaaaagaataaaaatcagccattttcaacaatttatattatttttaaaaataaatttcactagtgcatggttttaaaaaggagagagaatgcaacagggtgatacaaagatacaccatgtttattctttaatcatagtctgtgttttggcagacattacaaatggaaatactttctagaagatacttaaaattctctttatgtgacaaataagtataatatattcaatttatttccatgttaaatatacaaatcttatgaagttcaatatgtgcaaatttttcacatctttctccttctctcactttacctcttctccctcttttaaacttttctttctccctgccagagtgaaccttatactaaaaaattacaagttttgatctgatcctctctcataccccatgtttgattcagagctgtagatgcctctgaatttgcgaatttctcaagggaaaattaactttaagagctttctttatttcaagcatgttgaaaaggattttgcaacatgacttgggagtacattaaagtaagtcagcatgtatttgacgaagaagatatttgaacttttgcagtttattgtacagtgcatggtaattttttcacctttaaaattcagtttacaggaaaattctaaaatcatgttgccattgtgatgtccaataaatttgtttttagcaccagcattattcatacaggggttaaagtattatttgtagaaggtcttaggttttgtttgttttttaatcatttaaagcaatttctttagccagtttccatttactatgtgaatagaagcactgctaaaaattgggaaccctgaaacacagggctgtttattaattcatttttctgtagtaaaattcaatttttcacaaattatatttctaaagaaatatagtaaacataaatttgcaacaattttaaagctccagtttttaggtgactcaaagaaagtcattatgcctattaatagttatttgatgccatcaccaaaagtctatgtgaaaatctcctaaagtcaaaacccctgcctttggttttacagacggttattaccattgggtggagctgcaaggtcaaatttctcctaagttcccctatttagaggaaaagtcactggttattgtaataaaccacccatggttctttatgtacattttgataacacattattatagcttgattttaattttttgcattaatttttgaaatccacatacatctcatttgtttaaattaaggccatgcacaaatatttttttagttcagtgctgaccattaaaaactatcatgcttgatacggtgcaaaagttaaatgagtatcactaaaaatgccttctttttatgtggtgcatatgaaatacaccaagactgtgtcttgacatctgatggacccaggtaaacgtgttaaaagaacgaataaactttataaaataatttagacacctgtgtaccagcaacaattgatttaatagacctatagtgtctatactatcccttagaataaaggtttatgattttcctgatactaagatgcagtcacataatcttttgtgcatattcccaacaaatattccacttaatacagcgtgacaaggattggcctagcacaacactaacggggtaaaacaccaaaccactgcttaaaaatacaccn

SEQ ID NO: 21053 - DNA, 1644 bp, Homo sapiens
  misc_feature 1, 2, 3, 4, 5: n = A,T,C or G
nnnnncatcctttacgggtgaacaacgggctcccgccccaaatggaaacccaagggccagcgtattaagggcgcgaaccgttatggccgcgtgggggcactgaaggcgtagttttagaagatggaagaaatacctccgggcatcataatattccaggtgatatcctgtacctccatttataaaccaatataataataataacacgtacaaaataacatcataaataacataaatgagaagttttcaagtatttcaatgtgccttgaaaagtttcaaacagtaattctcacaattggttagacaatcatttttttttcttttcttttcctctcatttagtctcagagcctaaaaagaaatgcctccagtctctgttagccccgatgtttggaatgaaattaacaagattctaccttaaaagagaaaacttatgtgggcttttcaaattgtgaaaatttgttccctcttataaaatataatctttcccctgctgctggtttataaatatgggcatatagcccagagccattataaagaaaaaacaaccaaccacaataaactaaggagcctcatctgatggctaaggttctcaggaaaaaatgagaagagcaccttgatcaggaaaggaaaaaaggatagaggataaaaacagtaacctttaacttctatgccctcactcagccagtaacttacggcaggtgttgctggcaaggccttagctgtatttcttcattaagttgaacatcctgtctgccaactccataccaacccagctgctaataagcatgccctgagcacccaggaaaagaagggaaggctggcagcttaggagctcaaaagtgccatcagagaaaaccagctcaagggagctaaggtatttgctccttagaatagtgctcaaggtggaggctgtcagtggtcaaatcaagcatgaagttccttggatgcttctccagcaagatccatggaattttacaaaaccaactttccacaggttagcatttctttcttagcctacatggcagttagttcattttgccctgttcaaatgtagtatgaaagaacagagatcaaaacacccatgtaagtacatacacatactctagttatgagcacctagggtctttcccatcactcttgcaaaagtgtgtgtgtgtgtgtgtgtatacatacactcacacatacatatgtatacacagacatctatatacagaaataatgtatatgtgtgtctaatgtatatataatatatacacatagacatacacacaagcacatatcatagctcaacctcatctaaacatctagagtctggagaacgtgctggccaacagaatacatgtgcatgtggatgtcatgtgacatgcactaaccaaccatcccgaggtaaaactgttgggaggaggaaactgccaacaatctttgaaaatccagacctaccaggccattatttagatatttgctcccatggaaccctcaaagaaacttaggaaaattggactggaatggggtcccaccctgatgaacactcaaacaccaaaagctatatctagtttatgcgtagaagtgactcacacatggcaggcaacatgaatattaagctacaatgtggataaagcactggagcttaatacagatcaatatt

SEQ ID NO: 21054 - DNA, 1414 bp, Homo sapiens
  misc_feature 1412, 1413, 1414: n = A,T,C or G
gcttggatttagtgtggtggcagttgagtggaggcttagcaggcagtggtaagccatggctctcctgaaggggcaaggtgactccacagcagggccagatgagaaaagagctgggcctatgaggaatgtgctaagccagcaagaaatggaagttagcaaagtcccagcactctgcagtgctgaagctgaaagaatagataaattcacaagccaaagacttaaatatgagatgatagcaacgggggtctatgaccaggcataactaacaagggactggtgtatggccagtgaggacctggagaaagaaacctccttcccacagctaccatgtacatacagtaagcttctgccttcccagctgctgtctggttagtggaactaacaatttccttgatggaaattgaataaggtaatccaaaaagaaggctcttttagatgaaaaaacatggatagattattaagcgccaagttttctcttcaacctactgctcaccagtgctccctcctcagctccaaggctgtggagggctcatgaagtcacaatgttctactgagaatttagctttttttttttttggagtgggtataccattttgtaattccacttgataatggcatctgattatttgatcatgacatcattatttgtatacaatgcagcaagaattttgtttttaatgtaggcttttaaatgggctttgatggaacttggttccatagaaggaatcccagataaggctttttaaaagccgagcccagccatggattcataccatcaaatacctatgagttaggtgaattcctctcgaggttccaagaatctatacaaagaatgtgtttattttgtatgggttcagcacaactcagttcctctttctcattttctgaaacttgaactgctctagtcttacccgtgtgtatagacctggactttgaggttggacagacatgcaaaggtagggatataggtggagtggtacagattgtttggacagatagaattctgggacttgggaaaactaagttttgtagtttttggtttcctgatgaaaaatttgtaatttcaacacataagcaaaataattagacatctggccttgtgtttgacaatttatatggtgtatttcatctcctttcgtcagtcctgtcaatgttcctatgttatatcttccaaaacccttctggaaaattagagaggaggtcacgatcacctacaattcttcatgtttatgaccatcattttcaccaaaatagtgcaacttcctcaaaaatgttctccctgcttccaggattaatcatctccaactttattctccatattccagtgggagtcttctaaaatattcatatgaattgtgctgctttcctgtttacaacagaatcgagtctacatctttaacatggtgtacaannn

SEQ ID NO: 21055 - DNA, 988 bp, Homo sapiens
  misc_feature 975: n = A,T,C or G
cgaagaattagaagcatcgaaagcgttggagaggtgttaccggaacggcggcgacaagggtgttcccgaactagagtggatagaaaatcaagtatattttaaaagaagggatgtgggatcaaggaggacagccttggcagcagtggcccttgaaccagcaacaatggatgcagtcattccagcaccaacaggatccaagccagattgattgggctgcattggcccaagcttggattgcccaaagagaagcttcaggacagcaaagcatggtagaacaaccaccaggaatgatgccaaatggacaagatatgtctacaatggaatctggtccaaacaatcatgggaatttccaaggggattcaaacttcaacagaatgtggcaaccaggtttgttgtttatgttttcacaattttaagacttttaaaaaacagaatgaagattattattaaattttttaatttgcttagttgtatgacttctggaaattaatgcttcttaaagaataggcagttttcaatttgatttgactttgacattttgtggttaaaattattctgtactcattctgctagctttgtggcactcagtttgattcttttcttggttcttcattcctaggctgacaggggctgggaacactctggaaacctcacttggcatctagggaagagagcattctttgtctctctattgcaacctctggccttttcagaagcagcactggcagagtaaaacatgtctagcctctaattaaagaaaaattgtgtcactgtgtgacaaaattagtctgtcaaatatactctgcccctaccatccgcctacctttttcttccctttttttttttcagatagtgaagatctttcataagtttttgtgtgttttacttttttgtttgttttatttcacagtatggatgtaggattcttggaggctaattcagtcttccagggcttgtgttattcccttttaaagngtcacttggaaac

SEQ ID NO: 21056 - DNA, 284 bp, Homo sapiens
acgcgggggggcgctggcacctcctcttacagctttactcctgccagcttgggaaaaggccggagaaggtgaaattctgtgtgctccctccggcgagagactttgtcagctcccgcacagtaacgtaagttttcttgtattcttagtgtagtttcgttaccggaagggggtctcgatccagaccccaagagagggttcttggatcttgcacaggaaagaattcagggtgagtccgcatagcaaagcaaaagcaagtttattaagtacctgcccgggcggccgct

SEQ ID NO: 21057 - DNA, 4209 bp, Homo sapiens
ggcggcggctgctgcagccgcagctccagtcaccgcgtcgcctccccgctcctcctcccgcctctcggggttgcctctctccaggcgcaacccggaaggccggtggatggcgggcgagtcttgagaacggagggagaatcgctcaacagaagaaccttgaaggctatgtgggatttgccaatctcccaaatcaagtatacagaaaatcggtgaagagaggttttgaattcacgcttatggtagtgggtgaatctggattgggaaagtcgacattaatcaactcattattcctcacagatttgtattctccagagtatccaggtccttctcatagaattaaaaagactgtacaggtggaacaatccaaagttttaatcaaagaaggtggtgttcagttgctgctcacaatagttgataccccaggatttggagatgcagtggataatagtaattgctggcagcctgttatcgactacattgatagtaaatttgaggactacctaaatgcagaatcacgagtgaacagacgtcagatgcctgataacagggtgcagtgttgtttatacttcattgctccttcaggacatggacttaaaccattggatattgagtttatgaagcgtttgcatgaaaaagtgaatatcatcccacttattgccaaagcagacacactcacaccagaggaatgccaacagtttaaaaaacagataatgaaagaaatccaagaacataaaattaaaatatacgaatttccagaaacagatgatgaagaagaaaataaacttgttaaaaagataaaggaccgtttacctcttgctgtggtaggtagtaatactatcattgaagttaatggcaaaagggtcagaggaaggcagtatccttggggtgttgctgaagttgaaaatggtgaacattgtgattttacaatcctaagaaatatgttgataagaacacacatgcaggacttgaaagatgttactaataatgtccactatgagaactacagaagcagaaaacttgcagctgtgacttataatggagttgataacaacaagaataaagggcagctgactaagagccctctggcacaaatggaagaagaaagaagggagcatgtagctaaaatgaagaagatggagatggagatggagcaggtgtttgagatgaaggtcaaagaaaaagttcaaaaactgaaggactctgaagctgagctccagcggcgccatgagcaaatgaaaaagaatttggaagcacagcacaaagaattggaggaaaaacgtcgtcagttcgaggatgagaaagcaaactgggaagctcaacaacgtattttagaacaacagaactcttcaagaaccttggaaaagaacaagaagaaagggaagatcttttaaactctctattgaccaccagttaacgtattagttgccaatatgccagcttggacatcagtgtttgttggatccgtttgaccaatttgcaccagttttatccataatgatggatttaacagcatgacaaaaattattttttttttttgttcttgatggagattaagatgccttgaattgtctagggtgttctgtacttagaaagtaagagctctaagtacctttcctacattttctttttttattaaacagatatcttcagtttaatgcaagagaacattttactgttgtacaatcatgttctggtggtttgattgtttacaggatattccaaaataaaaggactctggaagattttcattgaggataaattgccataatatgatgcaaactgtgcttctctatgataattacaatacaaaggttccattcagtgcagcatatacaataatgtaatttagtctaacacagttgaccctattttttgacacttccattgtttaaaaatacacatggaaaaaaaaaaaaccctatatgcttactgtgcacctagagcttttttataacaacgtctttttgtttgtttgttttggattctttaaatatatattattctcatttagtgccctctttagccagaatctcattactgcttcatttttgtaataacatttaatttagatattttccatatattggcactgctaaaatagaatatagcatctttcatatggtaggaaccaacaaggaaactttcctttaactccctttttacactttatggtaagtagcagggggggaaatgcatttatagatcatttctaggcaaaattgtgaagctaatgaccaacctgtttctacctatatgcagtctctttattttactagaaatgggaatcatggcctcttgaagagaaaaaagtcaccattctgcatttagctgtattcatatattgcatttctgtattttttgtttgtattgtaaaaaattcacataataaacgatgttgtgatgtaatattgtgtgaggtcttaaatatcctacagtcgatgtacaagagtagagtatgtttgggaagaaacttttcagcttaagtttgcctcctctacaatgacatcttttatatgcttgtctcatttagaatgcatatgtgctgattttctaatttaagagataccatatctctctattcatttctatctctcatttgtatgcttatttttctgagaacattttttttttcccccagacaggggtcttgcttcattgcccaggggtgggagtgcggtggcacaaacacgactcgactgcagcctcaacccctctgggctcaagcagtcctcctgcctcagccccctgagtatctgggattgcaggcgtgcaccaccacgcctggctaatttttgtattttttgcagcctcccaaagttctgggattacaggcatgagccgtcatgcctggcctctgagaacagtttctgactcattcagattaggtatactctcaagtccctgaaaactgaaattttttttaactgtaaagagggtagtgtcatttcttttcttaaggtcaagtgacatagattttaatgtaatgcataatttaggtaagaaattaattaatgtagcctagtttattatcttgaaatgttttaccctatttactttttaaaattaatgacctaagcggagggaataattataagtcaatagcagagagattgttgtttgggtgtttatttttttcagtttttgttttgagagattgggttaacacctctagccaaaattgtttggttttagggaggctaacaataacctactgaatttggaaaatgcaaaggtaaaaaatgtatatagactgcctgctgaactggttaagtactactgcttctgggaaatactatttcaaaattctatgtattataataataaatttgtaagacattcattattctaccatcctaatgaaaactttcagaagtctttctttatccatggcatgcccagggttttacctgaatctgatacaggatctatataactttactaggacttttgattgttgactccaggcttaggtatatcagaaggttctttttgccatttggcctgtggatgtctgagaagatcattcacaatacatgtaaaattcaggtaggcctaaggaaaggccagcctgtagaaagcaaaatggcagtgtctgttctccactgttggagggcattatgtaatttaagtatcctgttagccactgtctttctgctaattaagtggggctgaacaagtaagcactaataataccagtgaaccacttgggcaccttgtgggtagagttttgctgccacctagtggaatgggatatcattgcttccatatcaggttcacaagcaagttaagtgggcacagtttatttctgtgtagctcaggctgtaatcttgaaagctgaggagatacccatgcctctcagactcattagctgggtgtcacattaccacctgcacattctgacccaccgcatcttaatatgttttgtcctcttggagaaactaggagtagaagtcaggatatggtaggtaagggggaaaaaggaaagacggcttgatagctatgaatgcatgaggagcgaaatgttgactcagttatctagatcatggtctccaaacctgatgctatttccttacaaaaatatttgttgagcatgtgtccataattatatgtattgaacaatgaaaatatgtgtcaacaaatgtactgctacactaatgtgaacattatggaacaaaatttgaaagagtgaaataaaaggtttacactttc

SEQ ID NO: 21058 - DNA, 639 bp, Homo sapiens
  misc_feature 1, 2, 3, 4, 5, 6: n = A,T,C or G
nnnnnngagagcgtgctggcggagacatttttcacaaaagagcccttgcggtgctggtgtccgtggcgtgcctgggtggaaaatgagcttatatatgaagaagtcagcgagtggacaaagccaggcgcaatggatagcaaagatgtggaagtctcctcgattcaagttagaagaaaaccgcagcatggagtctgctctcagctgttggggaattaccgatgcctttgactaagtcaagactgacttttccagaatatcacccaagagatagagccgtccctgtccaagtttgtgcgctagcccttcatggaggtcagagaggaagaaacaaaggcagctgtggcctcggcggtcacagtgtcagaacgcacaagccccataaagaggtttcacgcaggccacccatcccttttcattctccagcagaacaggacagagagcgttctgttctgcggaaggtcttccactctacaaggcaatccctccagctgctttgctggattgtgctggctcctgtcacactatgaatgcagtgacctcagccagcaacagggagaaaccccctgcctcccgaacaaaggacctcacgtgaaatcctgagctcagagcttacagatatgtgtgcgctttcactttaca

SEQ ID NO: 21059 - DNA, 1386 bp, Homo sapiens
  misc_feature 1, 1386: n = A,T,C or G
ncgtattgtctgattggtgttgatcattttgttgatgatcttgttgaccatgtgcgtgaattacagatgcaacatgcattgttagaatcgtgtgatggtcttttgtgatactgaatttgtacatatcccagtctctgtatgtatctgcatagacaaagggatacaccggtgtttccctttgtctgcactgtactggaatgcctattaaggcatgtgctgataagttgaaaagagaaatagagctgtatggttgcccccctgattttccagatgaagaagaggaagaggaagaaaccagtgttaaaacagaagatataataattaaggataaagctaaaggaaaaaagagtaaagctgctgctaaagctggatcttctaaataccagtggggcattatgaaatcccttggcctgtctgatgaagagatagtaaaattttctgaagcagaacattggcttgattatttcccgccactggctattcaggatttaaaaagaatgggtttgaaggtagactggcgtcgttccttcatcaccactgatgttaatccttactatgattcatttgtcagatggcaatttttaacattaagagaaagaaacaaaattaaatttgggaagcggtatacaatttactctccgaaagatggacagccttgcatggatcatgatagacaaactggagagggtgttggacctcaggaatatactttactcaaattgaaggtgcttgagccatacccatctaaattaagtggcctgaaaggtaaaaatattttcttggtggctgctactctcagacctgagaccatgtttgggcagacaaattgttgggttcgtcctgatatgaagtacattggatttgagacggtgaatggtgatatatccatctgtacccaaaaagcagcaggaatatgtcataccaggggcttaaccaaagaccatggcgtggtgcctgtaggcacgcgactcaccggggcgacggaaacaccaggcgccacacacacccggcacgtataacagctcataaacgagggcacacaagagacaccacaaggacccacacataaggaacgccaacagcgcccgccggcatgcaccagaggcggtgccaaacgaacaaccccagagacagaattagcgagaccaacacaaacagaaaccagacaaaagcaccaacagacacaaaacaacaacaactagagacaatgaagaaagacaacaggcacaagacacacgacaacgcaggtcacaacgacgctaaaccccagacaaaagaaacacacacaacggaaacaccaaacacagaagccaaccaaacgcagacataagcaaaacacaagacacacagcacgaaccacgaagcgacagacaagacaagaacaan

SEQ ID NO: 21060 - DNA, 1019 bp, Homo sapiens
  misc_feature 1, 51, 1000, 1001, 1002, 1003, 1004, 1005, 1006, 1007, 1008,1009, 1010, 1011, 1012, 1013, 1014, 1015, 1016, 1017, 1018,1019: n = A,T,C or G
ncgtccggcgagttcccctacctgcggcggctccgcgaggagcccggcggnggcacctgctgcgtcgtctcgggcaaggcgcccagcccaggcgatgtgctgctggaggtaaacgggacgcctgtcagcgggctcaccaaccgggacaccctggctgcatccgccacttccgcgagcccatccgtctcaagactgtgaaaccagttcaaagctggagactggatactgacatgttcatgaccttgtgtacaagctgaaagctgctgaaagctacaggccaatggggctctgctttacttctgccttccatatcttgtgtcctgcatcttaatggtggaatcagatttgcatccagaatactagctataaaggagtctggaaaagacagtttttagttttccaacttctgcgtttcaggaaggcatactacaaggaggaagtcgctgagtgatagctgatcctttcccaggcactcatcttcttaaacatagtatattaattacaatttagcccattcttgatggctcattgtcatttctgtgagcttctcttttcataatggcctgtagttggaataatcatagggccaagggattttaacatctgtagtaactttttgtcctaggttagcttgtatctctcccacctcccataactgctgctgagacatctatgtttgatatcatttgacgtcaacctcccctgcaagccacaggcagggagagcacctcacccaaagcaaccagtttattggctggtcagcaacctgtgatttctgtagcttaaaaagatgagtggggcttattgtcttttgaactaagacaaaaaggaaagaatttccaattaagggtgggagcttcagctgagaggttttgaagtgagttggctgtattcttttgcaagaccaattgttaaattttcaagaattttgtgagttgtcaaacagccatttttaagaattaagttgcataataatttaataaaaacaaagataaatacnnnnnnnnnnnnnnnnnnnn

SEQ ID NO: 21061 - DNA, 485 bp, Homo sapiens
  misc_feature 468, 483, 484, 485: n = A,T,C or G
actacaaagcatatctgaaaggaaagattgagcgcaccaactatttgcagaaacgagctgcagccattcaactacaagctgcttttaggagactgaaagctcataatttatgtagacaaattagagctgcttgtgttattcagtcatactggagaatgagacaagacagagttcgatttttaaaccttaagaagactattatcaaatttcaggcacatgtaagaaaacatcaacaacgacagaaatataagaagatgaagaaagcagctgttataattcagactcatttccgagcttatatttttgccatgaaagttctagcatcttaccagaaaacacgctctgctgtcattgtgctgcagtctgcatatagagggatgcaagccaggaaaatgtatattcacatcctcacatctgttataaagattcaatcatattatcgtgcttatgtttctaaaaagggaattnttgagcctaaaaaannn

SEQ ID NO: 21062 - DNA, 804 bp, Homo sapiens
  misc_feature 802, 803, 804: n = A,T,C or G
tccggccctgaaagccatggtggaaaggggtggcgctgacatagacatctgaggaaagaagtgagggagggtaaagggtggtgcagtaagaggaggggtggggagggcttttggaggcgctgcccctcctggcctcctgtacaatgagagtgcactggactctccattctctggcacccacacactgcgggggccaatgacctgggtctcactcctgaatcaggtgggagatagggttagcaggaataacttcttgggcttccctgcctcagagctccaggcccggattcgaacttacaatcagcattacaacaacctgctacggggtgcagtgagccagcggctgtatattctcctcccattggactgtggggtgcctgataacctgagtatggctgaccccaacattcgcttcctggataaactgccccagcagaccggtgaccgtgctggcatcaaggatcgggtttacagcaacagcatctatgagcttctggagaacgggcagcggaacctgcagatgacagcagcttctcgctgtccctggaggttctccggcacctgcggcaggaggaaaaggaagaggttactgtgggcagcttgaagacctcagcggtgcccagtacctccacgatgtcccaagagcctgagctcctcatcagtggaatggaaaagcccctccctctccgcacggatttctcttgagacccagggtcaccaggccagagcctccagtggtctccaagcctctgactggggccccccggctccgccagttaccatgcagcgctacggtaccgannn

SEQ ID NO: 21063 - DNA, 526 bp, Homo sapiens
  misc_feature 1, 2, 3, 4: n = A,T,C or G
nnnnaggcgcatacaaattaaaccatgctgctaaactaaaaaaaaaaaaatcatcatcatcatcatctgtgcatttctttggcagatgaagaatctgattccaaaacaaatgatttctaaggtcctagggaagaacaaaacacatcccttcactaagtattattaatactttttgagaaaaacttcaccataagtaaaatttgaacgaagtcaaataacaatagaagttaagcttcaactgatcaattactagtcactctttgtcagttactatacacatgacacttgatagaataatcatttgtaagttaaagagaaagttgagcatattaaatacctacattaaaagtatatacacacttggcctcacgagaatgacatttaatcacactgccacacttttaacacatgccgatttccactcccctctgactgtggtcgtgcaggaatgaataccatacttcaactttcattttcagaatattgaatctttgttaaaattcatgcttaacagatgagttttagt

SEQ ID NO: 21064 - DNA, 645 bp, Homo sapiens
  misc_feature 1, 644, 645: n = A,T,C or G
ncttctccaacataccatgggttggaggccaatgtggtatataagatgtaacaccctcagaagggttaagttttcacctgagttttcatcttcaaccaagtcattgggatggtgatctagaaggacctctaagatctagaaggataaagatctggtccaaggagtacaaatatgtaatggatctaccaccagtgtcccctgctgtactcttggcagacatcactaatccatcacagcatgccttcccactgatcacagatgtagcttcagggcattcgagttaccacttaagatggatatgagtgaccctcccttatctcactcttctcctttcacagaagcaggatctgaggcccagagagggaagctataataaactcccctaagtcaggtcccttctaagaggcagaggtaggtttagaactcaggcctcagaaacttccagaagccaagccatttgggctgtagttggtggacagtctatcagcgctctgcagatgtttcttctcagttagggaacttggaaaatgcagaaagaaagattctgtctctaagactctgtgtatgatcctactcggtaatctgcctgcttggagaaaaaatatttatcttctgggacggctttaccacaaggcctgaatgcnn

SEQ ID NO: 21065 - DNA, 4703 bp, Homo sapiens
  misc_feature 1, 2, 4702, 4703: n = A,T,C or G
nngcaggtggtgtgaccaccagtgtggtgtgtgctgtttccacctcagtgtgtttttctccattggtgcttccttcctccctttgggcccgatctttgcgtcagttcattcctcgctaatagtccaggtgtctcccatgtgaccctagagatctgttctccggggtgatgttttcacatgcccgtcatttctgggcacatcaagtcactacactttttcgagattcattaagtcaacctttaccaaatccagatctgtatctatctcttcagcctgaaatggagtgaaccacatagatttcaactgatcatccatgacatcagcaagcacataggcagtcctattgttaaacagattctgaagagattctggagctgaaagtactggttctacatcctggtcactgagaggtaaagggtcacctgatgactccagcatctgcttaagtccaactacactgtccaacaaagaatccagattgtcatcatcttttgaatgttccaaaacaagcttctctagttcaaggaacaaattttctggactttcttctttgctttgtagaagctgttttaactctgcagcattaatactcatcgtccgtgatgtatgagctccctctacttccatgagaccattatcatctccacagcatccaattgtgtcagagttaagaatttgtctcataaattctaaaaatgaagatgcaagctctcctgtgtccttactaaatgtgctgaccactcgtttcagtaaactatgcagagcactactgtttttccttaaagaactttttaaatgaaataatccataatcatgctctgcaagaaacatcattgttctgacacatgtcagtaaacagttgtaactgctctcagagttagctagcgtagccaacagacagtcacagattgaggtcatcaattctttatttggtagagaattggagagctgctccagttcagaaatagaaccttcagaagagcttggtaagataagtgcaatgtcctgatcacagagagactgcaaaatggatgtgacatattcaacacactgttggcgaataacactgtctccaggagaccgcaccaaagctaaaagatcctggaatatctctgcatatctttcatcacctttaatagttccattaattagatgcaaaatagctaatttacaagctttgtgtgaagccagagcatcaagaagagcaagcaacctggtggtttggctagtatactgtttttctttatcttctgaagtgctttgcaagtcttctacaatcaaatccaacacagttctcataatcagaagtgcagttggtgaggcaaggtcacacaattgaacacaaatacgccgtaacatatgttgaatgggctggcaggttgtgccagagaaagagcgaactatttcttggagcaactttgcttgaacatgaaggtgcatgctccacaattttcgggtgttgagtgccactgatatatcatgtggctcaataacctgagttgtttgcatgggcaatggaagaggcagcagctctgaaaggagtatgagtccagaaaaaaatccttcaggaaccttcaagattgaagaaagaacttcttttaacattaaagaccaagtattattggccagagtctcttctgagattgtgagtttttcattaactccttgtgtaaaagtcagtaaaatatcaatgatatcattctgaattttctgttcatcactatccaaacgacctgagagggggatagagcacaggagcatatgtaaagtaacaagcgctgaaggaacacgcatgtccttaaactcaaaggatccacctctcaggagttccgttaacatagttttaagaagagtgagtgtgcagcgagccattgaaatagtagtaactctgtgaagggtagtccccatgttgacatggagcctccaaggctgagtcagaatactgttcaatttttgcagaactcgaataaacgtgtccattccttcagcagaaaaaagctgaataacggcaagattccatttcagatctttctgttgaccttcaacaggaggtggtgggcatgcaacattacagagaacacgtaaggcagtggtaaggccaactccttctggggtcatcaagttatcgatattctgcttaacatactcaattaagtttgggatgcagttaatttcaaatctaaggtttttcagaggttcaagccacttgccaagttcttgcaatttagcattattttcatctgctttacaaagcttcaagagagatgctgcatgttgttctagcatttgaacatcactggaagactgaaccaccaccaaaataagtatgcatgcgtaattataagctactgacttcttagatttggaatcacccaaggcttctttggaatagtactccattagagtaataagactttggagatttttctccagactaaaaacatggccaacagctgatcttcccacaggattaaaagtaatcaaataaagattgtgcagggttcccaagagatctgaatggtctgtttcttcactggctgtacaacgctgaaaatggctgaacagttctgtaatacattgcaatgtctgtgttgagtcctgtagccacaaggcaaatgcatcatcaataacaccatcagattggagaccttcctcctcatcttgatcataaaagtgacacagagctcggatcaataaatttgttgcttcatattccgacataaaaaaaagaagacccttctgtgactgtgcaagaaacttcaaaacatcttttgtggcttgcagcacaccagggtgagcacttgttactggaattgacagaagcaaggtaaccaactccaagaagtgatgactgtgaagatatctaaagagaacagggtatggatcatccctctctggaggtccagtaattcgtgccatcgttgggaaagacttaacaggttgttggatcattgtatgaggggcagtttccattaaatgaaaaacttcttctaggaggttaataagcctttctatttccccttcacttatatttgaggattccaaaagatccatatccatagaagcttccacctcattttcatattctgggtttgttctctcaagtccagcatctgtgtcgtgatcaggttcactgtggttaggaagagatgaagtcttctctgctaaatggtcaccaagtcttttaatctctgacaagacttcatagaaatggcatttttggagaatagctgaaccagcagtaacaaccctcacagtctgatctaaaagtatgagttccagaagcttttgataaccacttttttcattctgcctacctcttaaaaaagctgccattccttctgtcatactaatgacactgtccaaagctttaaaagcctttaacttaagagaagatgatacgtgatcagcaaacagaagttcaaataatccactgatcactcctgcttgtagcagtcctgtaactccttgagccccacattctgctagtgaggacactaatttggtcccagctttgagctgtcgaacatttaaggcgataggttggcgaagcgctacttgtaaatttaaagcttgcatggtccagtctaccaactggccaagggagtcttgttttgtgtttttcaattgcaaatagcttaacccttttattattaaacttggaatttcttctaaagctgttacccattttgcacctctatcttctctataccaatctaagagttctgttaacttcactgaggcttcgattgcccctgaattttctttatctggaccttgatccttcattctactgatttcaatttcaaaagtagtcttgtatggacaactgaagtataagagtggtacaagctccctgtcatatggatcatatgtcataggaggaactgaagctaagtcttcagcagtgtattcaacatcaaagtttggatacttaaatgtttcacgttccaagtcagcaattccatcttcatcactggaaatttgttcataaccatcatccccttcaccttcttcatcctcttcaccttcttcctcttcatcttcctcttcctcctcaggaatactgtctactgttcgtcgatcatcctcatcctcatcctcttcttcctctacatccacatcatcttcatcttcttctccttcttcttgttgttcctcttctacttctccttcatcagaatattgcccttcctggggaacagaattccgatcaggagaaatgggctcaaagtaatcttctctatgaggagcatcctcttccttgtcaccagacactggcagaggcacaggatcatcttcatcatcatcaggtggagggggtcctggaggagttcttggtccccttggctgtggtcttggagggcttccattaaactgatcttctttctccccatcagctttgagttaggtctaaagatgatggaagtattctcatcatattccaggcttcccaacctatcgaaaacaggggcacttggtttgcttacattgttgaagaataagtctaattgaaatgtatggggagatgtctctccatatgctctgttgtctggcagactgctatgggctcttactcctgggggtatgactcggacttcattgatataaaccacacatggaaaacgaaccacatctatatgagaactttgctcagcgctcgggtgtttaaaagtatctaaaaataacagctccatcgccnn

SEQ ID NO: 21066 - DNA, 720 bp, Homo sapiens
  misc_feature 711, 712, 713, 714, 715, 716, 717, 718, 719, 720: n = A,T,C or G
accctggtgctataggcaagtattcatgttgaagttagtattaagaccaaaattataatgcttttcttaatgggggaaccctaaggctactcactcagtccattgaggggataagagagatggctcattcccatccagttttgtttacaaacgatgttgctcaaatttaggtgactggctactagggaaataaatgcctcgggcattgaggatggaacaaagaattcaatgctttacaataaatggactgtatttgagagttcaagagaggattggagaaaataactgagtatgtaaaaaatggtaagtttctgattgttcagttgaaggcaagtggctggctcgatgaaatgacataactgatagttttcatctgtgaccctgatatcttagcctctatctcagaattgagaaatgagcagagtttatcagaaaggaatttcattgctggtatcttttgtgtgtgcatgatgtatagtacacacagctctccttattgatccttcacaggtgtattatttactttgccttccaggtgtccgcaaatatggtaaagattttcaagctattgcagatgtaattggcaacaagactgttggccaagtgaagaacttctttgtaaactacaggcgttggtttaacttagaggaggtattgcatgagtgggaagcagaacaaggaacccaggcttctaatggtgatgcttctacnnnnnnnnnn

SEQ ID NO: 21067 - DNA, 1167 bp, Homo sapiens
acgcggggctcttttctcgggacgggagaggccgtgtagcgtcgccgttactccgaggagataccagtcggtagaggagaagtcgaggttagagggaactgggaggcactttgctgtctgcaatcgaagttgagggtgcaaaaatgcagagtaataaaacctttaacttggagaagcaaaaccatactccaagaaagcatcatcaacatcaccaccagcagcagcaccaccagcagcaacagcagcagccgccaccaccgccaatacctgcaaatgggcaacaggccagcagccaaaaactgaacggcttgatctatagaacctgaaagaactttctagaaaaccaggagagaagacctgtcagccagacgaagccgatcgttttcgtgggaaagtcttcctcccgactagtcagctgaggagagaacatgacggagaacgtatgtgagacaatctggataaggcatggcgaagtcttcattcataaggcataaaggattgggctttatccgcttggaaacccgaaccctagcggagattgccaaagtggagctggacaatatgccactccgtggaaagcagctgtgtgtgcgcttagcctgccatagtgcatcccttacagttcggaaacttcctcagtatgtgtccaaagagctgctggaagaagccttaactggagtatggacaggtagaagacgggcgtagtcattgaggaatgatcgagggaagggcctcaaggacaagggatagatggaagtacccaggggaagccagatggctcggaaagtactgggacagagtgcagtggacgggtcctcctgagtacccacagttactacggccgtagcgggggcgaccctgggaccaataacagtctggaaaaggaatcacaagaaagcagggtaagaaaaaaccacgcaataaccaaggaaagagaagaacacacacagaaaggcaaaaccgagcccttgagagaagaaatagcaaggcacggaaagaaacaggtatgagaacgacaagcaaggagcaaaacagggggcgacaagcagacagagaagaacgaaagcgatacagataaacagaagaaccaactgtagagtagcaaaaatacaggcaggaagcgcaacacagagacacaacgaaggtcgcagcacgaacaaagagaca

SEQ ID NO: 21068 - DNA, 3689 bp, Homo sapiens
  misc_feature 1, 2, 3689: n = A,T,C or G
nncgtccttccacgcgtccgccggtgtccgcggcgctgggtcggtggcggaggctgaggagaaggaggagcgggccgtggaggcttcgccgcctaggtactgctataaccagaatttggtagaaaaaggatttacttgttggggccctcttgataaaaagagatgtggggggattctcgacctgctaacagaactggaccttttcgtgggagccaagaagaaaggtttgctcccgggtggaacagggattatcctcctcctccccttaagagtcatgctcaagagagacactctggcaactttcctggcagagattcacttccctttgatttccaggggcattcggggcctccttttgcaaatgtagaggagcattctttcagctatggagctagagacggaccgcatggtgactatcgaggaggggagggacctggacatgatttcagggggggagatttttcgtcttctgatttccagagcagagattcatcacagttggacttcaggggtagggacatacattctggggattttcgggatagagaaggaccacctatggactataggggtggagatggtacttctatggattatagaggtagggaggcacctcatatgaactacagagacagggatgctcacgctgttgacttcagaggtagggatgctcctccatctgacttcaggggccggggcacttatgatttagattttagaggccgggatggatcccatgcagattttaggggaagggatttatcagatttggattttagggccagagaacagtcccgttctgattttaggaatagagatgtatctgatttggactttagagacaaagacggaacacaagtagactttagaggccgaggttcaggtactactgatctagactttagggacagggatacgccacattcagatttcagaggtagacaccgatctaggactgatcaggattttaggggcagagagatgggatcttgtatggaatttaaagatagggagatgccccctgtggatccaaatattttggattacattcagccctctacacaagatagagaacattctggtatgaatgtgaacaggagagaagaatccacacatgaccatacgatagaaaggcctgcttttggcattcagaagggagaatttgagcattcagaaacaagagaaggagaaacacaaggtgtagcctttgaacatgagtctccagcagactttcagaacagccaaagtccagttcaagaccaagataagtcacagctttctggacgtgaagagcagagttcagatgctggtctgtttaaagaagaaggcggtctggactttcttgggcggcaagacaccgattacagaagcatggagtaccgtgatgtggatcataggctgccaggaagccagatgtttggctatggccagagcaagtcttttccagagggcaaaactgcccgagatgcccaacgggaccttcaggatcaagattataggaccggcccaagtgaggagaaacccagcaggcttattcgattaagtggggtacctgaagatgccacaaaagaagagattcttaatgcttttcggactcctgatggcatgcctgtaaagaacttgcagttgaaggagtataacacaggttacgactatggctatgtctgcgtggagttttcactcttggaagatgccatcggatgcatggaggccaaccagggaactctaatgatccaggacaaagaagttaccctggagtatgtatcaagcctggatttttggtactgcaaacgatgtaaggcaaacattggtgggcaccgatcttcctgttcattctgcaagaacccaagagaagtgacagaggccaagcaagaattaataacctaccctcagcctcagaaaacatccataccagcaccattggaaaaacagcccaaccagcccctaagaccagctgataaggaacctgaacccaggaagagggaagaaggccaagagtcacgcttaggacatcaaaagagagaagcagaaaggtatctgcctccttctcgaagggaagggccaactttccgaagagaccgagagagggagtcatggtctggagagacacgccaggatggagagagcaaaactatcatgctaaagcgtatctatcgttccacaccacctgaggtgatagtggaagtgctggagccctatgtccgccttactactgccaacgtccgtatcatcaagaacagaacaggccctatggggcatacctatggctttattgacctcgactcccatgcggaagctcttcgtgtggtgaagatcttacagaaccttgatccgccatttagcattgatgggaagatggtagctgtaaacctggccactggaaaacgaagaaatgattctggggaccattctgaccacatgcattactatcagggtaaaaaatatttccgagataggaggggaggtggcagaaattcagactggtcttcagatacaaatcgacaaggacaacagtcatcatctgactgctacatatatgattctgctactggctactattatgaccccttggcaggaacttattatgaccccaatacccagcaagaagtctatgtgccccaggatcctggattacctgaggaagaagagatcaaggaaaaaaaacccaccagtcaaggaaagtcaagtagcaagaaggaaatgtctaaaagagatggcaaggagaaaaaagacagaggagtgacgaggtttcaggaaaatgccagtgaagggaaggcccctgcagaagacgtctttaagaagcccctgcctcctactgtgaagaaggaagagagtccccctccacctaaagtggtaaacccactgatcggcctcttgggtgaatatggaggagacagtgactatgaggaggaagaagaggaggaacagacccctcccccacagccccgcacagcacagccccagaagcgagaggagcaaaccaagaaggagaatgaagaagacaaactcactgactggaataaactggcttgtctgctttgcagaaggcagtttcccaataaagaagttctgatcaaacaccagcagctgtcagacctgcacaagcaaaacctggaaatccaccggaagataaaacagtctgagcaggagctagcctatctggaaaggagagaacgagagggaaagtttaaaggaagaggaaatgatcgcagggaaaagctccagtcttttgactctccagaaaggaaacggattaagtactccagggaaactgacagtgatcgtaaacttgttgataaagaagatatcgacactagcagcaaaggaggctgtgtccaacaggctactggctggaggaaagggacaggcctgggatatggccatcctggattggcttcatcagaggaggctgaaggccggatgaggggccccagtgttggagcctcaggaagaaccagcaaaagacagtccaacgagacttatcgagatgctgttcgaagagtcatgtttgctcgatataaagaactcgattaagaaaggagacaagttccatgggatacaacctccctcttgttttgtttgtctctccttttcttttgttactgttcttgctgctagaacttttttaaataaactttttttcaatgtgaaaaaaaaaaaaaaaaaaaaaaaaaaaaagggcggccgcn

SEQ ID NO: 21069 - DNA, 451 bp, Homo sapiens
  misc_feature 308: n = A,T,C or G
acttacatccccccagccctgggagcaagaggacagcgagacttcaagccttcacaccttagcacaaagtgtgtcagtccccacacatcactcctgtgagaactctaggacccagcatactaggaatatcttatggatcagagctgtcaccacaacggtatccattatggtaatgtggaaatcataattggcttgtgaggttaggagagagaagaaagttactgtatttgaagttcagggagcagtatttgcttctaaattgctataccaaagcagggaggaaaagacaaatgctatcctttttgttntaaatctgtaagaactaaagaaatggagcagtatttgatttatcctttttatctgattacaggaaaggcagactacaagttactgagcacctccctgagaaaattgaaagtagtttacaggaagatgaacctgagaatgatgc

SEQ ID NO: 21070 - DNA, 1112 bp, Homo sapiens
  misc_feature 1107, 1108, 1109, 1110, 1111, 1112: n = A,T,C or G
tctattccttttacctagccccttatatttttatagcactttccctaatatcacatatgtatttgttgactttcttctctggcagaaggtaagttccatgaaagcagagttttgtttggttcatttgcctgttccaagtacgcgggggtagatcttcaatttggatatttggaggagtgaacatcgttgttttgctggagggaagatcttgatggtgtttctttccccaaaaattgacttagatattaaaatttggtgcttataagagagagttaaaaaaaaataggattgcttcaattaaaattacaaaagagacaaaaaaaaaaaaaaaaaaaaaaaaaaaaaaacaaaaaaaaaaaaaaaaaaaaaaagaaaaaaaacaaaaaaaaaacaaaaaaaaaagaaaaaaaaacagaaagacaaacaaagcagggcgcgctccacaaaacctacgatcgcacgccacccacctaacccgcagctcctctgtacgatgccggcgccacacctggacgagtgaaagccacgaacggccaggcgcacccaatatcgcgcgagccgaaaacgaggcgcagagcagatctccgactggggaacagagaaccacaagtgagtacaagtggagaccaagaatataagaatgtaaagtaaacaccagcgcgaacctaaataaaatcacgcagacgcaagagaacccatcagttaatcaccgagtacaccgtccaaggaagaagaaacaaaacgccatgtaacaaacttcgacaggcgacagagtatagtcggagaacaagactactacagaaacagaaataatcatgcacacacgcaccacaaaacgcgcgaacaggagacggacaaaacaagacaggaggagcacaggagaggtgcggagccacagtggggaccgcaaaggcatcgggatgaggagcgagacgtaaaggcggacgagggagacaaggccggagacaaccaggacacgaaacggaagcgcaacaataggcgcaggcatcggacccgatagcaaatgaagcagagcggaacgagaggggaggaaggagatcgagccaggtcaaggaacgaaattcgaaagaaagagcagcaagaggnnnnnn

SEQ ID NO: 21071 - DNA, 303 bp, Homo sapiens
  misc_feature 303: n = A,T,C or G
acatgattgttttggttataatttatttatagaatgtatcttttctatattacattcttaatattcgccagatattatattgaccattctctttaacttcttaatgtggcatatttcaactctcctttcccacaaacagcttcatctgtctccaaggttaacattctgaagctggagagtccttggagaaactctgctcagcttttttgtgacatttagaaaaatgcatttggtattctccaaaccagaatgatacattgtctcaaaatctgttagacagctgatgggtgtttttgagcaacn

SEQ ID NO: 21072 - DNA, 1542 bp, Homo sapiens
ttagacaaatgttcattgtgactcacagaattgatttcatgcctcactaatgggtctcacatataccatgaaaaatactgatatagagacattttgtgcctttgctgtgttggtaccttgagtatgtctgcttgatgatgaaagagactggctgatctgctagactgttgacttgtataagaacatcttgaagtggtgggaatttatcttagattttcattcctggatcatttttatggtctgatccagtgaggagccaatgaggttttccatggctaggtcaaatatcaggttggagttgatggtatatttttatagaactttcctggaatgcatccttgaccttccctcaattcatacggggggcaaaaccagactgtatttcccgcaacgaaccctggaatgcttcgctttagcggactccggtccactcccatcagaggatgcccttctttcgcctcacctccagcccagccgcagccgacccggccgcgccgccgtcgctctccaacgccagcgccgcctctcgctcgccgagctccagccgaaggagaaggggggtaggtaagtaaggaggtctctgtaccatggctcgtacaaagcagactgcccgcaaatcgaccggtggtaaagcacccaggaagcaactggctacaaaagccgctcgcaagagtgcgccctctactggaggggtgaagaaacctcatcgttacaggcctggtactgtggcgctccgtgaaattagacgttatcagaagtccactgaacttctgattcgcaaacttcccttccagcgtctggtgcgagaaattgctcaggactttaaaacagatctgcgcttccagagcgcagctatcggtgctttgcaggaggcaagtgaggcctatctggttggcctttttgaagacaccaacctgtgtgctatccatgccaaacgtgtaacaattatgccaaaagacatccagctagcacgccgcatacgtggagaacgtgcttaagaatccactatgatgggaaacatttcattctcaaaaaaaaaaaaaatttctcttcttcctgttattggtagttctgaacgttagatattttttttccatggggtcaaaaggtacctaagtatatgattgcgagtggaaaaataggggacagaaatcaggtattggcagtttttccattttcatttgtgtgtgaatttttaatataaatgcggagacgtaaagcattaatgcaagttaaaatgtttcagtgaacaagtttcagcggttcaactttataataattataaataaacctgttaaatttttctggacaatgccagcatttggatttttttaaaacaagtaaatttcttattgatggcaactaaatggtgtttgtagcatttttatcatacagtagattccatccattcactatacttttctaactgagttgtcctacatgcaagtacatgtttttaatgttgtctgtcttctgtgctgttcctgtaagtttgctattaaaatacattaaactataaaaaaaaaaaaaaaaaaaaaaaaa

SEQ ID NO: 21073 - DNA, 1346 bp, Homo sapiens
  misc_feature 1, 2, 1345, 1346: n = A,T,C or G
nnaatttggccctcaaggccaagaattcggcacgaggggaatattgattagcagcttttttttctttatacacatagataactaactagattaatgtttagtttcttatttgtaggcacaggatgcatgaaatttcaagctctgggattttttgtatattgtgtatctgtatcaaaaatatcctctccttttcaaaaatgacaggttggaaaatgtttgtcagacttattaactggtcatattataataatactgataatgaccaactgctcattctgaaagccaaacataaaagctaggagaagtggcatctgaacatttttgctttgctgccagagtaaccctgactaataatacaataacagcaatttttttaaaaaactgagatttcctactggcttgaagtttttctatttagcaaaataattagtaataagttttgactaggtctaaagaatgaacacattgtaaacagttgccacagtagtttctaataaattgatcataaaagcagctatccttttttttttttaattctagcttctttttaaagattatttgggtacctaataaaggataatttatatcttattacagactgatattttgctttttcatgtgtcatcatactgtcagtatattaaaagaaattacagcctaaaacttaacatataccatacatatatattaaggtgtcaaatagctattctcactcatcttacaaatattgtaagagcaataaaaattaattgaggaattataagcctacaggtcatcagccttgaggtgattactgatgatttgggcttacacacatgtcagcaagatagggagtgtggataggggagggctggtagctaacaaggggcctcacagagaaatattagtgactttaaccaggtttcagaatctgggccttacctttacaggttcaacaaaagaatggcatcaatagaggcagaagtatagacattgttttaaaaatacacacatgcacacacacacaaaacattttagcattatagctgtctgaatccttcaataagaaggagaggcacacacaaatacacacactcacacaaaactcaacaaccataaaacaaccctgcatgttataaaaggcagaattaaattttatttatttaaatccatggaactctggtaggccaggatatattatagtaccattatcaatgtgatattctgaaaatatgaactgagcgtcattaacaattgttggtacctaaacacaaaatgaatttcaaaagttactttgttctcaagatatgtcattcttttgggaataaatacttctggtgacaaagtcaaaaaaaaaaagtcgacnn

SEQ ID NO: 21074 - DNA, 1091 bp, Homo sapiens
  misc_feature 1, 2, 3, 4, 1079, 1080, 1081, 1082, 1083, 1084, 1085, 1086,1087, 1088, 1089, 1090, 1091: n = A,T,C or G
nnnnctctgcaccctatactcactttttattctacacacttttacatcatctctccctcctttttctctccctcccacataacgtgtctcacatccgtgtggattcccacttggaagtgcacttgtaaatacctttataaaatttaaatactgttcttgtcccccaccttacctacctcaacttttgaatgtgcccctctagtctccctcaatagtgaatgataatttacccattcctccttctatgcccatttgcgtactaagatacaaaatgttcgaccaaaggtttcacattagcttcttcttggaaacaaattttttgtgaacgtaaaatatagtgaccttaaacagaagaggaattccacctccaaatgttttatatccatctctattactgatatcaaggaccacctgaatctggtgaaatcctttcgacctcaatgtccacgtatagttagtactgtttccacactatatgtggcaatgttaacatactgaaaagcatgagaacttgagcaacagacaactgtatattaaatgaccacccatgatttcttttaaaggctgaaaaatctagttttgtcatcaaccatgggcctaaataaagtttgacccagaattcataacgaataaagaaaaaaagaaagcactccaataggtacaaatggctctaactaaaatatctactaacaggataattccccagattttctttggtagaaatatttgcttaaaagtgtatttctaaagtacttctgtagctttctataaactagtgtcatattgaagtgtggatataggccgatttttctttgtacaccttcactaacctataataaatccttagaagctatccaaaagagattactcttttaaaggtcccatctggagtaaaattccatgactacataggtcattctcgctacgctttcttataatttctaaagtaaatctagtagttactcaaataacatttttcctctttgagttttttttttttttttttgaaaaggggtccccttttttccccagggagggggcccgggggggaaaaaaggccccctggaccccccaatccnnnnnnnnnnnnn

SEQ ID NO: 21075 - DNA, 754 bp, Homo sapiens
  misc_feature 1, 2, 3, 4, 754: n = A,T,C or G
nnnngggacagcggcaatcatggcgccacctgtgagatactgcatccccggcgaacgtctgtgtaacttggaggagggcagcccgggcagcggcacctacacccgccacggctacatcttttcgtcgcttgccggctgtctgatgaagagcagcgagaatggcgcgcttccagtggtgtctgtagtgagagaaacagagtcccagttactgccagatgtgggagctattgtaacctgtaaggtctctagcatcaattcacgctttgccaaagtacacatcctgtatgtggggtccatgcctcttaagaactcttttcgaggaactatccggtaagaagtatccttttcacatataccttagcaactggaataagattaggatagactaggacaccagaattttgagcaacagctacaattcctatttttcttttgcccgtttttctttcttctttgtgctttgattctcccctagtagtatccaaaaaatacatggatgatctaggacaaaaggaaaatattaacgagagggtttaaaagtaaagcaaaggctgggcgcggtggctcacgcctgttatcctagcactttgagaagctgaggcgggtggatctcttgagatcaggagtttgagaccagccttagccaacatggtgaatccccatctcctgtactaaatacataaggtagccaagctcagtggcttacaccttgtcctatcactttcggaggctgacgttgggtgatcacgctgcn

SEQ ID NO: 21076 - DNA, 2524 bp, Homo sapiens
acgcggggggggcgcgggcctgtgagccagttggagttgcggcggcgggaacgattgggctgagcagaggacgacatgttgcttttcgtggagcaggtagcatctaaaggaactggtttaaatcctaatgccaaagtatggcaagaaattgctcctggaaatactgatgccaccccagtaactcatggaactgaaagctcttggcatgaaatagcagctacatcaggtgctcatcctgagggtaatgcagagctctcagaagatatatgtaaagaatatgaagtaatgtattcttcatcttgtgaaaccacaagaaatactacaggcattgaagaatcaactgatgggatgattttaggaccagaagatctgagttaccaaatatatgatgtttccggagaaagcaattcagcagtttctacagaagacctaaaagaatgtctgaagaaacaattagaattctgtttttcacgagaaaatttgtcaaaggatctttacttgatatctcaaatggatagtgatcagttcatcccaatttggacagttgccaacatggaagaaataaaaaagttgactacagaccctgatctaattcttgaagtgttaagatcttctcccatggtacaagttgatgagaagggtgagaaagtgagaccaagtcataagcgttgtattgtaattcttagagagattcctgaaacaacaccaatagaggaagtgaaaggtttgttcaaaagtgaaaactgccccaaagtgataagctgtgagtttgcacacaatagcaactggtatatcactttccagtcagacacagatgcacaacaggcttttaaatacttaagagaagaagttaaaacatttcagggcaagccaattatggcaaggataaaagccatcaatacattttttgctaagaatggttatcgattaatggattctagtatctatagtcaccccattcaaactcaagcacagtatgcctccccagtctttatgcagcctgtatataatcctcaccaacagtactcggtctatagtattgtgcctcagtcttggtctccaaatcctacaccttactttgaaacaccactggctccctttcccaatggtagttttgtgaatggctttaattcgccaggatcttataaaacaaatgctgctgctatgaatatgggtcgaccattccaaaaaaatcgtgtgaagcctcagtttaggtcatctggtggttcagaacactcaacagagggctctgtatccttgggggatggacagttgaacagatatagttcaagaaactttccagctgaacggcataaccccacagtaactgggcatcaggagcaaacttaccttcagaaggagacttccactttgcaggtggaacagaatggggactatggtaggggcaggagaactctcttcagaggtcgaagacgacgagaagatgacaggatctcaagacctcatccttcaacagctgaatcaaaggctccaacaccaaagtttgacttattagcctcaaattttccacctttacctggaagttcatcaagaatgccaggtgaactcgttttggagaataggatgtctgatgttgttaaaggtgtctacaaagaaaaggataatgaagagttgacaattagttgcccagtgcctgcagatgagcagacagaatgcacttctgcccagcaactcaatatgagtaccagttctccatgtgctgctgagcttactgcattaagcacaactcagcaagaaaaggatctaatagaagattcctctgttcagaaggatggtctcaatcagacaactataccagtttctcctccaagtactacaaagccatcgagggcaagtactgcttcaccatgtaataataacataaatgcagctacagctgtggctctacaggaaccccgaaagttaagttatgctgaagtgtgccagaagccccctaaagagccatcttcagttcttgtgcagccactacgggaacttcgctccaatgtggtgtctcccaccaaaaatgaagacaatggagctcctgagaactccgttgagaaaccacatgagaagccagaagcaagggctagtaaggattattctggcttccgaggcaatataatccccaggggagcagcaggaaaaatcagggaacagagacgccagtttagccatagggctatacctcagggagtgactcgacgtaatggcaaagagcaatatgtgccacccagatcaccaaagtaaaaaacaacaaaactattcaaaaacttcactctcttcccattaaacttgaactgtggctatattgaactgtttggaggggagggggtaccggaaggaacaagagaaagtacgtccattccatcatggattggagttgtgagtgatggatccaaaatcctctcaatgggtttaaatgcggcggatccatccacttaatttttttttttccccctttaaagattatcacatggtggtaattggaattggccgcacatggggcatgcggcaaaaaaat

SEQ ID NO: 21077 - DNA, 388 bp, Homo sapiens
  misc_feature 385, 386, 387, 388: n = A,T,C or G
actcttctgacttttcccccacaagctgctaaaaagatcattgcttttcgttatattttggactggatacctggctaatcagcattcactggcaaacagcactgtgaggaagacagctgcctaaggcctgtttgtcaccctggaagggaagcagcaaagaggtagaagtatcctgagagaagaaaatagcgtcaagagggagaaagcagcagctcccatcaagcccttaccacatgctgtgcctggactttggtatctcatcactttgggtgaagaaactcaggctcaagaagttaatctctcttgattaaaccccttgctttgagcctcagtgaatttgtttcacaacccattagacagacagttgtaagtgaggtgactacannnn

SEQ ID NO: 21078 - DNA, 2019 bp, Homo sapiens
  misc_feature 2005, 2006, 2007, 2008, 2009, 2010, 2011, 2012, 2013, 2014,2015, 2016, 2017, 2018, 2019: n = A,T,C or G
caagggtgtcgccccgcgtccgcactggacttgtaaacgaaaagcttcataagtccctctttgcttagtacttttctcgtcctttccccagggtgcacgtaaccctcaagcactaggaccgtgcggaatccaggctgcgatggcaccttcatttaccgcccgcattcagttgttcctcttgcgggcgctaggctttctcataggcttagtaggccgagcagctttagtcttagggggtccaaagtttgcctcaaagacccctcggccggtgactgaaccattgcttctgctttcggggatgcagctggccaagctgatccgacagagaaaggtgaaatgtatagatgttgttcaggcttatatcaacagaatcaaggacgtgaacccaatgatcaatggaattgtcaagtacaggtttgaggaagcgatgaaggaggctcatgctgtagatcaaaagcttgcagagaagcaggaagatgaagccaccctggaaaataaatggcccttccttggggttcctttgacagtcaaggaagctttccagctacaaggaatgcccaattcttctggactcatgaaccgtcgtgatgccattgccaaaacagatgccactgtggtggcattactgaagggagctggtgccattcctcttggcataaccaactgtagtgagttgtgtatgtggtatgaatccagtaacaagatctatggccgatcaaacaacccatatgatttacagcatattgtaggtggaagttctggtggtgagggctgcacactggcagctgcctgctcagttattggtgtgggctctgatattggtggtagcattcgaatgcctgctttcttcaatggtatatttggacacaagccttctccaggtgtggttcccaacaaaggtcagtttcccttggctgtgggagcccaggagttgtttctgtgcactggtcctatgtgccgctatgctgaagacctggcccccatgttgaaggtcatggcaggacctgggatcaaaaggttaaaactagacacaaaggtacatttaaaagacttaaaattttactggatggaacatgatggaggctcatttttaatgtccaaagtggaccaagatctcattatgactcagaaaaaggttgtggttcaccttgaaactattctaggagcctcagttcaacatgttaaactgaagaaaatgaagtactcttttcagttgtggatcgcaatgatgtcagcaaagggacatgatgggaaggaacctgtgaaatttgtagatttgcttggtgaccatgggaaacatgtcagtcctctgtgggagttgatcaaatggtgcctgggtctgtcagtgtacaccatcccttccattggactggctttgttggaagaaaagctcagatatagcaatgagaaataccaaaagtttaaggcagtggaagaaagcctgcgtaaagagctggtggatatgctaggtgatgatggtgtgttcttatatccctcacatcccacagtggcacctaagcatcatgtccctctaacacggcccttcaactttgcttacacaggtgtcttcagtgccctgggtttgcctgtgacccaatgcccactgggactgaatgccaaaggactccctttaggcatccaggttgtggctggaccctttaatgatcatctgaccctggctgtggcccagtacttggagaaaacttttgggggctgggtctgtccaggaaagttttaggaggaccttctgcaaggttaatgtgtgtgtgtgtttgtgttcgtgtggtggtgtttctattaattgggtgaaaccaagcaccagcagacaagcagagaaacaactggggaatttattgactcatttagttattctttctacttttatttccttctctaactgttggtcttactaaaatggtaatatttgcttcttgcttttatgttactggaaaattaggacatgtaaatggataagtgcaataaagtttcctaaatgcttgaaaannnnnnnnnnnnnnn

SEQ ID NO: 21079 - DNA, 1842 bp, Homo sapiens
  misc_feature 1, 2, 3, 4, 1427, 1841, 1842: n = A,T,C or G
nnnnaatacgactcactatatggaatttggccctcgaggccaagaattcggcacgagggcaaaaagcactaattagtttaaaatgtcacttttttggtttttattatacaaaaaccatgaagtactttttttatttgctaaatcagattgttcctttttagtgactcattgtttatgaagagagttgagtttaacaatcctagcttttaaaagaaactatttaatgtaaaatattctacatgtcattcagatattatgcgtggcttctagcctttattctgtacttttaatgtacatatttctgtcttgcgtgatttgtatatttcactggtttaaaaaacaaacatcgaaaggcttatgccaaatggaagatagaatataaaataaaacgttacttgtatattggtaagtggtttcaattgtccttcagataattcatgtggagatttttggagaaaccatgacggatagtttaggatgactacatgtcaaagtaataaaagagtggtgaattttaccaaaaccaagctatttggaagcttcaaaaggtttctatatgtaatggaacaaaaggggaattctcttttcctatatatgttccttacaaaaaaaaaaaaagaaatcaagcagatggcttaaagctggttataggattgctcacattcttttagcattatgcatgtaacttaattgttttagagcgtgttgctgttgtaacatcccagagaagaatgaaaaggcacatgcttttatccgtgaccagatttttagtccaaaaaaatgtatttttttgtgtgtttaccactgcaactattgcacctctctatttgaatttactgtggaccatgtgtggtgtctctatgccctttgaaagcagtttttataaaaagaaagcccgggtctgcagagaatgaaaactggttggaaactaaaggttcattgtgttaagtgcaattaatacaagttattgtgcttttcaaaaatgtacacggaaatctggacagtgctgcacagattgatacattagcctttgctttttctctttccggataaccttgtaacatattgaaaccttttaaggatgccaagaatgcattattccacaaaaaaacagcagaccaacatatagagtgtttaaaatagcatttctgggcaaattcaaactcttgtggttctaggactcacatctgtttcagtttttcctcagttgtatattgaccagtgttctttattgcaaaaacatatacccgatttagcagtgtcagcgtattttttcttctcatcctggagcgtattcaagatcttcccaatacaagaaaattaataaaaaatttatatataggcagcagcaaaagagccatgttcaaaatagtcattatggggctcaaatagaaagaagacttttaagttttaatccagtttatctngttgagttctggtgagctactgacctcctgagactggcactgtgtaagttttagttgcctaccctagctcttttctcgtacaatttgtgccaataccaagtttcaatttgtttttacaaaacatttatttcaagccactagaattatcaaaatatgacgctattagcagagtaaatactctgaattaagagaccgggtactagctaaactccaaggagatcgttaagcaagcatacagtccacaaaacacttaagtgggccacaatatttagagagaattaaaagggtgtttaacttgaagctgtgtttatgcaataggccgaaggggccggtaaataatcacttggcccgtagcatattttaaaattattttaaaggattcagacaccccccgggagggggaaaaaacacggnn

SEQ ID NO: 21080 - DNA, 433 bp, Homo sapiens
  misc_feature 1, 2, 3, 4, 301, 431, 432, 433: n = A,T,C or G
nnnncatggctatgtgctcaattctccctttcgagcggccggcgggcaagtactttacttctacttattttgcgggggggaaagcagcacggaaatgccctgtgactggcagcggaaaaggcgaccaccgcttgtgtatcttcactttagatcttgcaggcataatcaactgtggttctaaatggctatgatgtaataaaggaatgccttgttcatcaaagcgaaatttttgcagacagaccatgccttcctttattcatgaagatgacaaaaatgggagatgagatggatcaaggtgaanatgacccatcatctactttctccaaagaaaacctaattttctcagtgggtgaactcatcattgctggaactgaaactacaaccaatgtgctacggtgggcgattcttttcatggccctttatcctaatannn

SEQ ID NO: 21081 - DNA, 854 bp, Homo sapiens
  misc_feature 1, 2, 3, 854: n = A,T,C or G
nnnctccataaggtagaaatactttccagaatttgcctaaactagtaagccctgaatttgctatgattagggataggaagagattttcacatggcagactttagaattcttcactttagccagtaaagtatctccttttgatcttagtattctgtgtattttaacttttctgagttgtgcatgtttataagaaaaatcagcacaaagggtttaagttaaagcctttttactgaaatttgaaagaaccagaagaaaatatcaaagttctttgtattttgagaggattaaatatgatttacaaaagttacatggagggctctctaaaacattaaattaattattttttgttgaaaagtcttactttaggcatcattttattcctcagcaactagctgtgaagcctttactgtgctgtatgccagtcactctgctagattgtggagattaccagtgttcccgtcttctccgagcttagagttggatggggaataaagacaggtaaacagatagctacaatattgtactgtgaatgcttatgctggaggaagtacagggaactattggagcacctaagaggagcacctaccttgaatttaggggttagcagaggcatcctgaaaaaagtcaaagctaagccacaatctataagcagtttaggaattagcagaacgtgcgtggtgaggagatgccaaaggcaagaagagaagagtattccaaacaggagggattccaaagagagaagagtatcccaaacaacatttgcacaaacctgatggggagagagaatgtggggtggggatggatgatgagactgaagaagaaagccaggtctagataatcagtggccttgtacn

SEQ ID NO: 21082 - DNA, 1767 bp, Homo sapiens
  misc_feature 1763, 1764, 1765, 1766, 1767: n = A,T,C or G
acttttctttcagacccaaaccatcttcatcttcccccttttgtaatttgaacatttcacaaatttcatctagaaatttttccctagttaagtgggacagattgaggtgaccttccctttccctctccccctgagagttctcccttcaattatctgccttgatgtctgatacagattagcacaggccttcaagcccaggaactgaaagagattgggccaggctgaaaagaaacccgactgtgggcaaaggacagatttcaataaaaattgaaaatacaatccacagtactagtactgtacatcttcaggctactgatggcacatggccatgaggtgtatcatcactttaatgctggtaaggtgtgagcgaggccggtggaaccttttctgaactgggaaagctttaggggggcttagaaattttttttttttgttatttaataacatatctaaactgcctcccagttcttatcctaggaaactaacctttccaaaatcaggaagagatgaattaacttagattttttttttttttttaaaaaagcttaacctgaagatccctgtccccacccaaactccattatgctggaaagaatgaagctgctgcttctgtaacttcttttcccccagagaaacctctataaaaataaaccatgaaagcagtgaaaagtctgtgtgtgtgtgtgagatgtatcgctgtgttctactgtatatcttcttacagttgtgaggtatttgaattgtgtgataagcaaactgatttcctatagttttttgggatgtaattctgcagtaaatgtcatgctagattgacaatgtgctaatttctccactattcttattaccatcagctttctcttcttgtttgttccctctagcatttccaccagtagactctgctcacttgggatggagatgacagtcaccctgcttacacactgttttctggcttacacatttatgtctgctcattcttctaagcctcttaagtcccttgacactgagttaactatatttctttgcaacctctgtttactatatagcaatgaagttaaagtaacaaatcctttctaaaactactccagtttgaccatggaattactgtattttcagaattcaggcagatgaagccttgattatttaattccttccataaaaatacagctggccttgccagatgctatcttatctgtaattgccaatatgctaacattgcatttctttctcccttagttggtcagaaaatacaatatggcctcaaggggtgctggtgcggcacagcagatgtttatatagagccatggggccttacaacgtggcagtgccttcagatgtatctcatgcccgcttttatttcttatttcatcgaccattaaggctgttaaatctgctcatccttattgagggcagtgtcgtcttctatcagctctatttccttggctgcggttcgggaggaagtgggaaccacacacttttccatgggctctcatcctcttctgcaactactatgttttatttaaacttctccgggacagaatagtattaggcagggcatactcctacccactcaacagttatgaactcaaggcaaactaagctgcctctcaacaatgagggagaactcagataaaaatattttcatacgttcaaaaaaaaagtcgacgcggccgcgaatttagtagtagtaggcggccgctctagaggatccaagcttacgtacgcgtgcatgcgacgtcatagctcttctatagtgtcacataaannnnn

SEQ ID NO: 21083 - DNA, 943 bp, Homo sapiens
  misc_feature 1, 2, 934, 935, 936, 937, 938, 939, 940, 941, 942, 943: n = A,T,C or G
nnagtgggccaaatgggcatgctattcaatatgaacttcagtcattgggggaatccaatgcacaaacgatgatcgttgccagcccaacagaaaatggacaggtacttcgtgtaattccacctacccagacaggaatggcacaagtgattatacctcaggggcaacttgtggatgtgaatagtcctcgggatgtccctgaagagaaacccagtaacagaaacttaccaactgtaagagtggatactctagcagacaataccagcaattacattcttcatcctcaaacatccttcccattgcccaaaaagtcagtgaccggaatgctggaagaaccccttctggggcctcttcagccactttcttctaatacacctatatgggcctgccgtcttaggagctgtgagaaaattggagattcataccgtggctactgtgtaagtgagactgaattagaaagtgtcctaacatttcacaagcagcaaacacagagtgtttgggggacccgtcagtctccaagcccagccaagcctgctacacgcttgatgtggaaatcccagtatgttccatatgatggaatcccatttgttaatgcagggagtagagctgtggtaatggagtgtcagtatgggccaagaagaaaaggtttccagttaaaaaaagtcagtgagcaggaaagcaggtcttgtcagctctacaaagccacttgtccagctcggatttacattaaaaaggtacagaagtttcctgaatatagagttcctacagaccccaaaattgacaagaaaattatcagaatggtacgcagcgcggggcaggcgcgggcagagccgagcgcagcggaggctccggcggaggcgcggggaaaatggctgatgactttggcttcttctcgtcgtcggagagcggtgccccggaggcggcggaggaggacccnnnnnnnnnn

SEQ ID NO: 21084 - DNA, 5861 bp, Homo sapiens
cccacgcgtccgggccgggcttcgtgcggtggggctcgctcgcgcggcagcggtggccgaggcctcttggttctgcggcacgtgacggtcgggccgcctccgcctctctctttactgcggcgcggggcaaggtgtgcgggcgggaaggggcacgggcacccccgcggtcctcgggaggctagagcggagactggaccctagttccctgaagagaaaggggaatgtaccagaaggagaacatgcagtggttgagaaacttagcagttacagcacctattgttgaggcgagtaatccagttggagagggacagggcgttaaaagcaggaaagcccccgaaagctcatctaagtgcatctctttccacaccggaggctagagatcatggaagggaagtggttgctgtgtatgttactggtgcttggaactgctattgttgaggctcatgatggacatgatgatgatgtgattgatattgaggatgaccttgacgatgtcattgaagaggtagaagactcaaaaccagataccactgctcctccttcatctcccaaggttacttacaaagctccagttccaacaggggaagtatattttgctgattcttttgacagaggaactctgtcagggtggattttatccaaagccaagaaagacgataccgatgatgaaattgccaaatatgatggaaagtgggaggtagaggaaatgaaggagtcaaagcttccaggtgataaaggacttgtgttgatgtctcgggccaagcatcatgccatctctgctaaactgaacaagcccttcctgtttgacaccaagcctctcattgttcagtaagtgaaatgcttgttggataaaagctttctgcaaagggtaatcttagaagacattatgtaacttttatctctatgttacacaattatgagattatataagtcgtgactgggatacccgtgtggatttaaacaccttgtaattaatagtttttcctggctggtgcattcttttgacagaaactggttacttattttcctgactctaaataacttgtagattttgcagaacgaatttaccggaaatctgcattaatgttcaatttaattttatttatttttgtggaatttgataactattcaaaaacaatagaagatggaatcctttgtaagggtaaacatttgacatatggtaaaacgtgactaagatgagggagagaggaaatacattaagagagtttcgatctttcaaaatgccatacagtgtttctgcttttctctctgatattaggtatgaggttaatttccaaaatggaatagaatgtggtggtgcctatgtgaaactgctttctaaaacaccagaactcaacctggatcagttccatgacaagaccccttatacgattatgtttggtccagataaatgtggagaggactataaactgcacttcatcttccgacacaaaaaccccaaaacgggtatctatgaagaaaaacatgctaagaggccagatgcagatctgaagacctattttactgataagaaaacacatctttacacactaatcttgaatccagataatagttttgaaatactggttgaccaatctgtggtgaatagtggaaatctgctcaatgacatgactcctcctgtaaatccttcacgtgaaattgaggacccagaagaccggaagcccgaggattgggatgaaagaccaaaaatcccagatccagaagctgtcaagccagatgactgggatgaagatgcccctgctaagattccagatgaagaggccacaaaacccgaaggctggttagatgatgagcctgagtacgtacctgatccagacgcagagaaacctgaggattgggatgaagacatggatggagaatgggaggctcctcagattgccaaccctagatgtgagtcagctcctggatgtggtgtctggcagcgacctgtgattgacaaccccaattataaaggcaaatggaagcctcctatgattgacaatcccagttaccagggaatctggaaacccaggaaaataccaaatccagatttctttgaagatctggaacctttcagaatgactccttttagtgctattggtttggagctgtggtccatgacctctgacattttttttgacaactttatcatttgtgctgatcgaagaatagttgatgattgggccaatgatggatggggcctgaagaaagctgctgatggggctgctgagccaggcgttgtggggcagatgatcgaggcagctgaagagcgcccgtggctgtgggtagtctatattctaactgtagcccttcctgtgttcctggttatcctcttctgctgttctggaaagaaacagaccagtggtatggagtataagaaaactgatgcacctcaaccggatgtgaaggaagaggaagaagagaaggaagaggaaaaggacaagggagatgaggaggaggaaggagaagagaaacttgaagagaaacagaaaagtgatgctgaagaagatggtggcactgtcagtcaagaggaggaagacagaaaacctaaagcagaggaggatgaaattttgaacagatcaccaagaaacagaaagccacgaagagagtgaaacaatcttaagagcttgatctgtgatttcttctccctcctcccctgcaagagtggtcctaggagaggacctggcacaccttaggttgacattcagaaaacttcaagacatcaccatcagcaggctccagttgaacactagtctgtgtaactttaaacatctagcagtaaatacttgcagttgtgatataaaggaccctgtttctgtagaaaagaaaacatttaacataatggttgtgaaatgtaacatgaagcaaactaactttttttttttttaacatctttgtttttaaaatagaatgatagaactttgccagtctttaagatcttggcttaatttaatgtattaatctgtttgtgcaaacataataccaccatttaaaaatgttagggagatgagttgcagtttttataatagatttttttttaaagtttggtattgtaaaacattcacacctctgtccctcaaaattgataattacgtttaaagtgcagtcatttgtggttagaatcttgttttgtttgcttccattattgagttcctcctaaggaaattgaggagagggactgaatagaagcccaaattcatataaaagttgcgtttaagttgtattaaaaatagatatataagaaaaaattctttcacttgatgtttgttagaccagaaagtgtgtgtgttctgtagctcagttcccagacagctttttaggtagtggaggaggtggcttcatgtggcacttgggcatttatattccacttgggagggtcaggctgtggccttctggagcaggtggcttgttaaggaacgctagcagggcatggcacgtgagctccggaatagatgtcttcatcacttcttccactgtgtgttgacactgttttccttacctatttcctcagatccccagctttctcctctgctatgcattttcttcacagtgcagcttgcagtccgttgctgaaaatgattataagccctgcataatgttaagctttattgtgattacgtgtatgtttcttctttcttttaagcagacccatacctttccagggtcaaagtacagaatagaatacattgatacaaagtacagaaaaatactttgatttttatccatttcttttactctgtgtaaagacttgagaagtctaattcacaggcaaaccaatacagaattgactgcagttgaacagactagaagtatttgtgggaggagtgacatgaagcatgagttatctgattttttttgtagctgctatatattttaagccttcatttgcaattcatgtaacagttgtgtcataaattacacaataaagcagtcctgttcaaattttttttttaacgtggcttgtagaatttttaaaaaagtgatcttaggtttgttttttcatgcgggatgcagatgggtgctatcagagcctctcccacaccactatagtgtaataatgttattattactctacactgaaacgtattcagagttagatattattttagcttcagttgttctttagaggctttcaaatgtaccgatgatactgtttcttgcactgaatatataaacactccacagtgtttatattgggaagatattgggaaggaaatatatttgtaaaagatgaaggctgtatctatttttttttctttttaaagtttgttcacttaaattcttttgaggatgggatgtatttttcttgctgttcagtgctttttcctttttatctgttgttctgtggtcactgtgaccttagctacatagcagactttcccaaatgtattgattacaaataaacagttgttacttagcaagacctgaaaatatgtctgcaggtttctccttgaagcaaatgtgtgggatcattgcatttccagaaatctgcctccttcaccctccgttgacagtatatgtcatgcctcactttcttctagctgagctttaaatcattagagcttaaattgtcagatcgttcattgcctttccagggttatttagtaaagtttgttgaaaacaaaaacgccttttcttggttcttttttcagttattttgaaggtccagcatcctgattaaatgtctgacacattaatgaatgaccagcagcagctttcagctcttaaaaagacacttatattttgattttacatgctggttacctgttccattgttgtcaaatgcccactctccatcagatgtgttcctccattttcttatccacaaagtactcctcacttttcaatttgtcatgttactaaatggtgttacattaaagccctgtgttaagtgtcaaaaaaaaaaaaaaaaaaaaaaaaaaaaaaaaaaaaaaaaaaaaaaaaaaaaaaaaaaaaaaaaaaaaaaaaatcaaaaaactacacatcaccataaaaaaaacaatcacattaccatacaaaaaattactactacgctcgaagatcaaagtatcacaacttccctagacacagatatataacaacacaccaccccatccttatttatgacatacacgcaccctctctaataattcacctaataataacaaacaccacgacaccccactctttaaatattcacaaaaaaacacaatattatacaccacaccccacaccaaccacaaacacacttattgaacatacacaccaacccactatatcatctataacaatacataatatcaccacccaacatcccccacacccagataatctaacctccagaataacaataaacataatctctatccaagcatataactatatactgtactaccaccaccacagataatctattaatctcacaattaaataaacatcatctacaatcactatcacatattacacaacaacaaatatattacgaacggcctcatatcacaacatcaaccatacaaacaaaagatccataaaaaaagaaaaagcatagcacacacagacacgctggaaagcacggtgaaagagtcgacgagtagcgagaggggagcgaggtgagagcagaggactaggagcagagacccgtaatggaagcaaacaaagaaacatcaagatatagagaacgaaaggggcaaaaagcgaaacaagaagagacaggaagaagagaagagagcagagaagtgacacaggcaacacagacatatgaaacaacgagaagataaagagaacaagagagagaataggaaagatatagatgactagaaggagaaaaaataaaaagaaagctaatataaagaaaagaaggaagagaaatgggcagaacacca

SEQ ID NO: 21085 - DNA, 496 bp, Homo sapiens
ccacgcgtccgttcaatgtgggaaaggtatagaatcaatctccaagccttgaatagagcctgatgaaataaacgcgttacttatttatcaggctttattactagcgatcaaatatagcacagagaaggattagtagaggaagacattctgacatgaagggacatctgaaaaggctggagataggaagactaaaaactaaaaaggctatttagtgttagcgcaaatgttttactatctcacctcagaatttaatgaagtattttaaatatattgtgacaaagtgtgataagtaatcttagttaagtctttaagaatgatttaacacgatattcactttctctatttaaaaaggcagatagctggacgtggtggcacacgcctgtaatcccagctacttgggaggctggggcgggaggatcacttgaacccagaaatttgagaccagcctggtcaatatagcgagaccccgtcttttaaaaaaaaaaaaaaagggcgg

SEQ ID NO: 21086 - DNA, 785 bp, Homo sapiens
  misc_feature 774, 775, 776, 777, 778, 779, 780, 781, 782, 783, 784, 785: n = A,T,C or G
acaactttctatttttagcctatatttggaaagaaagcacttaacattttaggaattctttttaaagctgcttgcaaagtgttggtgattttactgaaaacttttgagatcttcattttacaggcagacctgtctaactacaagccagacttgggttttctcctgtagtttgaagacacactgactcctgacaaaatgcagcctgcaacttcctggagaacaactcagtgtcacattaaagtttattatgtatttaatgatacactgtttaattgacagttttgcatagtttgtctaactttagagaattaagagcctctcaactgagcagtaaaggtaaggagagctcaatctgcacagagccagtttttagtgtttgatggaaataagatcatcatgcccacttgagacttcagattattctttagcttagtggttgtatgagttacatcttattaaagtcgaaattaatgtagttttctgccttgataacatttcatatgtggtattagttttaaagggtcattaggaaaatgcacatattccatgaattttaagacccatagaaaagttgaagaatgcttaattttcttatccagtaatgtaaacacagagacagaacattgagatgtgcctagttctgtatttacagtttggtctggctgtttgagttctagcgcatttaatgttaataaataaaatactgcattttaaagctgttaagaaattgtccagaacgagaatattgaaataaaaacttcaaggttataatcnnnnnnnnnnnn

SEQ ID NO: 21087 - DNA, 1721 bp, Homo sapiens
  misc_feature 1, 2, 3, 4, 5, 6, 7, 8, 1715, 1716, 1717, 1718, 1719, 1720,1721: n = A,T,C or G
nnnnnnnnagctaggtcgaggcccgggtgtgaatcggagccggcggaagtggtggaggaacttccggcagcggcagctcaagtggccaaggcaagatgggtcaaagtcagagtggtggtcatggtcctggaggtggcaagaaggatgacaaggacaagaaaaagaaatatgaacctcctgtaccaactagagtggggaaaaagaagaagaaaacaaagggaccagatgctgccagcaaactgccactggtgacacctcacactcagtgccggttaaaattactgaagttagagagaattaaagactatcttctcatggaggaagaattcattagaaatcaggaacaaatgaaaccattagaagaaaagcaagaggaggaaagatcaaaagtggatgatctgagggggaccccgatgtcagtaggaaccttggaagagatcattgatgacaatcatgccatcgtgtctacatctgtgggctcagaacactacgtcagcattctttcatttgtagacaaggatctgctggaacctggctgctcggtcctgctcaaccacaaggtgcatgccgtgataggggtgctgatggatgacacggatcccctggtcacagtgatgaaggtagaaaaggccccccaggagacctatgcagatattggggggttggacaaccaaattcaggaaattaaggaatctgtggagcttcctctcacccatcctgaatattatgaagagatgggtataaagcctcctaagggggtcattctctatggtccacctggcacaggtaaaaccttgttagccaaagcagtagcaaaccaaacctcagccactttcttgagagtggttggctctgaacttattcagaagtacctaggtgatgggcccaaactcgtacgggaattgtcccgagttgctgaagaaatgcacgccatcgtgtttattgatgaatgacgcctgggacaaaaagatatgcccatctggtggggagagagaaatccgcgacatgttggaactgctgaaccagtggatggatttgattcagggagagtgaaatatcatggcacaaaccgatagaaatgatccgcactataagaagcggataggagatgagttcccctgtgagaaataaaagacgaggagccgcatcttgatgcacacagaggattcacacaagcaggatgacgctggctgatgatgtaaccctggacgacctgatcatggctaaagatgacctctctggtgctgacatcaaggcaatctgtacagaagctggtctgatggccttaagagaacgtagaatgaaagtaacaaatgaagacttcaaaaaatctaaagaaaatgttctttataagaaacaggaaggcacccctgaggggctgtatctctaatgaaccatggctgtcatcaggaaaatggttgggagatttctcaatccctgaaagggatgaggttgggggagttgcccagaggaatccctgttcccactgatttttattagcaaaacatcctgtgtcttttggagtacgatgtgtaagtgcccattgggtggcctgttggtcactgtgcagcagtctgcttcccaataaagcgtgctctttcacaaacaaaaaaaaaaaaaaaacacacgaacacgacaaacacaacaaaccaagacaaattttcaacaacgagaggccaaacaaacaccaacgagggccacaatacacccccaannnnnnn

SEQ ID NO: 21088 - DNA, 1292 bp, Homo sapiens
  misc_feature 1292: n = A,T,C or G
acaagacagctcataggagaagggggaaaaaattaaaaaaattaaaaaaagctctgggcagcatgcaccaatcaaaacgccagagcccgtaatgagggcgattgatggctgtttggcttttactgcagggtaatgaactagaatccagtctgaggagggggaaaaatatgaatattcatgagactgtgctcctgcctttgatgattaaagaaatttttaatattcaaataagcgcttgccaagtgattaacaaagaacaagcacgcagaaatatggaaatgggagccgggaaagatttgagaggcgaacgtacctgtggaagttacttcaaccctggaagtagggactttccagcagtcccatattctggatgggattttaatgatggtaaatgtaaaactggaagtggagatatcgaaaactataatgatgctactcaagtcaaagattgtcgtctgtctggtcttcttgatcttgcactggagaaggattacgtgcgttctaagattgccgaatatatgaaccatctcattgacatggtgttgcagggttcagacttgatgcttccaagcacatgtggcctggagacataaaggcaattttggacaaactgcataatctaaacagtaactggttccctgcaggaagtaaacctttcatttaccaggaggtaattgatctgggtggtgagccaattaaaagcagtgactactttggtaatggccgggtgacagaattcaagtatggtgcaaaactcggcacagttattcgcaagtggaatggagagaagatgtcttacttaaagaactggggagaaggttggggtttcgtaccttctgacagagcgcttgtctttgtggataaccatgacaatcaacgaggacatggggctggaggagcctctattcttaccttctgggatgctaggctgtacaaaatggcagttggatttatgcttgtcatccttacggatttacacgagtaatgtcaagctaccgttggcaagacagtttccaaatggaaacgatgttatgattgggtggggcaccaataatatggaggtataagaagtactatcatcaagaatactgtggaatgactgggttggaaatcggtgggcaataggacctgtatttcgagttggtggagctttaaatggtgtatggggcaccggcttgggggaacgggttgttacagtgggctttttattgcaggttcgggaagggttggaaaagggggggaagggggggattaagagaaaggggtagtgaaaaaaaggggtggttgtatgn

SEQ ID NO: 21089 - DNA, 960 bp, Homo sapiens
  misc_feature 1, 2, 959, 960: n = A,T,C or G
nntatagggagtcacccacgcgtccggaacgtctgcgtgtgtgcgggctggttttgtggcggctgctgctagagctggagcatttgccggtcagtataaaagattaaactctacagaagaatgcaatcaagtgatggcttttcctttagaatttgaatatggaggctacaggaacagatgaagttgacaagctaaaaaccaaatttatatctgcttggaacaacatgaaatatagttgggtgttgaaaacaaagacgtattttagtagaaattctcctgtattattgcttggaaaatgttaccattttaaatatgaagatgaagataaaacgttacctgcagagtcgggatgtacaatagaggatcacgtaattgcaggaaatgtagaagaatttcgtaaagatttcatttctagaatatggctgacctacagggaagaattccctcaaatagaaggctcagctttgacaacagactgtgggtggggctgcacattgagaactggccagatgctcttggctcaaggactcatactacactttcttggtagagcttggacctggcctgatgctttgaatattgaaaattcagactctgaatcatggacttcccacactgtcaaaaaatttactgcatcatttgaagcatcactttcaggggaaagagaattcaaaacccaacaatttctccggaaggaaaccatgggaaatattctgatgatcatgaacatgcgacatgaaggttatcataggaaatcctccctggttggtgattccccttggtctttggctacctcaacttatagaattggaagagtcggaaacaagcggacgatggttggccactgtgtcgcgcattcagaacggtgagaagagctccgtctacggaaccattttgccatgtgaacccgctgatcacgaggccatgacgaaacctctttcgacccacccccctgctann

SEQ ID NO: 21090 - DNA, 559 bp, Homo sapiens
  misc_feature 1, 2, 3, 4, 5, 6, 7, 8, 9, 10, 11, 12, 13, 14, 15, 16, 17: n = A,T,C or G
nnnnnnnnnnnnnnnnnaaaatcgatgggcccgcggccgcttttttttttttttttttttttttttaacagatggtcatttcagctcctggctaaggccacaaagcaaagtgtcctttattcactgattgttgtttgagcaagggtgccctcctcccccttgccaggctgctgggagtgagacagatacagccttggcagcagtgtcttggagtgattgtgaataagggatgttttctctcctgtctctctcccagtgtctggatgccagccgcccatggctctgctattggatcctgcacagcttggaactgctagatgaacccatcccccagatagtggctacagagtgagtctgtctttgggaaatctggggtgttctctgaaattgtattttgagtttgggattttgttttgtttctgttttgtttgtttggaatggaaaaaaacagtgccacaaagaaatctttgctcttctcatgacctccggcaacttcctgaaactcctccactttagaaaactaatgtaagctggtgggtagaacaagactttgaacttc

SEQ ID NO: 21091 - DNA, 1250 bp, Homo sapiens
  misc_feature 1, 2, 3, 4, 5, 6, 1243, 1244, 1245, 1246, 1247, 1248, 1249,1250: n = A,T,C or G
nnnnnnaataaacgggtagatttaaggttttagacctgctaatgtaaaaagagtcgtacaaccaagaaatcattggggaatgttgaccgaaaaaggatgaggtgtcgaaccttcgatcgctgagcccccataaatgcagccttaggtcttgtaattctgaagggacaaagtgtattcaatcttggtgttgttttaatttgttttttttgagaccggagtttccgctcttgtttgccaagcctggagtggcaatggcacgatctttagctcaccacaacctccacctcccagggtcaagcaattctcctgcctcaccctcccgagtagctgggattacaggcatgcgccaccacgcccggccaattttgtatttttagtagagacggggtttctccatgttggtcaagctggtctccaactcccaacctcaggtgatccacctgcctcggcctcccaaagtgctgggattacaggcgtgtgccaccacgcccagccttgggtgtttttctttcagctcctccagtactttcatactattctaataaatatattttgttggtatgaagctatgaagcaaaagtagctattaccaatgcatacatacagtacactggttttaagttccacctcaaagtgaatcttagagcctggtgtaagtgctccactttagagatgtaccttaattactactgtatttgcaaattaagggaaatttaggtcatcatttgattttctgaaatctaaaaggaactgaccatcattaccaagtctttctagataatcaagggtagatggctgtttttaatgtaggaattaatgtaggcattcctgctttcaggtttaagtatgaatcaaagcatattttaatttgctagtgcaaatggacccagaattggaagggctatgtaactacacagtatgcacaccacagccatgtcagtgtcacagatcctcttgtgcattcagctttcttaaaaacacatcaaaggctgcaaagaagctcagaaaaaactaaattgaaggacaggtggaatacaatgactctatgtgaggaacttgccaactcacatctttcaaagccagatcagcttatatagtacatgcattatagtcatatgaaatgttgtcttggtgctttcttcttggaagactatggcagcagctttaagactactaacaaagattattacacaggtcatcttatccacaggcaactgctttgcacaactagaacattaacagnnnnnnnn

SEQ ID NO: 21092 - DNA, 805 bp, Homo sapiens
  misc_feature 527, 724, 805: n = A,T,C or G
acgcggggatcgatgatgactataaaaaaaatggatctcatcggaatctgaacaaaatgagtgaccaaatcatttctgtgccacttctgtgagctgaggtccagcactgggaccatgccaggcaagcatgaggagggagtttacagggactagggtattggaaaactaacctacccatatatattagagcaaatgaattgttctcagttctgtaaatatccagctgtggtttgacatagcaactctctttgtatttgcttggcagcatttatagaaacagctggtagaccctggggaaccagggcatagtgagattcgtgggacgttatttcacctactcttgagccattcacacatttgagctcgcagaattatctggtcaatgagcagtctcttgagggtaatgagatggtcaacatccaaatccaaagatactaatgtctcagattttttttaaaaaagtttatattctatagtgatcaaagatgtaagaataatttttcttgtcattcattggatagtccagngagtgtctactgtgaattcttatattcacttgtaactaaacattccatttggcaaatttcgtttcataacttccctaatttcctctacactttgtagattgggtgagatacaattccattggattttaccactggaccagggggagggctaattttggcattttggaccaggtaactaacttggggaggaacagaancacacacttctgagggaagattccatttttaggaaattatttttattaattttcaactgtcagggatttggtttggggaan

SEQ ID NO: 21093 - DNA, 1640 bp, Homo sapiens
cggccttgaatttaaatcccgaatccaaaggctactttttggatatcccttgttgttccaactgaggactttgtcctaaagatttctggtctttcccaaagttcgtggcaacgttcttaggttcaccctggcttcacccaaccactgcttctactgctgcttgtcactttcaaaacaggtccaccttccaccggcccctcccttcccacccttccagcccacagtgtctgcaggctgtgggtctcccacatctgtcatgtcaggatcatgctgctgctttctttcttttttcccttttcttttttttttgatacagggcctggctctgttgcccaggctggagtgcagtggagtaatcatggctcacctcagctttgacctccagggctcaagtaatcctcctaatacgggcatttctctcatcgcttcagaacccgccccacaaccaaacattcagatgcttattaaggcaacaaaacaagtgacagacgggacaatttttccaattctagatctaattgattaggctatgtctcatgaggagactgtacttgacctctaagctagcatctggaatacaatcttccagcggcttagggaaggtcggtgatagtagtatcgtcaggatcaattccgaagtgcagcttgccgtccttggcggctgcccagggcatggaggtggaggtccactttgccacccagtctcctgttttgctaaccacgatgaggccacctaaacctttaacccttgacttcatataacccaacgataggtccgcagcctcttctaccgtctttccttgttctatgtggaacagggtgagtctagccaggttcaccttcaggatgctttccccatgccctgtggttgagacggctccgatgtcattgtcggcataacctccagctcctagacacggtgagtccccaacgcggccgaccattttattaacgataccgcctgtggaggttgcgtaggctacattccctttgcagtccaaggcaacagcacccacggttcccaagtttttttgacaatctgttttctgagcacctttttcatgcttctctttttccaggcgctttttgtttctctctgtcaccagtttttctccaggaatctctggaacccccatagctgctgcaaactgcgctgcgccttggtcagtcagaaagcaatgaggtgtcttttccatgacaagccgagcaagtttaatgggatttgctatacactggactgcggacactgctcctgcagacaggtcttttccatccatgatactagcatccatttcaacctcaccatttgtgttcaagacagacccacaacctgcgttgaactcgggatcgtcttccagggcgacgacagctccctctacggcatccacggcgctcccgccctcccggaggatgccgtagcccacggtggcggctctgaccatgccctggtgcactcgctccttccgatccttggagatgggaccggctccgccgccgtggaccactacgatgggattcatgtcggcggatcccagggcaccgcaggacgcggacgccgagacctcaagctgggtcgagccagccccgcagccgcccggtacccctctccgatttaaaccagcctcgtactagctaagtta

SEQ ID NO: 21094 - DNA, 1316 bp, Homo sapiens
  misc_feature 1, 1292, 1308, 1309, 1310, 1311, 1312, 1313, 1314, 1315,1316: n = A,T,C or G
nagagaatttgcaacacgtggtagtgaactgtgaggagtttgaggggtctgaagactgaaagagtcgaatggttgttggcagggtgtcctggtggatggtttctgtaagttcagattctcataaatcgtgtgagcgtcgccgacacctctgagataaaagggcccctttcgactagcctctgctgaaaggacctagaagaatcccttaggatgaagctgagtcttaccaaggtagttaatggctgtcgcctaggaaaaataaaaaacctgggcaaaacaggggaccacaccatggatattccaggctgccttctgtataccaagactggctccgccccacacctcacccatcacacgctgcataatatccacggggttcctgccatggctcagcttacgctgtcatccctagcagaacatcatgaagtcttgacagaatataaagaaggagttggaaagtttataggcatgccagaatcactcttgtactgctccctgcacgatccagtcagcccctgcccggctggttatgtaacaaacaagtctgtgtctgtgtggagtgttgcaggacgagtggaaatgactgtttccaagttcatggcaattcagaaggcccttcagccagactggttccagtgcctctccgatggagaagtatcttgtaaggaagcaacttccataaaaagggtcagaaagtctgttgaccgatcacttcttttcttggataactgtctgcggctgcaggaagagtcagaggttcttcagaagagtgtgatcattggagtgattgaaggtggagatgtgatggaagagaggctgaggtcagcacgagagacagccaagcggcctgtgggtggcttccttctggatggttttcaaggaaatccaacaaccctggaggctagactacgcttgctgtcatcagtcactgcagagctgccggaggacaagccaaggctcatatctggtgttagtcggccaggtgaggtgctcgagtgtattgaaagaggagtggacttatttgagagttttttcccttatcaagtaacagagcggggatgtgccctgactttcagttttgattaccagccgaatcctgaagagacactactacaacaaaatggaacacaagaagaaataaaatgtatggatcaaataaagaaaattgaaacaactggttgcaaccaagaaataacatcatttgaaattaatctgaaggaaaaaaagtaccaggaggactttaacccctggtgaaaaggatgttcctggtactgcttgtaagaatcacactnggccttcattcaccannnnnnnnn

SEQ ID NO: 21095 - DNA, 560 bp, Homo sapiens
  misc_feature 560: n = A,T,C or G
acgcggggcctgtagccaggcgccatctttgacgctggcagtcttggttttctgctagtgctgctgctgctgggaggacgacggacggcagcggccaagcaagaagaaagacgtggcagcaagcgggagtcggggatagtgtcatcggttcggtaaagtttctgttctctgatttggggatattccctgcccaaaaaattcctggaaaattgactagtattaagtgtgagtaaaaggtgtccacttttttttaagttttgattttagttttgtcttggatagtatttggcaagatttagcctagaaattatgtagtatttattacataagaatcaaaattgctttgttactgggctggtttcaaagtttagaactcatttctatgtatcaaaatcgggttttttttggttttgatttttttttttttaaattcttaaatggtaaatatgccattgtgaaatgaaatctcaactccaaaagtttacccttttactaactggagtaaatgtatacttacaaagtctttagctgtagccattagtagtaaagaatttggaccn

SEQ ID NO: 21096 - DNA, 489 bp, Homo sapiens
  misc_feature 489: n = A,T,C or G
aattcccatgatgtcagaccactggagtttccaggggcaacaccccataaccgtcccgctgcagaagagcatcagacgttcagtaagaatgcaaagggtatctcagtgggaaccgcggaccaggagagctcccaaaccaacacatggctagggctctctaggccctttcaggctagatcttgacgagagaagagtaaagatctttctgaggttggtgcaactgaggaaacgaaagtttcggcctctgctgtcagatctatgaaaggaaagaactgtgaacttgtccccttttgttttctttgacttaaaacaaaagaaaatcactggaacaaagtcttaaagtaataacagaaatgtcagaaaagttgaacatcttatgggcacatgcggtgagttacgctaacttatagcatccactgagattagccgcataggattcttcccatgttagagctaaaaggacctactgtccgccagctgcattgcagn

SEQ ID NO: 21097 - DNA, 699 bp, Homo sapiens
  misc_feature 1, 2, 3, 4: n = A,T,C or G
nnnngaattgtttagaaaaagggtttttcaagggacaccagaaactgctcttcacaaatgttctttcaaaagggccaattcatgggacagcatcccccgaaagggttcccgccagattccccctggccagtgggcagaaggaactgtagaaccccggaggtaccctcattgacacgtcccgcttccttaagaaagttccttggagcagaggacactgcgggaaaacaggccctgtgttgccttattccgtagtccattggaaccctggaaaatatattgcttccaaagacatcagattcagtggattcctgtaggttatagaatattggcttccaaacaggcttgcagggaccatatgctgttggatgacatataaccaggtccacttttatgaactgcatagctgacttggttgtccattgctccagaaggccacagagtggtagaaaatcacaggtaaaggctcagacagcccctgtgatattggtggtcttatccttacattcttctcccttggctaagacaggacttaatatgaaaagtccagcacccaggccacaatgagctatctcccaattcagatgttatattaagaaaggcttaaagaacttggtaaaacgcctaatgccaattaccatcccaagtagtgaagttaaaacaactggccacagtgttgagggaaaagaaccttccccgcgt

SEQ ID NO: 21098 - DNA, 412 bp, Homo sapiens
  misc_feature 408, 409, 410, 411, 412: n = A,T,C or G
actgagtggcttcaatgataaaaaaaaaaaaaaaaaatgactgcatttttaaggcctagcgcttcaaaggctatattgtcttacgtgtctgactttggcatctgccctttctgacttttgaccctgcagccttcagcatgccggaagtgaatgtggactataatgccagctcagagaccttgcggtgtgaggctccccgatggttcccccagcccacagtggtctgggcatcccaagttgaccagggagccaacttctcggaagtctccaataccagctttgagctgaactctgagaatgtgaccatgaaggttgtgtctgtgctctacaatgttacgatcaacaacacatactcctgtatgattgaaaaagacattgccaaagcaacaggggatatcaaagtgacannnnn

SEQ ID NO: 21099 - DNA, 382 bp, Homo sapiens
  misc_feature 379, 380, 381, 382: n = A,T,C or G
gcacaatgaaatacattacctcttcaaaaaaatttttgtgaattaatcaaaaccaagtttgatatgaaaataagaataacacactaaaatgatatgcagcagacaggtcgcaaacttggagtgatatttacaattcaaaaacctaaatgattaatgtcaaaatacataaaagactcctacaaatcagtgaaagaaagcaatccagtggtgaggtggaaatgaacaagagatgcacatacatttcactgatgatacaacaatcaataaacatgaaataatactaaacttattaatcagcagagtgaaaagtaaaatacctaggaggtatattattctcaactagatcatcaaaaatgcaggtataataatacgagctgcnnnn

SEQ ID NO: 21100 - DNA, 474 bp, Homo sapiens
accattcataaaatgcccaaaagagagttggaatggttatactatatgatgtgttttgtttttgctttcaatgaaattataaatgaaaatgaaaacaaattatgcaaaaatttatagaatgcagctgaagcagtgctcagaaggagattttacaggcctatttttaaaaagaagaaagatggcaaatcaataatgcagccttcaatcttatgaatttttttaaataaaaaaacatactaaacctggagcatgtatgagtaataatacatactaatacatattaatacacaaggaacaagcattagggttcttcagaaagatagaaacagtaggatatatacagagagatggatagatatttgagagaagatgaattagggaaactggcttataccagttctggaggctaagaagtcccacagtggtctgcctgcaagctggagaccctgggtgatctactacacccaatagagt

SEQ ID NO: 21101 - DNA, 277 bp, Homo sapiens
ctgttccccagcagaagaaaagaaaatctaataaaggatttcacaacctaccatcgggatgatcttggtcacgcacagaatgatctgtcacttcaccgccttttgtaatattttcatcctttgcaaaatctaacaacaaacaagcaaaacctttggtcagcatttttaacttggaaacagagcagctttcagcactaacatgatagatttatgtttgaggaaaaatagaatttattcgttttaaaaataaccactcaaatacatatgtttgccaata

SEQ ID NO: 21102 - DNA, 347 bp, Homo sapiens
  misc_feature 202, 290, 347: n = A,T,C or G
acttccactcttgtttccaattcaccccaggtcattcaactctatagccactcctaatgcctctcctgaggtaggacaaaagtgggcttcccaaaccaaaaagattcacagatccatgaagaaactgaacattcacttcaaatttcctcctctgatcttggcaactgcaggaaatgaaagcatttgtccagatctctggcanagatggcactgtggtgttttctctggggccagttgtgcaaaaccttatagaagagaaagctgatctcattgcttcagacttggcccanattccacagaaggaagacccactacattatctgagacaatggggaaagctgacgtan

SEQ ID NO: 21103 - DNA, 1106 bp, Homo sapiens
  misc_feature 1106: n = A,T,C or G
actgatgttaatagatattcctgaaataaataaaggaattaggatggttaggaacgtccttccagaagaaatgcaaggctggccatgaaaggtgactatatcgtaataggcagaaggtggcagcgcaggtatgggtcgtaagaagaaccttataggaaaggaggtcaacttgccccagtgccatgagctcagcactacaacctggtgcaggacttcgaagtaatagaaagcgaggctgcaaaggtggacagggacctgaagacagagggccaggttagtgagagcagacttaccacgggcatagcttagcagttttaagaataggatcagattttcatttgataaaatcaccctgatgacaaggtggagagtggattagatgtgggtaacatcgaagataaagaagcaggtactgagactcataaaatatgcagatgagaggtagtggagaccagaatcatatttcatcagccagcatgtcctgtgcacacacgacctgctcttactgctttccatgttctgtatgtggaaggagatcagtcaatcttgaactcatggcctcagtattttgtactttataatttatattttttcctatagaggcttttctatttatgtgtattccacttccccatatcactaaactgtctttttccacaggattcaattcttgaactagtaggagtgaagggcagtctgttgaaacctgtaatctcttaggcttgtattttctttgaacatagtttccacagaattcttccctgtaggggaaggcctgggcacttcttgatgtcagaacatgttgtctttagtttggaatctgccaaaacaaaagttaaatcaaaaatgttaattcctgtcaccccagcacttcgggaggccaaagcaggaggattgcttgagcccaggagtccgagactggcctgggtaacatagcgagacctcgtctctacattaaaatttaaaaattagctggatgtgctggcatgcactcatagtcccagctgctcaggaggctaaggcgggaggattgcttgagtctgggaggtcgaggctgcagtgagccactgcactccagcgagtgatggagtgagaccctgtctcan

SEQ ID NO: 21104 - DNA, 723 bp, Homo sapiens
cacgcgtccgggagaagagaatgaggcacagagagattaagcgatttgccagaggtgacatagcaagtcactggtgagctgagatagaaaccaaggctgtctggctccagagtcagtgctcttaacccctgtctgctatgtatatagtctcaaactggtaaaaaagtcagggctggcagtacattttattgtggccggtggccaggggggagtgggggcggtagtcttttgcatttactaactccttatttagacattactcctccaggtttagaaaaaaaaagccataattttttatgtcagcaactgctattgataacaacaacagtaataatagtagtagctatcttttataagatgccaactacatgtcagtcactatattgggtgtttttggctgcccggattcctttctggaataagagctctgtagactgtttttaatatagtaagtgacagagaaaggaggcaaaccagcttgtctacttcttaaactatgccttcagtatttattaggaacctcgatatgcttgaagtagatgatacattttccccagcattcagactcttgaacaacttgtgaaatctacccaagtgaattataattaactgcgtcacatttatcattatactgacctttgagcatttcccccaactcacagtattttgtttctcagttatgggatattcgcttgctttgtgaaacacatgaaaatgttagca

SEQ ID NO: 21105 - DNA, 845 bp, Homo sapiens
  misc_feature 836, 837, 838, 839, 840, 841, 842, 843, 844, 845: n = A,T,C or G
acgcggggttcacatggggccaatctgtctttgcaaaaaagaagtgagaaaggaatccttgatactttcccctagaagtccagcatctgcttgtttaaatacatatctcatgtaaaacgggaaagataaaaaatattgaaaagtgaagttttaaaaccttatactaaagatctttatactgcagtctgtctcacacaatatatcattgtctggctttcaacaacaaaaaattactaggcgttctaaaagacaaataagtcacagtttgaagaaacagagcaagcattagaaccagactctggttttgcagaggtgttagaattaatcagactaggatttttttttaattcctaagattaatatgttaggggctctaaagggaagattggacaacaggcaagaacaggtgggtgaaggagagaaatggaaaccttaggaaagatcaaaaggaaatcctagaaaccgaaggcaccataacagaagtgaagaatgccttcgatgggctcatcagtagactggacatggccactgaaagaattagtgagcttgaagaaatgtcaaccaagactcccaaaactaaaatacaaaaagaaaaaagagtgggaaagaaaagggaacattatattcaagaactctgggacatttgcaaagggtatggcatatgtgtaatgggaataccagaggagaggaaagacaggaagtcaaaaaaagaaattgttccaaattaatgatagggtccaaaccacagatgcagggagcttaaacaccaacagggataaataaaaccaaatctacgcttaaccatatcatacttaaccttgcagaaattaccagannnnnnnnnn

SEQ ID NO: 21106 - DNA, 683 bp, Homo sapiens
  misc_feature 1, 2, 3: n = A,T,C or G
nnncgacgatggacactctacttgtgcgtatgtatgtggggtatgtgtgcttagtaatatctgggtccaagttggattctgaaagtgaacccaaatcctaccttcttttacacttttttctcccaagatctaaactcttactactcaaaactatgacctgcagcccagtggcatcagcatcacctagaagcttattaggaatgcagagttccaggcctacccaagccctgattcagattctgcattttgagaagatgcctaggtgactcctatccacattaaagtttgagaagccttgctcatgtcggtattgaaaaatccttgccgacttgacaagaaggcaataatataattagtgtgtgtagcaaattgtcagtgttcctgaaaagactatttagatattgcaagaaggagtttggactgaggttttcttctgtgattttcctcatcccaattttcagctgacttcctctctttcttctctgctctaatagtcaaagcttgtatcgacaaccggttagagaagtattctcagcagcctagtgcagatctcctttgtgacatttatcaccagaatcggctttcaaagaaagaattgtatgctgctgtcacagagctccagctggctgcggtggaaacggtaagggtgggctggatttgagtttgctaaatgaacggtctgt

SEQ ID NO: 21107 - DNA, 745 bp, Homo sapiens
  misc_feature 1, 2, 3, 4, 5, 6, 7, 8, 9, 10, 11, 12, 741, 742, 743, 744,745: n = A,T,C or G
nnnnnnnnnnnncggaagtcttctagaattaattaacgcgggggctgatgccattttcagcctcagcacgcctgcacccaggcgctcattaaaacagcatgttgctccccactgcctcgtgttgtctgttggcgcgctgtcggggttcgaaccgatacaagaaccttccacctacctggtgctttggcctcatctataagcttttccactgtcctgaaacaagatagagaatctgagcggccagtcatctgccctaagtgctgccgccgaagactgaatgtcctggaaagtttgctgtcacatctccattatgacaaaagcattgtgccgaacagatgaaaaaatgcattgtcaacggaatcttttatgtttgtttgtcttcctttaagcaacattgccttacttgttataaaagataaataaatatttgttcatttcaaaaaaaaaaaacacccagcataacacacaacaaaaacgtttgttggccgcgcacgagcgaccccgaaaaaaaggctttctacaacccaactcgttggggggcccagcggcacccaaagatgaatatggcgacacgtgcccacacagcgggtcccaagagaacccgtgccgagccactgggcgctggtttccccccaaataaaacgcccgggggaccacgggccgttctggacacactcagaggggctccgagcgccaaacgggctatcaacacggggccaggagctgaaaaccgccccgcgnnnnn

SEQ ID NO: 21108 - DNA, 716 bp, Homo sapiens
  misc_feature 1, 2, 3, 4, 5, 6, 7, 8, 9, 10, 11, 12, 13, 14, 15, 16, 17,18, 19, 20, 21, 22, 23, 706, 707, 708, 709, 710, 711, 712,713, 714, 715, 716: n = A,T,C or G
nnnnnnnnnnnnnnnnnnnnnnnctaaaatgtttaaatgctacacacataaaacaactgtttctattttactaaaatgcaaaataaaagctgaccacggaactgtccaaaggttctgtttggaaatggcccacctaggtcagggatgaagtctttacaaagtactcgtcctgagtgagttggaatttaaaaccttggcctcaggttcgtaaccttggtgctccaggattagattaggcttttctgagtggaatactaccatttcaaccattctaaggagtcaacgttcttatatgattaactacagaaatgactttcaagagctggtgtgatcagtctaaccctcttgcttaatgaccaaatcacttttactatttaattctgttcttctgggggtgagttaaatgataaaatatcttaagaaggaaatcttattgaacaaatattatcttggcaaaacatttgtcacacataggtgagtttatcctggcttcttagggaaaggaggcttggaatatatttaattgtgttaagataagctattttgcttcttttccctttctactgtattcccatttgtaaatttggtccccaaaccatgcagcttttacattcaaagtatacatatttcactctcctttttcccccttatgctagtggcctaaatcaggatcctattcgctctcattctgatctatagaaaaacnnnnnnnnnnn

SEQ ID NO: 21109 - DNA, 356 bp, Homo sapiens
  misc_feature 88, 98, 99, 122, 162, 168, 229, 299, 300, 354, 355, 356: n = A,T,C or G
acgcgggtattcagacttaagaaacatcaggccttagacttttgaaaaaccacatctttaaattctggtagcagtgaaagtccagagnctctcacacnnaagctctgctcttgtcttaaagnaagggggaaagaaaaatatatctcacttttaccagtgagncttacnaactgagggaaaccaagaacaaaacttaattcctcagtcaagattaccctcggccccacanaatgtttgaagtagaaatttgggtaaagtatttcaaagatcccaataagaatggaaagaagggggcaacnnacacacaacacccacacacaacacaaccacaccacaacaacccaatgaatgaannn

SEQ ID NO: 21110 - DNA, 493 bp, Homo sapiens
  misc_feature 491, 492, 493: n = A,T,C or G
acggggaccggcaagatggcggcgcggacagcgttcggtgctgtgtgccggcgcctctggcagggattggggaatttttctgtaaacacttctaagggcaatacagccaaaaatggtggcttgcttctcagtacatacatacatttaggatttccatgtcttcttggagaatttataatgtgtcctgttggttcgcaataatacttcttattctgaagtctcctttatctgaaattaatatagccactctagctttccacactcacctaaattcagcctttattagttcattaaaaattattattttaatcttcctactgatttgtatggcatttggtggcatcaatccaaataagcagatgcataggtcctgtttctcccttcaagttcctgtctccctacagatttcagtaagctgtctgacttgcaactgtaattttttgaagaatgcaagaaaaatcgttaatattttaaatgctccggcttaatannn

SEQ ID NO: 21111 - DNA, 1727 bp, Homo sapiens
attaattaaggcgggggaagctggcaggggcacgagccgggggcgggtttgaagacgcgtccgcgtcgttgggttttggaggccgtgaaacagccgtttgagtttggctgcgggtggagaacgtttgtcaggggcccggccaagaaggaggcccgcctgttacgatggtgtccatgagtttcaagcggaaccgcagtgaccggttctacagcacccggtgctgcggctgttgccatgtccgcaccgggacgatcatcctggggacctggtacatggtagtaaacctattgatggcaattttgctgactgtggaagtgactcatccaaactccatgccagctgtcaacattcagtatgaagtcatcggtaattactattcgtctgagagaatggctgataatgcctgtgttctttttgccgtctctgttcttatgtttataatcagttcaatgctggtttatggagcaatttcttatcaagtgggttggctgattccattcttctgttaccgactttttgacttcgtcctcagttgcctggttgctattagttctctcacctatttgccaagaatcaaagaatatctggatcaactacctgattttccctacaaagatgacctcctggccttggactccagctgcctcctgttcattgttcttgtgttctttgccttattcatcatttttaaggcttatctaattaactgtgtttggaactgctataaatacatcaacaaccgaaacgtgccggagattgctgtgtaccctgcctttgaagcacctcctcagtacgttttgccaacctatgaaatggccgtgaaaatgcctgaaaaagaaccaccacctccttacttacctgcctgaagaaattctgcctttgacaataaatcctataccagctttttgtttgtttatgttacagaatgctgcaattcagggctcttcaaacttgtttgatataaaatatgttgtcttttgtttaagcatttattttcaaacactaaggagctttttgacatctgttaaacgtctttttgttttttttgttaagtcttttacattttaatagtttttgaagacaatctaggttaagcaagagcaaagtgccattgtttgcctttaattggggggtgggaagggaaagagggtacttgccacatagtttcctttttaactgcactttctttatataatcgtttgcattttgttacttgctaccctgagtactttcaggaagactgacttaaatattcggggtgagtaagtagttgggtataagatctgaacttttcatctgcagaggcaagaaaaatatttgacattgtgacttgactgtggaagatgatggttgcatgtttctagtttgtatatgtttccatctttgtgataagatgatttaataaatctctttaaatactaaaaaaaaaaaaaaaaaaaaaaaaaaaattgtgtggggggggggggacccttagaaaaaaggctttctatagcacccattccgtgttggggcgcgcggccccccacagtatcgcttcagggtgacccggtggccactagagcggttccccaaaggcaacaccgggctacaggcactaatggtgcgtgggtcctccaccaagtaaaaaaagccgcggggggaacaggggcgtgtcgtagaacactccaaagggggccggaggcagagcgcgcgtctataccgggcccaagagaccaataaaccgccgc

SEQ ID NO: 21112 - DNA, 1670 bp, Homo sapiens
  misc_feature 1, 2, 1660, 1661, 1662, 1663, 1664, 1665, 1666, 1667, 1668,1669, 1670: n = A,T,C or G
nnagatgcaaggtttcagtcaggccagtaatttcagtccttaagttgcttaccatccaagagagccaataatgatcaaacaaggtggaaaaaggtcagtgccctacacaggtaaagtacttactcacgtagagatgagagaaggaaggcttgatggctctgaggccatttgggaagaattctggggaatggataaaatttagacatgaatgatggattatgccttccagaaagagagaatgaatcaaataagggaaaatatatggaggtagaataaggttgggcatggagagtttgaaaaacataaattagagtgatgaggtggctgggacaagtggccctgaagggaagtttctagagagaaggatggagagaagatggaaccaagtgaggaaagtcctccgatgctagctccctgatgttaggccttcagatgctaggccctttcatgctgagcctccagatgctatgccctcccatgccatgccccaaagttattcattaggctgtgggaactatggaaagttgccagttccccatctctggtgataagagtcgcccctctttctggtactgtgtgggcgccttctcaatgggaaatttatgccctccttttaggcagataggcagataaggggagggcagagaactcttcctgcatctgttggttctctgttgccctcatctcaaaataatctttatgccaacgtggcataatttaggggtgacatattctgatccccttcactggggctggggaatatggaggatcaaattggcatctgctctccatctggtcatgaacagaattttaaaaggcatttctgcttcatcccttcctcatttccttccttccttcttcctttttctttctttctttttaaatgtttcatgctatagattggccctgcagatacttcagtttgccaccactattctacatttaagcttctgaacctcctataagtacagaatacatttttctcttggcatattttgactaataaaactgtgagatgttcaatgggcattgaattttgaagtcagtccaggagatgtacaaataatatccaaagtctgaaggcttaagctgtcatcacagagttactagaggacacttatctttgacatgatctgatatcagaaacgagtgtagacttgtagtcatttagaactcaaaagagatcttagagtcttctagatcagtggctcctaaaagctactcaagaatagggctcatgtttttaatggggaactttaagtggttgtttagacccccaccccaagatataaactgtggtggggcatgggcctgagaagcagagaatccttttcttttaagctgcccaggtgatgttaattcaaatccagtgataacagtgataagtaacacttagccaagtgtttcccatggctcttagcttcagagtgtgacccctatctaagtcaagtatcaaagatttttcttcatgccattactacagaaacagggtagaatactcatattccttcagctcaagagcagcagagagtttctgacaagtatttttgcatttggtaaaatggtagtctaagttggaactcagtaaactatttttgttttcaatgaggggaagtgtagaactgtagtactctcaaattattttttctcaaattggccnnnnnnnnnnn

SEQ ID NO: 21113 - DNA, 1389 bp, Homo sapiens
cgccgaggcaggcgcgcggcgggcaagcctgggagggggcgggtccgcgcgggcttcggaggagcccgccctgccagaggagagggaggtcacggcgtaaaggtgcagctgccgccaccgccgcttctgcaaggtctcagggacgggctgcagccatgtcctattgccggcaggaagggaaggatcgaatcatatttgtaaccaaagaagatcatgaaactccaagcagtgcagaattggtggctgatgaccccaacgatccatacgaggagcatggattgatactgccaaatggaaacattaactggaactgcccatgccttgggggaatggccagcggtccctgtggagaacagtttaagtcagccttttcctgcttccactatagcacggaggagatcaaggggtcagactgtgtagaccagttccgggccatgcaggaatgcatgcagaaatacccagacctctatccccaagaggatgaggatgaggaagaggaaagagagaagaagccagcagaacaagcagaagaaacagctcccattgaggccactgcaaccaaagaagaggagggatcaagttaatgaaggccacaaggcactgggcaccagtccttttggagtggaccttttgcaaaaggccttgtcatcaccttccaagaaagtttccttctgttgtcctgtgcattataatatacaaaataacttattttgatgatcagaggtcttgaggtcttgacatcttgacatatacactgaaaaaaatgggggttgtatgtatgtgtgtcctacccaaacctgtggccgccacttttgaattctcagattgccctgaattttgccacttttaaataatgtgctgaataagctcagcaactaaaaaccattacccaagaacgtttcttgtgagtgagctgatttattctgattcattatattccttttggtagattttataccccttggggaaataatacaacaaaaacatctcttaaaaatgctgggatggggccatatctactagcagaggccagatggtcagatatgatttctgcaaacccatcttgaccttgagtatgtgaaggggtactgtactttattcctgatacattttggtttccatgtaggtgttgagctcctggttttctgtgtttggatgatgaagatttggacccttccattcataatccctttctaagtgaagggagaggctggcttggctgttccttgttattccgaaagccctggtttggggcccatgttcacactggctctcagtctagtcaggtgcaatgttcttgagaggtggggacctaattattaccagagtagcagcaagagaggaaacgttgtgaattaagtattcaattaaaaggaaacatgatttcta

SEQ ID NO: 21114 - DNA, 620 bp, Homo sapiens
  misc_feature 1, 2, 3, 454: n = A,T,C or G
nnnagtataaccttatgcctagtcccctaccctaacagattttgatttaacttttctggggtgaggcctgagccttgggacttgggaatgtgcggcaaggttgagaaccactaccttaaatgtccctatggagtcagctctcttatgtttacctattcctcggccttcggtttgttcagtttcatcccctaatttatacacttaatacaacttcagtgtcaattgctattaagtaatttttagttgggctgagctggttctcttgtgaaattgtgctggttatctttaagcttatcagttattgtggcctattctacacttgtcacctgtagttcgtccgccttgtacatttgtcacctgacaaaatcttatgtaatctgtttattctccagaataatcaccacaagtgccattttgcaggttttaatatttgttaaaaggcatttttttttanaaagtttgtatcatctcttccaacaatctgtcattactttaagaatataccactttcctttttcctttcttactagattccaagttttatattaatgatccttgatgcatgtttccttttaagcctgggtcatatctcttgtgtgaccttcccaatagttctttgt

SEQ ID NO: 21115 - DNA, 557 bp, Homo sapiens
  misc_feature 551, 552, 553, 554, 555, 556, 557: n = A,T,C or G
tggtatatgtatataattccgtgggcatgaatataggcatatgttaataacaaaacagtatattccatcagtaatgctgtgtcattcttcttcctttccccactattcacaagtaacagtaacaactaccatttatcaatcataggtagatgctaaggggcttttatgcattatctgattaataactctatgaggacagttctattatccggataaggaaaaaggccaagagagatgaaataatttgccaaaggtaacacatctagtaagtgataggattcttccctggcttcctcccactgcaaggcatgtgcccttaattagggtaaatgaagttaatgtttgtaaaatacttgagaggtaaaacatttcctaagtgtggagtgaggtttctgtattcaaggagttctttctttagctagttaaggaaacaatgaatatacatataaacagaaagagtaaatttttttctatgtatggttggagttcacgagaagtcggatcattacttcgactggactagttagactttaatggaggaggcgagatannnnnnn

SEQ ID NO: 21116 - DNA, 608 bp, Homo sapiens
  misc_feature 1, 2, 3, 14, 42, 135: n = A,T,C or G
nnncatgataaaangtcaacatccatgataggtaatgtaacncataatcctgggatggatgtgagaagagcaaagaaaggatcctgggggaatatcagctctaaaggttgagtagagaaggaaggagtgatctanaggtggaaggaggagtaggaattatcatagaaactttaagcttcttgagggcttgtgactgtgtcatgttcatcattttatctgaagttcttatcaacaaagtagctttcagtaaatatttattaaatgaagataaaaattttaagagccatctgcaatgtcaaatgtagcccacagttgaatgaatatgaggacagggaagtgtcccttgattttggtgttaagcagctgattgccaccttctgtagaacagcttcagtggagtctccataatagaaataaatgccaggttgctgaggactaagcgtggatatttgttgagagtggagacagtaagtgcaaacattcttttcagaaagctttgctctttttgaagctttgctcatagggagatacaagatagtaggtagaggggcaggctgtgtttagatgagagagacttcagcatgtttatatgctaaatgtaaaaaaaa

SEQ ID NO: 21117 - DNA, 509 bp, Homo sapiens
  misc_feature 1, 2, 3, 4: n = A,T,C or G
nnnngggtaattggcctgtctgaggtgagtactcttttttttttaaagaaagcgctttaaagtatggaaggcccacagactgtgcatttaattactgttcatatttcatgcagtcaaactgaatttcatttgaaaagaaaatgatttacctatctttaaaaagccttaatgttctgctttgttttgttttgtttttttcttccaggggttatatatttacaaatagaaaaactaaatttatctctagaatttggaaaatcacaggacatatatgttaaataaagattctgaatattacagtgattgaaaagacatttacccccacttaatgcaataatttgaaccagaaaagccttgcattttgaaaaagtttagaaatctttcttttaggtttacaaagaaaaagcggccttcattttatcccttagacttctgtgtcctccacctgctacattacacttcaagaaatttaacttatatcaatcaaaatttgcttcttaatggatgta

SEQ ID NO: 21118 - DNA, 597 bp, Homo sapiens
  misc_feature 486, 495, 521, 527, 537, 545, 570, 585, 590, 596, 597: n = A,T,C or G
acagagactgcagcagtttattctaggggagttggggaagactttcaaggtaagacatccaagctgcctcttgaagtaggaaagattcatcagttaaaatgttgtggaagaaggacatccaaaagggagagcttgcactgaagcagggaggcataagaaatcctgatgagtcaaggaaacggggttttaggatgaatggacttctgagtgtgagatagagaaaggctagagactggtgtgttggatccagattgcagtggccttccgtgtagcctaagaagttttgaacactgcattcaattattcttttatcatttatactctgccttgtttcagaaaggttttcagggccacaagtttgaactaatgtttttttcaataatagggagctaatggaggtttcttaattggaaaacacttggtcagctaattgtgtttgtttgtttgtttgtttgtttgttggagatagggtctggccctggtcancccagcctnggagtacagtgggcatggatcccagnctccantggcaaaccnctggcctncccgaaatcccagtggaatcccccnggccccaggcccccngagtnagcccnn

SEQ ID NO: 21119 - DNA, 538 bp, Homo sapiens
  misc_feature 1, 2, 538: n = A,T,C or G
nnaagactgccaaaaacagcactagtggggaatgcaagctttttatttaattacagggttcctccagaggtagcacgctgttgcgattctctcaagttgcacagaccatcagtttcctctacttccttcaaagcgtcttctgagaatgaacttactaccagaagattttaaggggctgacaggcatgtctgcccaggagacagtaatattcctaccttgacatctagcttggccaagtgctgtaaaacccagatgcgatgggaccaagcattatagttgcttgggtatctccctgctgcttcaccacagacctccatctcttcttgtatgagtcgctgtgccctttctgtgggaattgttcccaagtttcctttggtcacaaaggaaggcaaggaggtttcctgaattagctgttgtagcacccatcgcctgtgaatccatgtttctggactctttggaaacttggttaaggcgagttttcccagatgtaaatccttaattggatttaaagtgccagagaggatcagctctttcctgn

SEQ ID NO: 21120 - DNA, 1268 bp, Homo sapiens
  misc_feature 1, 2, 3, 4, 5, 6, 1250, 1251, 1252, 1253, 1254, 1255, 1256,1257, 1258, 1259, 1260, 1261, 1262, 1263, 1264, 1265, 1266,1267, 1268: n = A,T,C or G
nnnnnnatatgcagcttatttggccattagcccagcgacattgacgacattctagtctcgctcattgctgcgagtgggctgctacagccagtgtccggtccatgcccagcaggttgtcccaggtcgctgtgcgggatgaacagcaagacagcaggagaagtgaaggcgtctccaggagtggcaccgagagagtcagccacagccatagagaagcgatcaggtgtgagacactggaaagacgcgggaagagacgtacaacttctgaaagatctcagaggactggcactggtctggagacggcttcctggaagaggagacgtccgagcagatgccctgtaagtgtggacaagcttcgcattcgagctgcaacattcggtgagcacactctggtgtcaggatcgtagtaacggaagatgggcttgagcagagcaggggcgacctgtggggttcttctcggcagtttgcacgcacgcacaaagctggtctaagctgccatctattcccaccctggacatactgtccaaagccgtccagctgttcctgcttccactcttgctcctctacaattcattctgcacgcagaagtcagaatcaaaatcaaagttcatcatgtcattctcttgacttgtggcttccctttgctcttaagctaaaagtaaaaatcattatcatggctacaaagtcttgtgtggtctgggccacatcctgtgccaggctccctttcattgtctatattccagtcaagctggccttcaaaatttcagcacattgggtctttctgccacaggcccttgcacatacatgcttttccctctgtacatgtgattttctttcatccccgctttccaaagctaactctgactcatccttcagactgcatcttaatgattacttccttctggaagactcccctaattttcacaactagatgagctctcccttatatgttgaaaacaagtatttcttgtgtgaacagaaatgtttaatgtctgccttcccaactcagccacaagctctgtgaggatggggactcagtctttgcatccctcagagcctagcatagtctcagttaatacgtgatagctggagcgtgacatttcattaggaacagtgaggctagttgagaaattatacctcaccagtatataggagagtaccattaggaattcttaatgggatgaaaacctgaattcatgtctagaccctgccacctgctggctgtgctgttttaaataaattgcagatcctcnnnnnnnnnnnnnnnnnnn

SEQ ID NO: 21121 - DNA, 299 bp, Homo sapiens
gcgtgctcctccttgtttgtttccctttcagttggaaggaatggagatgattcctgggtaactagatcctctaatctcttcctgcaggactgactgtgaacacctacttgggtcttgaaccagttgtcattttagcacccaacagttttcccctttctaccttccgcagattagttacatgaagaagcttgttgaaatagttcaaaggatgagttcatgaatccaatcccagaaacatgaataaactgatgactagttggccttggagaacatcttgagtattatcctctgcaatctgt

SEQ ID NO: 21122 - DNA, 1657 bp, Homo sapiens
  misc_feature 1, 2, 3, 1627, 1657: n = A,T,C or G
nnngaacaagaaaattgaccatgagctccacaggctgcaagctcttctcaagcatctgctcagttataacagagactcggatcagttaaccaagtggttggaatcttcccagcatactctgaattactggaaagaacagtccctcaatgtgtctcaggacttggatacaatcagaagcaacatcaacaatttttttgagttttcaaaagaagttgatgaaaaatcctccttgaagactgacgttatcagtatcgggaaccagcttcttcacctgaaagaaactgatacagctacactgagagcttctttagcacagtttgaacaaaaatggacaatgctcataactcaacttccagatattcaagaaaaacttcaccagcttcaaatggagaaattgccgtctcgtaaagcaatcacagaaatgattagctggatgaacaatgtggagcatcaaacttcagatgaagactccgtgcattcaccaagttctgcatctcaagttaaacatcttcttcagaagcacaaggagtttagaatggaaatggactataaacagtggatagttgacttcgttaaccagtcattacttcagctaagcacctgtgatgtagaaagcaagcgctatgaaagaacggagtttgcagagcacctgggggagatgaaccgccagtggcaccgtgtacatggaatgctgaatagaaagatacaacatttagaacaacttctagaaagtatcactgagagtgaaaataaaatacagatcttgaacaactggctggaagcacaagaagagagactgaaaactttacaaaaacctgaaagtgtgatctcagtgcagaagctgctcctggactgtcaggatatagaaaatcaacttgcaattaaatccaaagcactagatgagttgaaacaaagttatctgactttggagagtggggcagtgccattgttagaagatacagcatcccgaattgatgagttatttcaaaagagaagcagtgttctcactcaggtcaatcagctcaaaacctccatgcagtcagttttacaggagtggaagatttatgatcaactctatgatgaagtgaatatgatgacaatccgattctggtactgcatggaacacagcaagcctgtggtgttatcattggagaccttgagatgccaggtggagaaccttcagtctctgcaagatgaagctgagagcagtgaagggagttgggagaaactccaggaggttatcggcaaactcaaaggtctctgcccctctgttgctgaaataatcgaagagaaatgccaaaatactcataaaaggtggactcaggtgaaccaagccattgcagaccagttgcagaaggcccagagtctgctccagctctggaaggcctatagcaatgctcatggtgaagctgccgcaaggctgaagcagcaggaagcaaagtttcaacagctcgcaaacatcagcatgtctggaaacaacctggcagagatcctgcccccagccctgcaggacataaaggagctgcagcatgatgtgcagaaaacaaaagaagcctttctccaaaattccagtgtcctggatcgactcccacaacccggagagtccagcaccacatgccactccgancagggtacgagctcaatcgaatcatggcan

SEQ ID NO: 21123 - DNA, 524 bp, Homo sapiens
  misc_feature 516, 517, 518, 519, 520, 521, 522, 523, 524: n = A,T,C or G
acttttgagtagatgcattgagcctctcagtaatgtgaaagcaggctgcagagatcaccatcccagcaacaggattattctgtttgatatctgttgccaacagccacatttcccagcatcttggatgcaaaagggggtttactgacaaagcaaagcttttacattgggccttacaggcacaggaaaatcaccagctacctcaatgcacagtcccacggtagcattcctccggtcactcttagaaaaggcccaagtcatctgggcgcctggactcacccgccccaagcagagtggccctcatccttcagaatgtggatctgccgaattgaagaggcctgatttcagctccaccagatgcagatttgtgttttgttttcttgttatcactgtcacacagcttataacatgtatgcttttcagaatacagttgtctagccaagccatcaagtgtctgaaattcaatattggtttatgcaaatacagcaaacttttatttaagtagataggagaatatgnnnnnnnnn

SEQ ID NO: 21124 - DNA, 1363 bp, Homo sapiens
attttgtaggtaaaaaggttaacttttccaccagtctgtctggcatgcttctaatgatgtcagagtcactggatcaaaatatagccagtgtgcacacttctgagtattttccgcatgctgtgcccagttcaatattattgccactgtagtgatggacaccagttttagccaacatagcatagtactctatttcagatttcctcaaagctgggcagttgttagcgagaatgaccaatttcgctttgccttgtctgatcatcttcagagtctgcttgtaccccaggacgtacttcccacttttcataacgagttggagcctagagttgatcgactccagcgactttttcgtcttctttgcggccaccatcttcctgcctttctcgttccccggccatcttagcggctgctgttggttgggggccgtcccgctcctaaggcaggaagatggtggccgcaaagaagacgaaaaagtcgctggagtcgatcaactctaggctccaactcgttatgaaaagtgggaagtacgtcctggggtacaagcagactctgaagatgatcagacaaggcaaagcgaaattggtcattctcgctaacaactgcccagctttgaggaaatctgaaatagagtactatgctatgttggctaaaactggtgtccatcactacagtggcaataatattgaactggggcacagcatgcggaaaatactacagagtgttgcacactggctattcattgatccagggtgactctgacattcattaggaaggcatggccagaaccagacttggtgaaacagttaaacctttttcacctacaaaatttcagcctggcaaagccttaaaccctgcaaaatttttcctttaataaaattcgcttgttttaaaacacaccacaaacacacacacacaaacaaataaaaaaacagaacatacagagaaagacaaagaacaagggggggcgcgagcacacaaagaaacacacagagaggcgccaaacaatgagcaacccacgacgttgtgaacgaagggggcaccactaaggaaggagataaaataacaaagcggagggagcccagacgttagagagcaggcagccgaaggtgagggggaaaacgaacgtatgccgacgctgctcgactagtcgtggtggaaagaggacacctattgatgtggtggggcggagacagaaaatgaggtagcagatacctactcccgaggagcacttgtgcataccagcaagcggggtaatactatagaataccagacggagttagtcgtgatgcacgccacggagattattggtggggcgcgaaaaataagttgggtcgcgatttgttgaagaatattgggttgatggata

SEQ ID NO: 21125 - DNA, 585 bp, Homo sapiens
  misc_feature 584, 585: n = A,T,C or G
actttattaatatttttttcaagttttggtaaagtatgaaataactctggattaagaggagaagaactagaacttaataaccatgacatttgggcaaattgtttgaagcctcagtttcctcaacctaaaaataggaattataactttttgaattgttctgttgtatgagataatgacagtgaaatattttggagccaaaaagcaatgcatactattgggggttattattattttttgatctttcagcaagccagctatagtagcttttcctatataaacacagtatgaattcagtgccctcgctttactgaccctcacagcattcaagccctgtatggaccgctgagctctcccttgaagcaccccttagtccagtattctttactattttcccctttaacaatttaaacttctttcaaaacaactggcagtagttttttaaaaaagaaaacaggctactcttcaaattaaaaaaaattgtcttgctttaggaaaaatgttcttctgtcttttccaattatcttatttcttctgcctctcatctgccttgcctaggcagaattattctcaagcctgcacatgcnn

SEQ ID NO: 21126 - DNA, 886 bp, Homo sapiens
  misc_feature 1, 884, 885, 886: n = A,T,C or G
nactcattttggtgccttgccccatggataacaattcaagaatacatcctttccaagagtgagacctacgacaacaaatccaagaaatattcagcaagaaatattaaagcagctagcatcacgctgacattcagttttcttataaatggaagagatttacgttatgctcgtgcctccatctgcacgcacaacatgggaagacaacagacaccaaagatactttggattcttgctgctaaaggtcattttcttctgaggaagtcattcttaaggactgttctgtccccaaccccagctggaacaaggacctaagactgctctttgaccagtttatgaagaaatgtgaagatggctcctggaaacgtttgccttcatataaacgtacacctactgaatggattcaagacttcaaaacccattttcttgttggtctcgcttcctatctcactaagagaaaataaaagcagtcagaagagaactcccagtctcccattgcctcacatatcctcccccctgcatctgtgcctgatgttctgcttcttcctgctacccaaagcttatgaaagaagaacaaatgtcacaggcccagctcttcaccagaagctttgatgatggcctgggctttgaatacgtgatgttctacaatgacattgagaaaaggatggtttgcttatttcaaggaggcccttacctggaaggaccacctggattcattcatggaggtgccattgcaaccatgattgatgctactgttggtatgtgtgcaatgatggctgggggaatcgtcatgactgccaatctcaacatcaattataaaagacctatccctctttggtctgttgttatgataaatagccaacttgataaagttgaaggaaggaaannn

SEQ ID NO: 21127 - DNA, 578 bp, Homo sapiens
  misc_feature 576, 577, 578: n = A,T,C or G
acgcgggatgttaaatattaagaaaaaaagactaaataatggacacctatgtatctgcaaatacgcattcagttgtctttaataatcctttgctaatcttgcttcagatggattaagtgtgcgtgcctgtgtgtggtgtgtgttttacattacagattagaacttaggtcctctggattcacaaccccgaatcccatttgtttttcttcctttccaaagttgtcattatcgtgaatttggtgtttagctatcccatgcatatttttacactactgctataacatatgtagttataaaatagcattgttttgtatgctttaaaactttatttaaatgggaccaactgtttatattatcctgatcttctttcccttatcaacagtatgcttttgtgatttatctgtgatgttccatataggtcaaattctttcatttttattgctttataatatttcatcatatgaaaatatcatgatttatttatctatttccctattgctagaaatgcatgtcattttaaactttttactattatcaataatgtcacaatgaaccattgtgtgactcttatgtgcnnn

SEQ ID NO: 21128 - DNA, 2206 bp, Homo sapiens
  misc_feature 2201, 2202, 2203, 2204, 2205, 2206: n = A,T,C or G
cacgcgtccgctgcgggctgaaagtttctcccggtgcagaattccgggctcagcgacagcctgcgccgagtgtgcgcacctgtcggagacccgccagtccgccggccccggcctgaagttaaatcattttggaaagtgatacagctgtcacgtgtgaatatgtgtctagtgcatccttaacctgaggacttcaccagttcgaaattacagttttcaccatcaactaccttatcctttttggtctggttttcttcctcaaacagtggaaacatttttaaagttgcttttgttgcagagttaaacaaatggctgatagtggcttagataaaaaatccacaaaatgccccgactgttcatctgcttctcagaaagatgtactttgtgtatgttccagcaaaacaagggttcctccagttttggtggtggaaatgtcacagacatcaagcattggtagtgcagaatctttaatttcactggagagaaaaaaagaaaaaaatatcaacagagatataacctccaggaaagatttgccctcaagaacctcaaatgtagagagaaaagcatctcagcaacaatggggtcggggcaactttacagaaggaaaagttcctcacataaggattgagaatggagctgctattgaggaaatctatacctttggaagaatattgggaaaagggagctttggaatagtcattgaagcgacagacaaggaaacagaaacgaagtgggcaattaaaaaagtgaacaaagaaaaggctggaagctctgctgtgaagttacttgaacgagaggtgaacattctgaaaagtgtaaaacatgaacacatcatacatctggaacaagtatttgaaacgccaaagaaaatgtaccttgtgatggagctttgtgaggatggagaactcaaagaaattctggataggaaagggcatttctcagagaatgagacaaggtggatcattcaaagtctcgcatcagctatagcatatcttcacaataatgatattgtacatagagatctgaaactggaaaatataatggttaaaagcagtcttattgatgattacaatgaaataaacttaaacataaaggtgactgattttggcttagcggtgaagaagcaaagtaggagtgaagccatgctgcaggccacatgtgggactcctatctatatggctgttattacgtggagaaccaccctttttggcaagctcagaagagaagctttttgagttaataagaaaaggagaactacattttgaaaatgcagtctggaattccataagtgactgtgctaaaagtgttttgaaacaacttatgaaagtagatcctgctcacagaatcacagctaaggaactactagataaccagtggttaacaggcaataaactttcttcggtgagaccaaccaatgtattagagatgatgaaggaatggaaaaataacccagaaagtgttgaggaaaacacaacagaagagaagaataagccgtccactgaagaaaagttgaaaagttaccaaccctggggaaatgtccctgatgccaattacacttcagatgaagaggaggaaaaacagtctactgcttatgaaaagcaatttcctgcaaccagtaaggacaactttgatatgtgcagttcaagtttcacatctagcaaactccttccagctgaaatcaagggagaaatggagaaaacccctgtgactccaagccaaggaacagcaaccaagtaccctgctaaatccggcgccctgtccagaaccaaaaagaaactctaaggttccctccagtgttggacagtacaaaaacaaagctgtcttgttagcactttgatgagggggtaggaggggaagaagacagccctatgctgagcttgtagccttttagctccacagagccccgccatgtgtttgcacaggttaaattgaagtgtaatctccaaaggaagataagtgacgtgcttaggacggcacataggttggactggctgcagtgaaatcactcagaagtccgaaggttttaggagcggaaaaccctccataagggtttgcaccacttgccatttattaaattattttggccgatttttgggaacacagggcatatatggggggaacaatattgcgtggcaagaagattgaaacaatgaccgatcaaggagaaacaatgcgtgaatggtagtaaaaatgataaagtgcannnnnn

SEQ ID NO: 21129 - DNA, 894 bp, Homo sapiens
  misc_feature 1, 893, 894: n = A,T,C or G
ngaattgtaaatgtattataaaatagatttttaaagtaaaaaagctttttttttttttttgggtcagcactgacaatggcctcatatagagctcttcttcagcacattcaatacttaatcttatcaattttattatgaagttaattaaactaatatgtatcaaacgtcatattaattatgttgaatactagctaagagttaagaaatgtaaggcatgtgtcctatcttcaaggagcttaatatagttggggaggcaactataaagaaatgagatgattggttcaacttatgaaatgagtcatagttttcattccagaagtatgactctaaacttaaaacgtgtgacaataatgaaaaataattcctaacatggtacataattatcaaatgctgtgagttcagaaaagatgtttctgagtaattaagggattggggaggaggaagaccttgaaaaaccccgtgtgggatcatttagaagctacaaagcattgttagaatgaagagattcgggtgttagtctcaattctaacaaattaaggtagttaattctatcaaaaactggcagtgtaatgttgagcaagttactacctaggcctttactttttcaaggaggctggattctgatctatgagttattttccaccagaaacctttcagcgatagggagtttggctgcacagtcactgttccaaaatacagaaactgtggggttttttccctaccaaactaaaagtgtggggagaataaataatggtggagggagtcaaatcaggaacagtgctatgatctcaaggagcagatcatttctgatattgtcagggtcctctttgctgattctagtttgttgttcattttactttccttcaaacaatttagactgtcactcttcatgnn

SEQ ID NO: 21130 - DNA, 4157 bp, Homo sapiens
  misc_feature 1, 2, 3, 4, 5, 6, 7, 4156, 4157: n = A,T,C or G
nnnnnnngatttaacctgactaatattgacagatgctttacccagatcattcttagagcttgatttctgaaacatggggagcttttgcagcaatttttattctgtatcgatggggcatcatccttgagataatagtaagtaatcttggtcctgaaatcattacaatttcatattgaattgctttatgttacttcctctattatgccaggcttctgttccttggtttttttttttttcttttctgtttggttcttctaagttaaattccttctggcggtataaaatagatgttaagtttatgtgctctggagctggagtgggttcaaattccaggtcagtcactcactagccatggagcctcggcaattatttctgtgattctgtttccccatctggaaataatgatgataataccacttatctcatagcattgcagtgagaataagatgagtcaatacttgtaaggtatgtagcacaatgtctaacatatagtaagcactatgtaagtatgggctattttatataatatttccagggcatatgagaataggtgagcaagatattgcttcttcatttgtcactagtagttttcaacatcactatgattatcaaattcccagaaaaaatgtaataattcattgggcatttgttagctttgatgaatacttttcagaaggatttcttagttcttttaatgtgtgatgttgaaaataggttgtgattacagtcattcttgtctttgggtagtgaacattaagtcaagttgaaacattattcaggctgataagctaagtgcagcagatattatagccattgataaattaatatttactgagtgagcattcagaggtagaagttgctaatttctatgttagatactatcttatgtgtctatattgtccttgtcccttttgaaatattcttttgagtgacatattatggccatttgataccattcaagtgaaatatttctgtatcttttgggttttgacagttgaaatattgattatatgtagtttagttaactatatattgttatgcatagttataggtcatacatatgtatatatttaattcctatttggagttttaatagtgtcctagaatgttctcctcattgtaatcatatttaaaaaccattttatgcccaaaataaaaaaagaaaaccccacgaaaccccctaaagccttaaaataaactttctttgatttcttctcttttggtttgtgtttctgtttttccagaaaatgttcctgagaaagatcttcatggaagactttttatcaaccgtatttttcatatcagtgctgacagaatgtttgaattgctctttaccagttcacgctttatgcagaaatttgccagttctagaaatataatagatgtagtatctaccccttggactgcagaacttggaggtgatcagctgagaacgatgacctacactatagtccttaatagtccacttactggaaaatgcactgctgccactgaaaagcagacactgtataaagaaagtcgggaagcacgattttatttggtagattcagaagtactgacacatgatgtcccctaccatgattacttctataccgtgaacagatactgtatcatccgatcttcaaaacagaaatgcaggctaagagtttccacagatttgaaatacagaaaacagccatggggccttgtcaaatctttaattgaaaagaattcctggagttctttggaggactatttcaaacagcttgaatcagatttgttaattgaagaatctgtattaaatcaggccattgaagaccctggaaaacttactggcctacgaaggagaaggcgaaccttcaaccgaacagcagaaacagttcctaaactttcctctcagcattcctctggagatgtgggcttaggtgccaaaggggatattacaggaaagaaaaaggaaatggaaaactataacgtcactcttattgtggtaatgagtatttttgtgttgttattagttttgttgaatgtgacactgtttctgaagctgtcaaagatagaacatgctgctcagtccttttaccgtctccgcctccaagaagagaaatctttaaatttagcctctgatatggtgtcaagagcagaaactattcagaagaataaagatcaggcccatcgtttaaagggagtgctccgagactccatagtgatgcttgaacagctgaagagctcactcattatgcttcagaaaacgtttgatctactaaataagaataagactggcatggctgttgaaagctagtgatctgaaggactaaaaccgcagagatacttggaacttaaagaaaatacctggaagaaaaccagacgaatgaaggattttggcatagaacatttctatgttttttcattattgagatttctaatatgaacatttctttcagtaacatttatttgataattagtttctgctggccttaataatccatcctttcacttcttatagatatttttaagctgtgaatttcttcagtgaaccatgaaatatattatagaactgaatttctctgatacaaaaagaaaatgacacaccctgaattgagtggtatggtctcatttctacagtgaagtctgatgctttgttagcacagaatccgtacatgtccaataggtcgcttttgtaactgagataagaccaagaggataaacaggacaatataagaagaaacctctatgtcattactgattttaaaggttctgttttcaggcatataacatttccaggtttgtgtactgtaaagattataatgtcttcatttatttagcatgcaaatttaatagtcaaactttttgaatctgcatgttgatgatgattatcagaaagggtcttctgccatgctgtatctttatgaaagaaatagttgttttttcttaaggtaactatcagaggtgggattatcttgcctcctcacttagaataccaacagtcaaaaggaagaaccatcctctgagttttaaaaaccagaaggttatgttaaaatctgggcatttagtgacagatcaaatgcatacttgaactaagattggcttcagcttagcagtctttcatggtggaagtgacacatctggttgaaaataatttgtgtattttcagtaaccatgtatggcttccttctttatgtatgtgtgtgacttgttttgattggtaagttataagccagacatagattttagctctttaataaaaacttcaggggcacgtatgtcccagtacaagtgtactgactatcaagttttaactcagatgcaagctttggctctttcataaaaagtttttatgcatatgtgtctccatacaagtggctcattaaaataagaactttgtaaactgacttaaaatcagatattttttcaagagttagggaaagttgaagtgttttactgttttgtctcttgagccctttctctggggaaaaaatacatatccatctatctatctatatataaactgtgtatacattcttactgtttgaacaactattgcctttaattaaatgtttcatttttctccagagtccccaaagccacatggcattattatagtcatttttgagatgcctgtagagaatgaaagtattgactccgttagagggaaaatgggtttctctgggtgaattccaacgaagcatacctaggggtaacagtgaacctacctgggtttgttttgttttggtaaggatttatgtagtgtctggctgtaagcaagaatgagtggattataaacttgaagatttctctgttaaagtcacaaaaatgatcgacaaacaatatttttgtgatgtttatttaaacgttgtattttataacatacttcaaggaagagtatcgaagtaagttgctttataaattaagactaaattcgtatggatgcagaattcaattaataaaatttgagcctgttacgtaaattgaatattaataaaattgaaaattttgaaaaaaaaaaaaggggggggtttaaatatcctagaggggccaagttaggtaccaggttctgtcaagtggcctatgtagtggataaagaagaggggggttaaagtcgaggaaagtgtggatttggagactcttgggggtatggacccaggttagcggaaaatggtagtgacgttgggaggann

SEQ ID NO: 21131 - DNA, 710 bp, Homo sapiens
  misc_feature 1, 2, 3, 4, 5, 6, 7, 8, 705, 706, 707, 708, 709, 710: n = A,T,C or G
nnnnnnnngattaataatttattcttttggatatctatatttaattgtttcaggtgattccatttaagcttttcaaggaagacactgacattactaaattgttcagcaatgcacagaatttgaaaatacacttgaaaaatagaactttgatataaacttgtaaaatacgtaggatgtataccactgattaaatcaattaaaaaactccattcccctattcagtgctgtgttgggtagaaaaggggtaagtgaacaaacaagtggaaaagaaagttaaggaagaacatagagaaaaggattgttttgcgcagacatctggctttgcttccccaaagctactgagtacaaaatttattgcggtaaagagattaaaactatttcttatgtaaaccaaaatcaacatttgtttcacttgactaccagtagttggaaaaactatctattacaaatgcaaattctggacaaaagaccaatgatggtccttgttcaagtcagtaaatgtgctcagaccaccaactgtctaaagcccttcctgtgcccattcaccaagggctatctccattgggaatcattcttcatcatcaatataatgatcagggggaaactctgctatgaggcaagggaccagtttctaggcagaaaacctggaggacattttacgtattttaaaagaagccgattaaccctaaagcaatctctgccacnnnnnn

SEQ ID NO: 21132 - DNA, 469 bp, Homo sapiens
  misc_feature 445, 469: n = A,T,C or G
accagcttataaataccagcttctgttattgataagtagaaagatgaatggaaaacaaaaatactgtataatcaataggccaacagctagttttttgaaaagaccaatatgatacagaaaactcaggaaaaaggagtaataaaaatcaatatgctaaaaatgaaacagagatataacaatagtgatttttttggggaaaaatggaaaggttttacatgaaaaaatataattactcttaccgaagaataaagaggaacttgaattgaccatgaaacaatttgagttcataactaaaaaaagagatatgggccaggcgctgtggctcatgcctgtaatccgtgcactttgagaggccaagttgggagattgcttgaggccaggagttcgagactagcctgggcaacatggtgagatcctgtccctaatacaaataaaaagcaattanctgggcatggtggtgtatgcctgn

SEQ ID NO: 21133 - DNA, 893 bp, Homo sapiens
  misc_feature 1, 2, 3, 4, 5, 6, 7, 8, 399, 400, 401, 402, 403, 404, 405,406, 407, 408, 409, 410, 411, 412, 413, 414, 415, 416, 417,418, 419, 420, 421, 889, 890, 891, 892, 893: n = A,T,C or G
nnnnnnnnaaacgacccatctcaatcacctagtttatccccagggaatacactggcatagagagcctatttacactaataaactaccaagctttgttgttcataataagtaaaatggacttgcattgctctcttttttggacaacttcatcaatgctttttgaattatatgtttcaacaaatgaaacgacagttatccaatcagattcctgaaaatgaacactgaaccgttaatcatactgatatgtacaacaaagtgaaatgcaaaaaaaacaaggtatgcctgtatatgtctttacttgacaaaataagcagtcagatactatgtatggtagccccacagtttttaattgagccacgaaatcccagggtctggatatcactgatctatttattcacnnnnnnnnnnnnnnnnnnnnnnnaacataaactcagaccccaaggtttctataaactcacaccgaaccagctgcggggtagggattagagagagatctccaatcttccaggttcaagttctccacttcattaatagcatagccaccagcttttgcaacgtaaatactgaactttacacccatcttgtaaagtatgaatcgaaggtaagtgtattaaaggaattatatggtaaattcttctgtaatctaaaagggatctagttttaaatgttggatttttctaaaataggattcacccacacagtatttccttggtattgcttcacatttctggtgtgaaagagtaacggctgctcttacaactgtttgtttttgtttgttttgggacggagctcactctgtcgcctaaactggagtcgcaatggggcaatctccgcctccccggttcaagcgattctcctgcctcagcctcccaagtagctgagactacannnnn

SEQ ID NO: 21134 - DNA, 509 bp, Homo sapiens
  misc_feature 1, 2, 3, 4, 5, 6, 7, 8, 9, 10, 11, 12, 13, 14, 15, 16, 17,18, 19: n = A,T,C or G
nnnnnnnnnnnnnnnnnnngatcttctgtgaagccctggcttgacttttcctgaaaacttttcctgtgacagtgcatgtatcacaagatggccctaatgtcctttttcagtttctgtatcccatacggtataccacatcacatttagttgccgtgtatcttgactgtaataatttttttaaaccttctttatttctgaagaccttgactgtttcaggagtagtggtcaggtgttttgtagaacgtgtctcaattagaatttgctgacttggtctcacagttagcatttaaaatttaattgcccagatatataacgatctaccactacagcggtagctattagtgcattggggtaattccatggttgattcattttacttttgcagctgaaaaaacctcatgctgagcagagaggcatctaatttgctcatcatccatgctaaagctttttttgtctattagctttgacctttatgacccattggacatttatgcctttaaatgaatggt

SEQ ID NO: 21135 - DNA, 1283 bp, Homo sapiens
  misc_feature 1, 2, 3, 4, 5, 1273, 1274, 1275, 1276, 1277, 1278, 1279,1280, 1281, 1282, 1283: n = A,T,C or G
nnnnnataataatatattttacaagttaaagaggctttgcattgtaaaagataattttcaacaatatagagaaaagagctgagaaatttcagaatatctttctatctgagtacactcaatttaaacacatttgatctctagtaggtcttaggagttgggtacaaatgttcactgtgaatgcagaaccaacatgaatatgcctccaccataacagcacacttctgtttatatgatctacttgggtccttagaccagaaatctttttctaacagagaagcctatttaatatcatgacaaaaagctcagtacagccccatgctgtcgtgacaatcacattataacctttttttttttttttttggtgggggtagggtggcaaacaaaaattaaattagtattaacatgacttaacattgctaagcttctctttggatcccatgtttctggttctccaatgccactaatggaaaaagagtatggccacaataactagtctttggcatataatccttaccaagataagtggaaagattcaaaacctcactaatctatttttttctgttctaagaatatccacagtttcccaaatgtgattatgcatccccctcacattttcccttttcactaatgtcacctaaatattcggctctatcctattcaggaaaccaaagttcagagacataaacaaaagaaaaaaaacccacaaaacttcctcaagtcataggtccagtaataaggtaagctgggaatttaactcacattttctgacactaaaactattgttcattctcctgcactaagcttctaccataatttatacacaatggactttacctaaggttaatataattttgcaatcactagacaattgggatcatcttcctctatctctgaaggttggttctattcggattatgttgtggttgagaggttttattacagctaccatgtatttaccctaggctgaaataatgcaagcaattttaatggagtgccaattatatgcaaatttctgtcccagtactggtggagaagaaaacaaacatttatgaataaaatcatcatcaaaggatctctttgttcagatttttagagaataatataatattgcagatgcaatcttaccttcagatattacattgaaatattgccagtggcatggcatctatccaataactggcttaacttcccctaaatacaagctatgctttagttaaacaaatatttattgtgtgccaacccccgcgttaattaattctagaagactttcgannnnnnnnnnn

SEQ ID NO: 21136 - DNA, 629 bp, Homo sapiens
  misc_feature 1, 2, 3, 4, 5, 6, 7, 10: n = A,T,C or G
nnnnnnncgngaagtcttctagaattaattaacgcgggggataagttaaacttaaattttactctattaaccaatatgagtgtatttctgaaagcatagttacgttgaaataaagttttaaaaagcgaaaatatgaaagaagaatcagtatgaaaaatatctatactttatgtatattttatatatgcatggccactctaggaatgttttaataaggcagaattttgtttaatcatgatatgtgttatgataaaatatttgctctcaaccaattctaaaacataaaaggaaatttctcactttctatattaaaagtcaaaatataaaataacaaaagaaagagttaaaattaagcaaaaaatatgatacatgaccaaaccgtgtaacaattatatatacccaactttagtaatatatttgtttacatttattgtgcactctctctgtgtgagaaattatatggaaattatatgttcatttacttctcactgtttctttgctttgcatgtggtagtaactgtctataaacttgagggtacacaaacacttcatttatagctttttaatttgaactaattttagacttatgaagaattgcaaaagtagcacagagatttctcttatatctc

SEQ ID NO: 21137 - DNA, 174 bp, Homo sapiens
  misc_feature 174: n = A,T,C or G
acgcggggtcattggtggcggaggcaatggccggcaaccagctgtaagcggggcacggaagacatatgcttgtgagacaaaggtgtctctgaaactatggatggtacacattacattggttttgtattaagaaatgggaaatggataaagtttttcaggcaaatctaattgcan

SEQ ID NO: 21138 - DNA, 547 bp, Homo sapiens
  misc_feature 1, 2, 3, 540, 541, 542, 543, 544, 545, 546, 547: n = A,T,C or G
nnngcagcggcacaatcatagctcactgtaatcttgaattcctacgctgaagagatcctaccgtctcagtctcccgagtagctgggcctacaggcatgtaccaccatgcctggctaattttataatttttttggtagagatgagttcttgctatgttgcccagaatggtcttcaactcctggcctcaagcgatcttcctacctcagcctcctgaagtgctgggattataggcatgagctaccaagcctagcctatatggtgtatttcatcaaacctaagacactgttgatcctaagatgcacccaggttttagagatgttaaaatgcacctccacctccacaaaaaagtatgctttttagaaatgaaaataaccactacctactcagaatctttagataaaaaatgttgtcaggccacaagcagaggggcttccctgcctctgaccttcttcacacgggggtttgttgaaggtgctggtgagacccgcttacagagccatccttttgggaggctacccacaccccagatttctagtcaannnnnnnn

SEQ ID NO: 21139 - DNA, 503 bp, Homo sapiens
  misc_feature 503: n = A,T,C or G
ggtggcggccgcccgggcaggtacgcggggacctgctgtgctcttgcttgcacagtgtcctggagctggacctggctctgggtttccaggaagcagtttgactaaaggcagcaagctgcttcctctgctgcctgagataccagaaccatacagaaagacatgcaaagcacaccaaattgtctacagcttaagatcaacaaaaatcctttttcattaattataaattcacagagaatataaacaatgatccttattatcccctttactggctcacacagggagagagaagccaaaagcccaactgattcccaatggcgaagattgagaaaaacgctcccacgatggaaaaaaagccagaactgtttaacatcatggaagtagatggagtccctacgttgatattatcaaaagaatggtgggaaaaagtatgtaatttccaagccaagcctgatgatcttattctggcaacttacccaaagtcaggtacaaaggccgccaccgcn

SEQ ID NO: 21140 - DNA, 724 bp, Homo sapiens
  misc_feature 1, 2, 3, 585, 722, 723, 724: n = A,T,C or G
nnnaacaagtaactttttttttaattttaatgtagaaattggatgagcaaaagaaatggttagatgaagaagtagagaaagttctgaaccaacgccaagaattagaggagctggaagcagacttaaagaaacgggaggccatagtttctaagaaggaggctctgttacaggagaagagtcactggaacaagagttgtctgaaaagaatgtgcagctccagaccagtacagctgaagtaagtcagtattctttggaactggaggtgctgtatgatggatcacttgagtgatttcctcagtctttttcacataatcataaatattatctggtaaacttggttccttgagattttgtcagatgtagtgagttcacctggcacttatttggcaccataaaccacgctggactagagactgagatatccttacatagtggtccatggacatggccccttcctggcactgccaggcatttggaaactattactttccttgagtatatttgcctcctcagctggggtttctcgtctgaaatcacagaacatagaaaatgatttgagggactcttctggagggcacctgactnttctctatacatatttcttgaatgatactaggtaatttattacatacaagagatgcctaaggaattaggggttaattctttccatgaaaccttggtttagaaggcccagtgtccatactatgtccagccaaatagannn

SEQ ID NO: 21141 - DNA, 793 bp, Homo sapiens
  misc_feature 786, 787, 788, 789, 790, 791, 792, 793: n = A,T,C or G
agcatttagctgggtgcagtgacacatgcttgtaatcccacctattgaggaggctgaggtaggaggattgcttgagtccaggattttgaggccagcctggggaacatagcaagagcctatcttaaaaaaaaaaaaaaaagcttttcaattattttaaattttctaattacaaaacaattctttcctgtcttagtttagtttactttttactcacaaagttcctggaaggtagttattactcaatatttgaatgcatgagtgtcaactgcaaaatctatgcattatgtagtgatttgaatcaattagtctttcttgatactccaaaattaccctttttcgagtgtctttatcagaaatttgataaatcggaactttcctgtctattcataaacaagagtggtgacttagaaagacacgcactccagagtggggcttctgcgtctcccttgtcgtgcccctttgtgagtaatgctttccccagagaactgcagaaaatgatcctgctgagctacagggtttcccattcattgggttccattccagtccttgcaagttcaacagcatctcagaacattctagtaagcttgctaacggcgtgtgaaaggttgatcttctcatctaaagcttttaaatttttaaaatcgaccatgtgcagtggctcacacatgtaaattccagcactttgggaggctgaggtgggtggatcacctgaggtcaggagttcaagatcagcctggtcaacatggtgaaaccctgtctttactaaaaattcaaaaaaatttaccnnnnnnnn

SEQ ID NO: 21142 - DNA, 719 bp, Homo sapiens
  misc_feature 1, 2, 3, 4, 5, 6, 719: n = A,T,C or G
nnnnnnatgatgttcactccagtcgagctgcacaagagcctcaacaccaaggtctggcaggaccacactctggcctgggacaccattttcaaatcagtcaaagcttgtatcgacaaccggttagagaagtattctcagcagcctagtgcagatttcctttgtgacatttatcaccagaatcggctttcaaagaaagaattgtatgctgctgtcacagagctccagctggctgcggtggaaacggtaagggtgggctggatttgagtttgctaaatgaacggtctgtaccatttttagatgacagattttaaatagtaattcatctcattcatttcactgggattcactagcatcaactccacaaaaatgaaaagtctcatactagatgccacggtgcctccgcgcacagcatctatgccacggtgcctcagcgcacggcctcataccagacgccacggtgcctccatgcacgggcttctgtgcttaaactctgggtaggaggagacttcatgtgccccagtgacaaaaagccagagtaggatgtgatgagtgccatgatgtccatgcaaactgctacgggagttcaggagcagtaaagttctctgccctggcaagatacagaatccagatttttcaaaattggaagtattttgttcagttgcacatgttaccccaaagtgcctaactgtggctgttacttacttgtaaaaaagtcgacn

SEQ ID NO: 21143 - DNA, 1762 bp, Homo sapiens
  misc_feature 1, 2, 1748, 1749, 1750, 1751, 1752, 1753, 1754, 1755, 1756,1757, 1758, 1759, 1760, 1761, 1762: n = A,T,C or G
nncacaagtgctaaaatctgaagaaaggaagagcagttcataaatgcttatcttcacattgttcattgggctgccctaacctcccctgctcccagagaatgccagatggctttacaattgaggtggttcaaacacagaaggccctttttccttttattaattgctcagctatgtgtacattggcccccacacctgccacctgaccagcgcggcttctgcctccctcagcactgccagccgggggttttcttagactcatcccctgggccaccttccgctcctctccctccctctgcattaacatccaggccaccctcattactccttggcaacctagcttgggttggcctccccagccagccttccagactattctttctctcccttgcggcctgtctttgcacaccaactgtggccaggtcagtctttctgagaataccatttcctcacatcatggccctgtttacaaagcagtttcccatttgcctatcacatcagatcaaatcagaactcttcggctctggattgaagccgacgccactgttcctggcaagcctcattgccctccgcatcccggcgttggcctccgtccctgtcaggtcttgtacgatgctgctctctgccatcctgccgtctccagctctgcctgcatgttggtcctgctttgctctccacctcacagactcttattccacggctctggccagtccaaagcatacatggcccagttagttcccttttacttgaaatattccctgaggagcccccaggtatttttccttactcactggagacttgtagtcagggccacactgatgtcatttgggaattatttgcaaagtcacagatctggacttctctctccagctaaatcatgagttcctcagctaaatcacgggcccacagttctgcagcagctggtaaacacttttagtcacggaaggaagcctttttcggttctcagctctgcaaggaacttatttcacgtacacaaaaccacaaaccgtgagaggattgctgcctgtatcctggtcccctcatctttttttttctttgaaaagatggtaaagctgattataagaatttaaataacgtggccctagaactacactctgactctgatccgcgtgtcctgcccacagcaccaggccacgaagacagaccatgtcgctatcctcacatttgcttgtaacttaggaggcttgccagtaaaatcgatactaacagtggacgtacttctctttgaataagtttattctatttccttctcccattttctttatttgttgaaaagaatggtgctgattgagaagccaaatattgttaaccattttccccgtctggcacggttcttttgcacagcactggattaggccaggggactggcctaaccctgcaaatatcaggaaaggactcttctagggaaagtcgtactaatttgaattgatcactagaaatacatggtctccacctaaaagatgctttgtcacttaaaaggctgagtagtcatcataatgtaaagaaacctctattgtcatgcaaccatttgcacccagacattgtgcctggttggcacttaacattttatcacttgattctcacaccacccttgcaatgtgatgaaaccaaggctcctaggtgctaagtgacattcccctagtcacgcagcctagtgctagtcacgcagcctagtggtagagcgaggattcaaacccagtttttgttttcctttgagctggagctgcaannnnnnnnnnnnnnn

SEQ ID NO: 21144 - DNA, 921 bp, Homo sapiens
  misc_feature 1, 2: n = A,T,C or G
nnctctgggtctctgtctcccctcctctctctgtgtctctgtcccccctcctctctctgggtctctgtccccaccccgtcccccaggtctttgcacaccctctctgtcacagtgtctcttctgaatctgtgaatgtcactcctcgcagtgagtacaccgtgcacctgggcagtgatacgctgggcgacaggagagctcagaggatcaaggcctcgaagtcattccgccaccccggctactccacacagacccatgttaatgacctcatgctcgtgaagctcaatagccaggccaggctgtcatccatggtgaagaaagtcaggctgccctcccgctgcgaaccccctggaaccacctgtactgtctccggctggggcactaccacgagcccagatgtgacctttccctctgacctcatgtgcgtggatgtcaagctcatctccccccaggactgcacgaaggtttacaaggacttactggaaaattccatgctgtgcgctggcatccccgactccaagaaaaacgcctgcgatggtgactcagggggaccgttggtgtgcagaggtacacttggaagagggccaagtgggcaacttgagaggttaaactgcatggtttgagttttgatttgaggttttacgtgttggcatgcattcaggggcttgtgtcccttctcccctgattcttccctccgggtaggagggaagaatccacctgagcagtggcctgccagcacttgagaggctccgcaagcacaagtgtgtttatgggagttgtgcacatgctcagttgaggcattcttcccttaccagtcgagtgtttctagaggaaggtcatagactaataggctaatagtctatgacctttaatcatactagtgcacatgcctgagcccactcacctgtgaacccccaaaatttg

SEQ ID NO: 21145 - DNA, 2030 bp, Homo sapiens
attaattaacgcgggggggctgcaggagaagatggcggtctccacagagtcggactccgtcacccaaaatggagtgtagtggcgtgatcttggcttactacaacctctgcttcctgtgcaagtgatcctcccgccttagtctcctgagtagctgggactacaggagttaaagttcctcgtaattttcgcttgttggaagaacttgaagaaggacaaaaaggagtaggcgacggtacagttagctggggccttgaagatgatgaagatatgacacttacaaggtggacaggcatgattattgggccaccaaggacaaattatgaaaacagaatatatagcctgaaagtagaatgtggacctaaatacccagaagctcctccgtcagttagatttgtaacaaaaattaatatgaacggaataaataattccagtgggatggtggatgcccggagcataccagtgttagcaaaatggcaaaattcatatagcattaaagttgtacttcaagagctaagacgtctaatgatgtccaaagaaaatatgaagcttccacagccaccagaaggacaaacatacaacaattaattttagtggatctcaaacttgtcttaaatcaacaaccttctactcatgttaatgtcttgacttaaatatcacaatgcaaaatacacatttaagtaaaaagaatttcccagctgggtaaaacatgacctggacattctgtaacgactatatttcatatattgttacaccccattatggttttcaggtcaccggcggacacgcgcacattctccccgaaggcagcttacatactgggcgacaaaatcgacagggacggggacgacgaggcacgcgttcacgcaaacccataagaggtcccacttagaagcgcgaaccgcaacatcgatctcgtgctcttcgatctgaatgtgtatctactgccgcccgctcgcatccccacaacgctactcccgtctccaccgtccgaccacgcacgaccccccgccgcgccgcactcgcgccacgacacgcgacaccaagcacccgcaccacacgacgccaacggccagcagcccaccacacgagcgacaccacgcacacacccgcacaccagagcgccagcgaacaccagcaaggacgagagagcagaaacgcgagaaagacacagggcgaggcacgacgacgccacgccagcgccacaacggagaggcaaggaccgacgcagagggccgaaagcgcccgaaaggcgagaagagaggagaccacgcgaagacgaacgcccgacggcgagagagggggccggcagcggccgcaagcaggagggggaggaccggaccggcagagggcgagacagacgccggacgaggcggccagccgagacgcacggcgcaccgcacaggaccgagagcggtagcaggcggagagcgcggggagaccggagggagccggacgagcgagagggggcgggagcgcggccgcgcgcggccagacacgtacggtgagacgggggcgcggggaagaggagcgtgggaggacgagagacagccagcgacacgcgccacgcgcacgcaacaacacagcgaccggcgggcgcgcgcagacggggagcgaggggaagagcgaggcgagagggacgcgcgacggcgaccgcccagcgagacgggccgcgagcggcgacggagacaagcaaggccagcgagcagcgcgacagaggacagggcacgacgagacgaacggagagagcggccagacaaaagacgagaagagcagaagcaggaacaagcagcgcgagaaggacgggacacggagacgcgggcgacaggcggagcgcgggcagaaggcgccagcagggcgcgcggagcagcgccggcgagcgcagcggccgagcgcgagcgcacggagagagacgacggcgtagcggcggacaagtgaagggagcgagacgaggcatgcacagcgagcacacaacgcgcagcgcgacgaagaggacggagcgagagtcgcgcgcaccaccgggcagcgacaca

SEQ ID NO: 21146 - DNA, 1180 bp, Homo sapiens
  misc_feature 1, 2, 3, 4, 5, 6, 7, 8, 24, 1179, 1180: n = A,T,C or G
nnnnnnnncgagagtacttctagnattaattaacgcgggtgatggggctagtttgaactcaggttctgactgctaggatgggacagtttccctctggctggggctggtctaaatgttccctccatgggcactggctgaattctgccccatgttgctttctgctgtgacaaggcagcagtgagttacaatgcaaagtctcacaattactgtgctctccctcccctaagcacacagattctctctcggtgtcacgaggctgctgctgggggacgggggtggggtggtgtaggcaatccaagactgtctttcctaccatcttcagtgcctttctccttgatacgctgttaaaaccaggcactgtgattgcttacctgatatttgttttttatgaaggggctttctcgtgtggatagctgttcaatttggcattcctgttggggggtggacagtgattgctggagggttttatttggtcgtcttgctccacctcatttcctgacatagaatttttggttggagatacttttcaactggaattttgaatgggctacttcattgattgtttatgttcattgcagctgttaagatatctgatgcctgtttatcttaatttgggtttcaccaaaagctatgcttagtagatgacgagctgagaaaaggacttgggtgcaagtatttcatttgggaattgacctcggaaattaggggcaggtaagacataaggatgagaaaagtcaataaggaaggatattattgaaaaagttactcctgtgggcaactgcactcagtcctgctgggaccctctcagagcccatgaaacacaccttagaattgtcccatgcaggatcaaggaaactgggatgtctgtctcccaattactgccctttgttgcttgagggttttacttggagaattacctccctggcactccagcccatcccatactcaggctgaacatgcttctctggccagagaagagattcaggcagagaaactcaggaacttgaggtagaaagacctcaaaccatatgagaactgtccaccaaagctgccatagaactttggcttgggctaagaagttacaaaccttatgtgcataacattagtagcaacaaaaaaaagcactgacatctcagatcagaaacaaaggtagagacattctgcagagtagttgaacann

SEQ ID NO: 21147 - DNA, 507 bp, Homo sapiens
  misc_feature 1: n = A,T,C or G
naggtgtgatgtcaacagcatgttagaaggatcaatgggaaggcaatgattgaaaacatttcaatgaaccttaatagtgttcctttgaggagcacccaggagaatatctggtcatagatctttttttaaatgcagttttataaaaccctaacagcggtgatatcattagactgtatgaatcagttttattacctagtgtacaggtgcacaataaaaatgtatgcatacgttcacatacacacatttttacataggaatgtttctcattaaatacacatttagtgaacttaacacagacactactgtggcctaaaggccatccccaagccccagggccagaagtgccctagaaagaaataggtatagatgtggaaacattatctaacattcaaattagcactctaattatcagaaatgatgacataatgaggaatactcactttaatatttctaaaaaagatgtcattaatctatactaaatcatttgacagccttattcacccgcgt

SEQ ID NO: 21148 - DNA, 400 bp, Homo sapiens
  misc_feature 1, 2, 400: n = A,T,C or G
nncatgagggcgtggctgttccagcatctaacacacccttacccttctgaagaacagaaatagcagttggcacaagacacgggactcaccatccttcaagtgaacaattggtttattaatgcccggagaagaatagtgcagcccatgatagaccagtccaaccgagcagtaagtcaaggaacaccttataatcctgatggcacgctcatgacaccgttcccctcgactagccacctttaggtccgcattatagtcttgctcctaagaagaaaatttggaaatgtatatattctcggttttctgtgcacgcctgaaattgggcaatgtgttcagctcagccagcatattcctgtacacctcatctcaagcaggcccttggccattctggcctttgagcacn

SEQ ID NO: 21149 - DNA, 537 bp, Homo sapiens
  misc_feature 534, 535, 536, 537: n = A,T,C or G
acagtggcgcagacagctcactggagcctcgacctcctgggctcaagtgatcctcccgcctcagccttcgagtagctgggaccacacacatgtgccaccatgccggctacgtttttgtagagatggggtcttgccttgttgcccagggtttcatcagctgttgagtgcgtcggggtgagaggcgcctgctgttctcgttgtaagagggaagtagttcctgacagagcccatcttaccctgacacaggcctccttttcttttccttgttttagccattgcacctttgtcatagaagcgttgaagtctttgccatcagatgtggagagccgagaccgccaggcccgatgcatatggtttctggataccctcatcaaatttcgagctcatagggtagttaagcggaaaagtaagtctatgataaacattttattctaattgtttccagtatattaattgtctgtaattcttagatgagttctgatgagagaagaaaatggatatgtctgtccaagtctttactgtcaactgtgagannnn

SEQ ID NO: 21150 - DNA, 505 bp, Homo sapiens
  misc_feature 1, 2, 3, 4, 500, 501, 502, 503, 504, 505: n = A,T,C or G
nnnnctatcaatcgaagttgaatagatatgtgaaaaagtaaaatgctgtaatagttaataattgtgaagttgctgattttatgtaccaaagcaattatgtaagagtgttcaaatagttaaatagtgaatcagattgcatttgaacattaagagtgtggtagctagctaaatagaggaatagctgggtcctttcttgtgaaaagtgagtttttgataatccgtgagtcctagtcgtaggtaatgcaaaatgaggtagcgaggagccttatttagatgagttataaaatccacaaattattttgaatataacacacttggtttcagtgcccaatatttcacttgttcaagaaaggaaaaagtatctctatgaatctaagaagcagatcgactgacaccaaactcttcaatgtgatccaaaatagacacttaaaatacagaatcttctcaggtcccaacgtagtatacctgcagtgcctgaatatggccctgtagtacctgcnnnnnn

SEQ ID NO: 21151 - DNA, 516 bp, Homo sapiens
  misc_feature 516: n = A,T,C or G
accatctgttaaactgacaatgccactgtaaattaattgtaacctattttcaaagaagatttcagagagcccttttaaaaatattaagacatagttgctaaacaaaagcacttattggattcaagtagctatttaatgacaccaatatttgatctttgtgtccagggtcccatgagcctacgtggcatattgcaaatataataaaaccctccttttctctccccagccattacaacacaagctagcatggagtttcgacggaaaggggcacaaaatgtccacagacaccatggtttccaatcctatgtttgatgcaagtgaatttcctgataactatgaagcaagaagagctgaggcttgtgggacactgtgtaggattttttgtagcaagaagactggagaagagattctgccagcttatttatccaggtcttggaatatatgtttgttttttcatttatatagctttgatagtgaagccattggtggttggccgactgaaccgatgagtgatgn

SEQ ID NO: 21152 - DNA, 680 bp, Homo sapiens
  misc_feature 1, 2, 3, 4, 5, 6, 7, 8, 9, 36, 678, 679, 680: n = A,T,C or G
nnnnnnnnnctggaagaaaatgtccctcccttaccnccatccttaactttgtatcctggcttataacaggccatccatttttgtagcacacttttcaaaaacaattatataccctggtcccatctttctagggcctggatctgcttatagagcaggaagaataaagccaccaacttttacctagcccggctaatcatggaagtgtgtccaggcttcaagtaacttgagttttaatttttttttcttccttagtggttatatgtttctaacaatcaatggcattttagatttgatgaaatagggtataaatataatccagattaataatgcttgtctatggctggtgattgaagttgcctaacacactgagtataaaactttcaactggccatcatgggtccacacagtagaatcccaactacacttaacagtcttctctctcactcgctaccatttttctactcctgctgtgagcaataaactattcacaatgccctgaacattgactccatctacttgccttagaagtttctcatggtctgtttctgctaggactcattatcctcacactgctctagattttgctctagagtctttatttatccttcaaagtccatgtcaaacaccaggtcctctaagcaactttttctaatctctgcacttagatttgttctcacnnn

SEQ ID NO: 21153 - DNA, 2132 bp, Homo sapiens
  misc_feature 2129, 2130, 2131, 2132: n = A,T,C or G
tgtcatctctagagcaaggaaggaggcaggtccacagttagtattgtgaaagccattttcccattttgaaaagatttagttaaagacttctttgttattatgtattgtctgattttaaatgcaaatgacataaagtgtcaacaatgaacgcgtccgcttcagtgttccatttagtaggaaaagagtgtaagaaaggaaagtagtactgagttcttgggctatttttagaaagaaacttacttcatacttagtttttattgagctgaagagaaatttgctgcccagatgaattataatgataacagaagcctctaatgtcatcttcagcagtaaaaggggttttgctccggtaatccttcataatatatatttttatccaaaaaattctgacttattgctattacttcttacttctaattgttaataaggcaccatcagaatctcagtggagcatttttaaaggtacactgtagttgggtattagttttcacaccagtattcacttgacctattgtagttcttagtcctgcaaaagagaaaagctgattcgaatttatccattgtttaatttcacagacgtttctgtaggtttttctactactaggaagcatgtgctttatgatgagttgctaaaatgcgcataaacacttgaggagtgttcgttttaatgatttacgtgctgtgagagagtggcagcggtgagtgagagcggagaaggttttcattatataagtgttagtgccggaattcctcgtgtttgccggtgctgcgattctcttcgctgcttctaccccgtgtgcctggtgaaatgatgctggctgtgactggttatgaccttgggcgacaaatcatgatgagctctatgcagagtcacacactgggggtccaggtgcggagaaacagggcagctttgtggccgcaggaggagtccaggagccgagcccgcctgcccttgccctgctgttcccacgccgcaggtgaccgcacgtctcccctgcagtcctgttggagccactctgtccagctgcccgtgctctcatcctactcctccacgtcttaaaatagttacagacccagaggctctgacagaatcgctgccggttgcagatttatttcactgttactttctgcctagagggatagccttctgctcagaagctttgaggggtttctcagggacgcagagaggaaccttttctctgggacctcttccctcacatgaggttttaatgggtctcttgcctgcatggctaaatgggaactgcgctatgtaacaggttgcctttcggcttggagcccggatgctcagtgatcacatccctagaatgttctctctctaaaggaaatcttgtcggaagaggctgtgttatgtgagttccagctgttcatctaaagtggaaggagcagtgagcaggagggatgccttcagcttccgtccgtcttaaaaacaagtgtaacataatgggatatggccctcaggaggaaggctgatttctcgggcatacggggtactgctgtcattatttagcatgtattaagcaccccacagcacatgcggtgcacaaggaaagcatagttccaacccacatgctacaacaaggcaggacacagaaactgggccccctgacattcagtaactacactggcagaaaaaaaaatgtgaaaatgaagaaaagggaaacaagatgagtggggtgggttgaggatacttcagcattcagctcctctgagcttttgccaaagacgattaggacagacagctgtgccacctgggctgtgccttccctttctcctccatagctgggaagtgatggggacaagtgacaagactgaccccagaagccttgccccccactctcagtcctctgttgcaatcctcctacaaagaggagaagcttcacagtttcacttgcacctaaaactattattattatgtggagggggtaaacttgttataaagtgcaataaatatcaaagcatctttctccataaaatgatatttagatagaaatctggagttccagattctcccttcctgaactggtttgcaattcaacaagttacttaaccctgcactggtttaggatattgagtcaactgtaatattagttagggaaatgccttcagcnnnn

SEQ ID NO: 21154 - DNA, 888 bp, Homo sapiens
  misc_feature 1, 2, 3, 4, 5, 6, 7, 886, 887, 888: n = A,T,C or G
nnnnnnncccttccccttttttccaacccaatcgcaacccttcggaccgaaagtccgtcttccgtctcatagggaagtgttagagatggataatgtttctgtgtagcagaagtagtcattatgtccccttaaattcggtcactttgactgcagtagagcttcttagtgagcagtctgtgatggagtatactttcggagaagctcatggtgggggaaacctggaatttatctaaatatttcatttctttgataaattacattaaaaaattaataagagtatctatttggtgaaatcattttcctccacgtgaccaaatgagaaatttagtgaaagatttaaaatcatttttcagactttttccacattagttgggaagcaaaccccttttttaaggcaatgtcagttattaagctttagggaaccacatgccactttaggtaacacatgattggagagattgaagagtgaagtccctgctttaaagtgtactcctgtggacacagtaatacatatatttaaaatggttcatgttaagagtaggtatatttctatctaaatactctgtagcttttgtgattcagggaaatgagtggagcctcacaggcacaagaatctagtaaattctaggtttcttgtgtggaactcagtgggcaaaatcttaactgagtgaattcttgattattggtatcacatttattagtctgtatgtatctgtgtcatcgatctccttaagaagagactcgtagatattgactgggagacccaagctgaatgctaaaatctgctccatggatataagctgatgcagtcatcatttcacattaaaatgtaccacagctatatatgcagcaaaaaaaaaaaaacacgccgcccggccgcgaatannn

SEQ ID NO: 21155 - DNA, 468 bp, Homo sapiens
  misc_feature 1, 2, 3, 467, 468: n = A,T,C or G
nnnaatcttagtgagatctttaatatgaaagtccacatccataattatctttaggcgtgctcgccgctgtttacttctaattatcttcctgattcacaaattaatttttgcaattcacaacttcaagaatacttggactattggattcaatccatagtaatctgcaaaagaagagaagcagaattatacctagaagtctactaatggacagttagtcacccacctacatttgagattcctgacattcagacaactgacttgtaactgacttataactgacttgtaatacactgctactatatcaaaccgacaatgaattggaattgaaaaaccaaagagtgctacattaccaccactgtatcctaaaagccagccacctttttttgcaccagtcttttaataaaccaaattaccacaacatctcagagttctttcagctatcctggaagtaaccaagaagcatgcann

SEQ ID NO: 21156 - DNA, 1002 bp, Homo sapiens
  misc_feature 1002: n = A,T,C or G
actttcacagcaaccagcttagtgctatcattgacttggtctgttccactttggggatgaagattgtaataagccaagctccttgagcaggatgaagacaatcttcacacaggaaatttttactgagcaggttgtcacagcatggtggctgggcccaggcaatttcctgcaaccagaggtccaagagaccagcacagatgttatcaggcatcttccgacctggggaaggggacctgagtgtttgcacctgttttgttatccatgggagtatctatcagcacacccatcccagggctgttagaatgaaatgaggaaatgcttgtaaggcactcagcactttcttaacacattatacatccccagtcactgactatttgttatttattaatgaagcatgtggggaggctgtgaccttgtgcttggccttcggcagtgctgctgagagagctgagcttcatctgaactggaccacatgggcttgcatctgatcagcctgggataggtggggaataggcttcggagagcatgcaggtggctgaggttgctttcaaagctccacagtatcctgcccatcccacaactccaatagccagttgaggttatggtgtctgagactcactgggcagggtagacagagtgtctgtgcccttctgtgacttgcttctattgtgtaaaactgccttgcaaaaggttctttggagagccaggttctaaaagggattctttcccacctgtgaaatttggctctgtcctttgtagggctctgcagctctttttgccctgtggcatatcaactcaagatgtcaggaagttgtaaatgcagaaccagagggtaatgacatgtgttgctttcaaaacacacagctaagctctatttttaaaaccccaattttaagtgatgtttttcagtgtgtgtactcttaagcaagagtggtaaaatcctcttttgttaaccaagcattgagcactgggaaatttcttggatgccttttggagattaan

SEQ ID NO: 21157 - DNA, 976 bp, Homo sapiens
  misc_feature 975, 976: n = A,T,C or G
agacaaagggtatctttagtttcttcagtataaaacagttactcttttttcataaatttttagggtttggcaagcatatataaatacgtataaagcagacttgctttaaaatgttctgaatctgaaaattttagtatgtttgtattataaaactttgagtataaaatattgaaggatacacacctgagatttttctcataggtatatccttggaagggcaggtctatgagatctttttaatgaaagttaatagctaaataacacatgccctcaggcaaagaataattagccagttcttgaattatttctgctgtagttcaaagctttttttttggattactgcttttaataaatacactattttgcaaattataacaatcttgtgaaagtccaaacaccagtgactaccactggcctctaattgatgaattatatttcattagctaagcaaatagttcttttgttaagggttaatgggataatttatgaggtcctaagaagtctgttgttgcctaaattaatagaatctctggattgagaagtaactttcagtagaatatagctaaaagaaaaaaaaaagaaattttctttggtatccaagaagatcaaaaaaattaaaactttttttaaaaaataaaaagaaattaatcccaaccttgtacccaagcagaacaaaggatagcaattttcaaaaagggaactaacaggccaggtgcggtgcctcacccctgtaatcttagcactttggaaggctgaggctggtggatcatctgaggtcaggagttcaagaccagcctggccaacatggtgaaaccccatctctactaaaaatacagaaaaattagccaggcatggtggcaggtgcctgtaatcccagactcgggaggctgaagcaggagaatcacttgaacctgggaggtggaggttgcggtgagctgagattgcaccattgcactccatcctaggcaacaagann

SEQ ID NO: 21158 - DNA, 383 bp, Homo sapiens
gcaggtgataaatctcaagctctttccagtaagagtggtggactctaccattctaaccccactcttgtcctgtatccctggacatgtccataggaggtgggcaggaaggtctttatgtgcacctgtgaaatggaactaagtttactggctccaaaaggttttgaatccatcacgtgggagagaatttactctcaaaatgaccagttctggatgagattcccctctttttttattgtgaagttgaagataagagtccgttttcggggtgggtaatcccaaagtgagcttgtttttttccacaaaatgttgtttggatttccttcgccgagggccacgtgatcccggcaggaaaacctcgttatgtgaacttgagctcttcacgt

SEQ ID NO: 21159 - DNA, 427 bp, Homo sapiens
  misc_feature 1, 2, 427: n = A,T,C or G
nnataagcgagacaaatgaaaaggttacccatttaaatcatctgtaatactggattactgagcacctgtctcaaacatacgcaaagaggagtgattaagcagacctctcctgtacagttacctccagtctctgtgtatctggaaatgcacttacatgctattcaagttccttagagtgtaaggaaaacaaaagctgtagagttctgcatccatggggactgagacagagcaaagcacttcctagtatgttcaactggaacatggcccacactgatccatggtcacagtttggaatgtgctgagaagcttccatctacaatcaagtttctcagtaagaagtccccgcagagggagggagtccactgtgtacctgtcgaggctctgaggagccttcctggaagggatttgctagcgcttatagatcacn

SEQ ID NO: 21160 - DNA, 980 bp, Homo sapiens
  misc_feature 1, 2, 969, 970, 971, 972, 973, 974, 975, 976, 977, 978, 979,980: n = A,T,C or G
nngatcgctcgacatcgatacgactttttttttttttttttttttttttttttttgtacttatcttaatatcgttaagagatggcagccaagggtaaaactgagtcttcttgggctgactatgatgaaaatgccaagtgtaatctgagcacagccctgaacttgggctggtagcccttctgtcgactttatctactgggaactcttgggacaccctgcagaaggagctcgggctggaagcagaaacaacccatctgagctaagagaaagaatttaacctttttaaaggcagcctgttatgcctgacagaataaacttacctttcctcactaaaactgtctatccttcacattccaggaatcccttctaaaaaacatattccatgccctttttcaagagaatccagccaatcatttcagctcagacatctctcccatgtaaatgctggaagctatcctccaagcctttcctttttctatagcacttgctgctaaggataattatatggtttctcatcaacagaatgtaaattctcccagtgcccatgaatacatactggcccagaggaaaacaggtgagaaatatgtcaaaagaacttgtaatacaagccttcatatacatggcaggggaaggcctggtgcctccttttcttacaaaataggaaaaatagcacctaaacctgcaggtttgttgaggctcacactgtttagaatggcattgaacaaacatctggcacaggaaatgcccattataagtcacctgtttccatttatgtctcaatctcaaatgtggtgagacgtgccacagcgattagtatggcagattacaggggctgatccccatcttttactcacaaccctgtaactgtttcttcttgataaagtaatggtgatagatagggacactacacacaaaccattcatggattctcccctaagtctgtgcaatcgtccgtatatgtattaaatcnnnnnnnnnnnn

SEQ ID NO: 21161 - DNA, 866 bp, Homo sapiens
  misc_feature 1, 2, 3, 4, 5, 6, 7, 8, 9, 10, 11, 699, 700, 701, 702, 703,704, 708: n = A,T,C or G
nnnnnnnnnnncggaagtcttctagcaattaattaacgcgggcagttgtgtcaactatcagaatttgcacaagcaaaaagtaatttgccatctccagtaaaatggaaagagcctaaaagtatgtcatcaggtacacctgggttcacatctctctcctacttctgactagccatgaaatgttaagtaaattattgaagtgctctaagcctcaatttccccacctctcaagtaaaaataataatacctccctcagacaaccattcaaaagatgtttagtgtgatttgcaaggataaacaattccaaacacatatcagagcactacgtaaagacagagaagttactaatttccccagcaatccctatggttgctaccatgcctctttccaactattttatcaatattttaaataaacaacttaaaaattgtattaaaatgccagttaagataagaaaattaccaactgacttacctatcttgggacaaagggtgcttgccatgctgatacacaggctatttgcccctggttttaaaatgcttttcagagatatgaccctattagatatctaatttgtcagagctgtaactatgtgtaagcatatattgactcttactgtaatgcgcttcattaaagaaaaacaagttaacatgactaatatatggtcaaatcttatattctaaaaaaaaaaaaaaaaaagtnnnnnnagtncactttgtagctgaagatgtggatgctggacagattattttgcaagaagctgttcccgtgaagaggggtgatactgtcgcaactctttctgaaagagtaaaattagcagaacataaaatatttcctgcagcccttcagctggtggccagtggaactgt

SEQ ID NO: 21162 - DNA, 652 bp, Homo sapiens
  misc_feature 652: n = A,T,C or G
acgtgtatttttattctatgggattgaaagattttttagggccaggaattatgtcttacctgattccatatctcatttctatcattgattttcattttgctcaagtaaccaactcaaattggcttgaaaataactaaaacaactaaggattttgacattagtgggttctttgcaacctggtatgggacctgtaaatgtttgagaaatgaaagtaatgccttattttccaagaagtttgcattatgctcacaggttaatttttatatcttctttcttaggaaaactacatctcagacccaactatcttatggagggcttatccccataacctgatgacgtaagtcattctttagcagccctttctttgttaaggaccatggtcatgtcactattaatcagaattcattcttgttattctctttaggaccttaggcaaatgcataaaatagatgaaaatatgtctttgacagtcccactgccgtaagaaaaaaaaagctgtgtacctttttttaatgtttctattctaatcttttcaacatctttgtaagcttgagacaactgattttaacataacttaaatttggtactcggcttcttttcccttcttttcactcatactttctcctttttatggactccatcttctctatan

SEQ ID NO: 21163 - DNA, 3525 bp, Homo sapiens
  misc_feature 1, 2, 3524, 3525: n = A,T,C or G
nnagtcgacccacgcgtgcggttctagatcgcgagcggccgctcgcgatctataacagcaactaaaggaatacttttctttataggtctgttctgtttttaacctcattgactgtatatgttttatttacccgtgccaggagtctagaatcgtgcttaggtgccattcttaggtatgaaaacaagtttggagaccaatgcaggtctctgtgcagaaatctggggctctaaatgaattaccaaaccaataggaaagttaaaatactactcatgatgtagtgtgtcatctgaagctatgatagaatatattatttctaaaatagtattgagaagttaattgttcagtccatagtagtgtaagtgaagtgtggaggtcagccatagttgtctttcttcagcaggtactctaaccagagactgggttctgtggaaaatagaattatattcttggtttgggatcaacaaatgttttgttattgttttaatgttgctggcattgcctgaaacaaagtgccctgttattcctcttatgtcatcagaactctgcttactgaagttgaagtttaatcttaggatctagaattcttgtggttggtcgtgtattaagaaaagaaggtggtttgattttatttcttgtacttggtggaacctgttactatacaagtcatgttttgacctgtaagccgagcaaatctgaaaggtgaatcgttaatggtagtataattgtttcatttgaaactgtcagtttcttcaagtcacttctctgaaaaaaattgtgatagattgatagcctgccagaaaatagcaatttctaaggtgctgccatccacacttacttattgtgaaatatgaaaatccagagtggtttgtatgagaggggaaatactggctctaagctttctacagaaaacaggaaattcatgctgttgttgacataattttaaaggaaacttttaacaagaaaattcatgagggatacaatcaaacatagttaatctcttgagtgctaatcatttgagtatagtccacatcaggaagttttatgaggttgaaaactttactttgaaatatttaattgggagactagaccatttctttttccaagtcattctgatttattgtcctagtaaatgtatgtgtatgcatatatactgatgtattgactgaatgtgtgtgtgtgtgtgtgtgcgcgtgtaaatctgttttcatagggaacatacattgatggctcctagtctattttatactaaaacttaaaaaaatttgctgcactttgcagttgccactttttaaaagattaatgctttgcacatttcagtaggccttaaagatgaattgctcaccaacattttagaaatacactgcttacatgtgacatactctaaacaaagtcatagtaaactgttctcttaggttcatgtattattgagcaaataaggatgtcctttcttaaaatttctacatttatgtttgcttttgtgtaaaatctttattagtttgtaagtttctcaaagaggaggtttatactggaagcagtatttctaaagtacagagattcgaccatggattgaatacagtagtggaggaatgctggtattgtggcctaatttatccttttaaactgtatgtcattagtattagccaaaacctcagagtggagtgtcttgggctgaatgatcttctcaactttgccttgtttcccatctcataaaggctccttctggttcttttcccttccaaggattgtgagtcatgctcacataggcctgggatcttctggatggggtcggggaggaggtgggggtttcctgtggctggcccagagttctagccaatggaatcattcaagaatgcctaaagttcaggggtgggaatgccatatattggtgttaatcacttggcactttcttgggcaccaatattagcactgtttcatttttaataactggaagcacttaatgattattttgtttgtttaatttcaacttaaggatattgagggtcagagaagtaaggtttatttcttgtttatgttttctggaatttatagggtgtttgtagaagggataaatgggttacctaatgagccattcttctaggctctgtaaggtatgcccttttggctaggatattttaaaataatttgcaagcttttaatattgtgctttgtagaaatttacgatttttaaaaataatttgcaattgatagattacacttaaatttataaagtatccaattttaagtttcttttctgtttggtcattgttgcttattgtctattgtgtaggggacacaatcctgacatttcattgttttgttacttggggcagtattaaccagtggcctttgtatgtacattcattgcttacatttattgtttaagtggtagagtagcatttttatgaacttccctgttcagtattagtgaaattgacagatgcgtatatgtaaagatagaaaagaaacgaatacaattaattttttattccttgaggcctatttatttgttttggccctggatcttttctaatcacaattatatttctttatttttgcctttgagcagtttcatttatctttgtgggcagggaagattaaatatgaaattcagtccagtcattttgctactggttagctttagtttgaggcaagtaaaaatttttgattaaaattagtttcttaaaattatgcccttgctttaccaaataatcaaattggctaaaaaataagggtatgtaactttgcattttgaagaacaaaccaataatttttcatgagccctactcgatcttctttaaagaagaccttcctaagagacaattagggatgagtttgattaatgggaaatagctctaggttagattattttaaattccatacaccaagtgatttaaccacagtggcagtggcagtttctgaaccgtcaagtatgaacatcacttaaaaattaaaagatgcttaataataaactcttaattttcattaagccaatctgtaattcagaagaaaagcatatgtctgccatgggactattgcagtgcgtctccatcagtgttaacacaggagagatatgttattttatgtgtatgtcttagtttgggatatgtggtagtaagaacatgtcaagagtgctttcttcaaacctgtcagctcaactgagaagacagttacttcattgcttattttttcccttgttttattgaaatctgtatctcatatccagctatctaacccttgtgagatctttcctttacgtagtgccacctacccgaggatggtacgtcaaggtatatagccgcctagtgagtcagactaattacttgggaccaaaagcccttaaggtttaaggccctttttctttctaaaagcataagccgctgcacttttaccgttgggcaacacggggaggcccctcaaccgcaccttggaccgagagtccttgagtgccagcactcgacaaataagaggagccacacaccttagagtcacgcactactgcctcattagtaatcccatgtccaccnn

SEQ ID NO: 21164 - DNA, 1492 bp, Homo sapiens
  misc_feature 1492: n = A,T,C or G
gggagtcacccacgcgtccgagaatataacggtcgctttgtgttgccggtgtccgggcctgttccttggggaactgaagttccaggactcatcagaatgttcaacaacaaaggtgaagaagtgaagaggatagaattcaagcatggtggaaactatgtccctgcacccaaagaaggttcttttgaactttatggagaccgagtcctgaaactgggaactaacatgtacagcgtgaatcagcctgtggaaactcatgtgtctggatcatcaaagaacttagcctcatggacccaggaaagcattgctccaaaccctcttgctaaagaagagctgaatttcttggccaggctgatgggagggatggagattaagaaacccagtggccctgagcccggattccggttgaatctctttaccaccgatgaagaagaggaacaagcagcgctaaccaggccagaagagttatcctatgaagttatcaacatacaagccacccaggaccagcaacggagcgaggagctggctcgaatcatgggggagtttgagatcacggagcagccaaggctgagcaccagcaaaggggacgatttgctcgccatgatggatgagttatagctgttctgaccaggcgtcctctgcccccagggagaggctgctggatggtgacccctggggaatgccccatggcccagaatgatgctgctagttttctactgagtgaagccattacgtctatttcttatttatgttgtaaggaactgtgtgagtctcccttgaggagcactcactcttgaaggcacacacatacacatattttcagtgaaatatattctgacttttaaacttgacctttcccattttattcttaattctgtggcagccaccaatagcctcctgagccataggtttgagccccagagtgggtaaggggtcacccctactgtcattttcaggattactatttcagctctcctgtgaggatctacaaaggcctgtaaacattaacataatccttggctttctgggatacattctgcctgtaggcaagcttgaaatcaatgactgttcgaggcagttgccataaccagtgaggggtcagtgtcaaagaccctcttctccatggctcactaggagctgtaacctcagaggaagagtaagcaaggccgtgacagggtacactcagctggccccaggcaggacatgccagcatctgtacttcccgcacgtccgtctatccatgcggtgtcagtttatcccatactgacatgtataccaagagaatattttcttcttttcagcatgacatgtactccttacccccagggtcttcctctacccctgagtgtgctttgccttctaaagacacccagcataggccgggcacagtggctcaggcctataatcccagcactttggaaggctgaggtgggcggatcacgagatcagaagatcgagaccatcctggctaacacagtgaaaccccatctctacn

SEQ ID NO: 21165 - DNA, 1857 bp, Homo sapiens
  misc_feature 1, 2, 3, 4, 5, 6, 7, 8, 9, 10, 11, 1856, 1857: n = A,T,C or G
nnnnnnnnnnncattggctttgcaaatagcagaaaagttgtcaaaccaagggggaaaagctactgcagtatttctgcctctgtggattcacagaagtcttcaggagcaaacacaagcaaagacagaccacatgccagtggtactgatggagatgaaagtgaggaagacccacctgagcataagccaagcaaactgaagaggagccatgaactggacattgatgaaaacccagcttcagactttgatgacagtggttcccttctaggattcaagtatggctcaggacaaaaatatggtggaatcccaaatttcagtcatcggcaggtcaggtatttagagaagaatgtgaagcttaagtctaagtacctagacatgcgcagacaaataaagatgaaaaacaaacacatcttctttaccaaagagtcagaaaaaccatttttcaagaaaagcaaaattctgagtaaggtagaaaaattcctcacatgggttaataaaccaatggatgaagaagcatcacaggaatcatcttctcatgacaatgtgcacgacgcttccacaagtagtgattcagaggaacaagacatgtctgttaaaaaaggtgatgacctactggagactaataatccagaacctgaaaagtgtcagagcgtatcttcagctggtgaacttgaaacagaaaactatgaaagagacagcttgctagcaactgttccagatgagcaggattgtgttactcaagaagtgccagactcccgccaggcagaaactgaagctgaagtgaaaaagaagaagaacaagaagaagaacaaaaaggtgaatggtctgcctcctgaaatagctgctgttcctgagctggcaaaatactgggcccagaggtacaggctcttctcccgttttgatgatgggattaagttggacagagagggctggttttcagttacacccgagaagattgctgaacacattgctggccgtgttagtcagtccttcaagtgtgacgttgtagtagacgcattctgtggagttggaggaaataccattcagtttgccttaacaggaatgagagtgattgccattgatatcgatcctgttaagattgcccttgctcgcaataatgcagaagtttatgggatagcagataagatagagttcatctgtggagatttcttgctgctggcttcttttttaaaggctgatgttgtgttcctcagcccaccttggggagggccagactatgccactgcagagacctttgacattagaacaatgatgtctcctgatggctttgaaattttcagactttctaagaagatcactaataatattgtttattttcttccaagaaatgctgatattgaccaggtggcatccttagctgggcctggagggcaagtggaaatagaacagaacttccttaacaacaaattgaagacaatcactgcatattttggtgacctaattcgaagaccagcctctgaaacctaactatgcagcagtgcgaggaccaaagatcatggagtggtccaaatattcccgatgagacatttggcatgtctttctttattcaactgatatttcttacccagggccttattttccggttgggaatgggacgttcagggctctactttcgcgcagaaatctgggaacctggagaatccttggggcgtttcaacttaattattgggcgcggggacatttggcaggggcgcccttagcccgggggatgggcggcaggcctcggggagccggtctgacgtttgtctcccggggggggacgcgccacttttgtggcacccccgtggtgtggcgtcccggagtggggggcgtcatcattcttttcgggctcttctcgnn

SEQ ID NO: 21166 - DNA, 2049 bp, Homo sapiens
  misc_feature 1, 2, 3, 4, 1833, 2019, 2030, 2046, 2047, 2048, 2049: n = A,T,C or G
nnnnagtcacgcgtccgaatggcggggactcgcctaccggacgggccgagtggagctgcgggacagcccgaacctccaggtcagccccgcggccctccatggcgctggtgcgcgcactcgtctgctgcctgctgactgcctggcactgccgctccggcctcgggctgcccgtggcgcccgcaggcggcaggaatcctcctccggcgatagggatagcccacctcatgttcctgtacctgaactctcaacagacactgttataaatgtgatcactaatatgacaaccaccatccagagtctctttccaaatctccaggttttccctgcgctgggtaatcatgactattggccacaggatcaactgcctgtagtcaccagtaaagtgtacaatgcagtagcaaacctctggaaaccatggctagatgaagaagctattagtactttaaggaaaggtggtttttattcacagaaagttacaactaatccaaaccttaggatcatcagtctaaacacaaacttgtactacggcccaaatataatgacactgaacaagactgacccagccaaccagtttgaatggctagaaagtacattgaacaactctcagcagaataaggagaaggtgtatatcatagcacatgttccagtggggtatctgccatcttcacagaacatcacagcaatgagagaatactataatgagaaattgatagatatttttcaaaaatacagtgatgtcattgcaggacaattttatggacacactcacagagacagcattatggttctttcagataaaaaaggaagtccagtaaattctttgtttgtggctcctgctgttacaccagtgaagagtgttttagaaaaacagaccaacaatcctggtatcagactgtttcagtatgatcctcgtgattataaattattggatatgttgcagtattacttgaatctgacagaggcgaatctaaagggagagtccatctggaagctggagtatatcctgacccagacctacgacattgaagatttgcagccggaaagtttatatggattagctaaacaatttacaatcctagacagtaagcagtttataaaatactacaattacttctttgtgagttatgacagcagtgtaacatgtgataagacatgtaaggcctttcagatttgtgcaattatgaatcttgataatatttcctatgcagattgcctcaaacagctttatataaagcacaattactagtatttcacagtttttgctaatagaaaatgctgattctgattctgagatcaatttgtgggaattttacataaatctttgttaattactgagtgggcaagtagacttcctgtctttgctttctttttttttttctttttgatgccttaatgtagatatctttatcattctgaattgtattatatatttaaaatgctcattaatagaatgatggatgtaaattggatgtaaatattcagtttatataattatatctaatttgtacccttgttgaaattgtcatttatacaataaagcgaattctttatctctaaatatgatgaagttttcttaacatgataatttttagttaaaatctgtgtattaactgaggtccaaattgtttacctctcatatgtaaacagatgttaccactgtttacatgcactatctactcttgggaaaataccatggtcattaggagcatgctgaaacatcacagggcatgtattgcctagctttcttcattctgagtctttggcattgctaacttttaaggatgagaatgtcacacatacttattgtatctgcagtactagcacaaggcctgngtcctagtccagtgcctggcacctagtaaataattgttgaaatgaattgaaagctgtgaatatttttcaaagaaacgtcctagattacagtggtggcattttctttgtcacagtattccaggataggatatgtttctgctttcaggttaagtaggagaattaaagtagaaatggaaagagaagtgngaaggactggnggatttaaaggaagannnn

SEQ ID NO: 21167 - DNA, 585 bp, Homo sapiens
  misc_feature 1, 2, 3, 4, 5, 6, 7, 8, 14, 15, 25, 26, 40, 44, 45, 580,581, 582, 583, 584, 585: n = A,T,C or G
nnnnnnnnagctgnnagccagctgnnacccacggcatcanctgnnagctgggcccctaccaccctggacagggacagtctctatgtcatggtttcactcattggagccccataccaaccaccagcactcctgggacctccatagtgaacctgggaacctctgggatcccaccttccctccctgaaactacagcccccggccctctcctggtgccattcacactcaacttcaccatcactcacctacagtatgaggagaacatgggtcaccctggctccaggaagttcaacatcacggagagtgttctgcagggtctgctcaagcccttgttcaagagcaccagtgttggccctctgtattctggctgcaggctgaccttgctcaggccagagaaagatggggaagcctccggagtggatgccatctgcacccgccgccctgaccccgcaggccctgggctggacagagagcagctgtatttggagctgagccagctgacccacagcatcactgagctgggcccctactcactggacagggacagtctctatgtcattggtttcacccatcggagctctgnnnnnn

SEQ ID NO: 21168 - DNA, 3190 bp, Homo sapiens
  misc_feature 1, 2, 3183, 3184, 3185, 3186, 3187, 3188, 3189, 3190: n = A,T,C or G
nnagtcacccacgcgtccgagtggaccttcctgctccctgagactgttttgattgacatcttttgtgtttctatattttccgaggcagtattttctttgtatgttaatcatagttatagtaaagtcagactcattaacttttcttcctagtaattttgacttggattatcttctagcctgcgggatggggttcatatgtgttgtcgtaactttagattactaaacaaaacaaactgtttttttgtttgaaggtatcctttacatacctgtctgtaggtaagcaagtgttagtaaaaacaattttgtcaaacagtactcctgacagcttggtaaagtctaggtagagtttctgattttgtattatgtcctaagacttgaaagtgcatttgtctagttgccaaaagttctaaaaatgagatggtgggctttctcagcatctttttgcttcctagaattgagttgctcttgaagtctgtactcctgtgtcaaaaagatggcagactgcaaatgggcagtacaggctttgccccatgctttcaaagtaggattctggattgcagtttcaaaaaaatatgatagattattgttatagaatcaaagtgtcctgaagggagaagaatagctatagttgctgggcaaagagtgtaagaaagaaactttagagcatttatcaatacttgagtgctttattatgttccaggctagaaatgtgatcattgcatggcctaagtgtagtcattcatatatatatgaatatctatatctatatctatacatatatatgtatcgccattatcgagtgttttctagccctggataaagttaatttttttgaagtttgattgccaagcaatccagtgaatctaaagtaatttttctcactttaaagaccagtgatgaggagtctggtccttcctgtactgatactgtagaactccagtcaaacttcagtgcactgctttcttacaggaagacaactcagaacacacagccataatctgctttggtgtcagtcacatcacagtggttatacatttgtcctgaatggtgattcattcctttccatctaacttccttgtgacaaatagcatttactattgaaatagtcttaaaatagggaaaagagtgaaagttactcttatgcatgggagtgggcttaaagggttgacttccaccagctgagtacaaacaagtgtaaagaaaaactatgataaagtatggaggtcttgagaattgttcataatgaaatctttaatctgggttatcagagtaatgaaatcaccaataaaaacattccatttatcttggatcttctgtggttagcagaggagtatggtctagctatgttagcagcttgaaggcacaacgtaaaaggaatgagctttcacaaggtgcttacgttagctgggtagtattggtcaaaggtactctgaagagtgaatgcagaaatcagttggctgtgtttgtaatcttgtcccacatggaccctaacctttagtagacttcagtcttttagtccagtagaagacaatggccctgaatatgtgttttctgctttttggtggaaggtttcctgcaggtggttgggtggtttttgggttattggctactgttcgttcagtgccatttgaagacctgttgtttcttaatcctttttcttggtgtgactggccaggaaaaagtccattgagtcctttttttctccctggtgtcttaccccttctgtagaataatccatattttaaaatttgtttcacatctttatagcaaacctgccacagacttgcaagcagtgattttatctttccttcctgagaaggtgatctcacttttgatgtttgggtcacctgtggacacctgtgctcttttgagtctcaaggcttatagctttcacattggcttgggaacaacagacttgtgtgtggttctagagtgaaatgggcagtgttctgctggtcctcagtctttgagaggtcttaggcaacatccttagtatagtggaatttctgaggtcaaatttaacatttaatatattctccttttagttcattgaatctgaggttctaaatctgtagcttcattttgagcacaagtctgcattgtcattttttaagagattggcaggcatatccttttgtgatacttaggaaaagactatggatggcagcaaatgaaagtaaaggttctcaactgtgaatgaaatttagaaagataattcttcagcagttggttgattagatgggttagtgcttttggaatatataacagtagacttgtattctttatgcactatacatatgatacgcactgacagaaaagcacagaagacatactgctaagagtttctttgtgcatttcactactgttctaggggactgctgtctctttggttccttttaggtttgtgttaggatgttgcacaagtaatcatttaatgttaaatgcaagtgtccaaagaaatgagtcttaaagttctttggtcatatttcactttagagttaggacaggagacagctaacctgacttccattttacaaatattagaaactttttcttcagtaacaaaaacagggaaggacaataaaaccatgaactattttgctttatgtctgtttttaaaaaataattgttttgaagtttgcttattagcttaataccttatagtacttttaaaaaatcatccttggtaattattgacttatcctagatccatgtacaattcagacttttatctgttagctttaataaaaatttaaaaccatctcatttcagaataaaataaacggaattacagttcatgcattagcatttttaagtgaagttctcttaataagattgccttttgtctaaccgaaatagggcatacagattagtttggatgggaaagtggtaagacttgagtttttatatgtgcctattcaaagagacttgtgtggtttttcatttgctttaaagatgtatgggggataactagtctttacacattgtgggagtagtttgtcgcacaggggaaattgcgagttggtaaccattttggacctgcggtgaaaactggacgttccatttttggggaaacgtgtatgtacacgtgtgggttttagattctgaaaaacctttcataaagtgtttagacatggaaataaaggggtagttgataaaacgctcaaatctttagctaatgannnnnnnn

SEQ ID NO: 21169 - DNA, 606 bp, Homo sapiens
  misc_feature 446, 461, 569, 603, 604, 605, 606: n = A,T,C or G
actgaacatggttgtctcttaaagatgtgaagattttctttttgtcgattctgctttgcttttgttctcttcctttagagagtgctgaactttgttttggcaagtaggaacttgtgcatcaccttgacataaattaactgagtagctcacgggtgggtggatttttataggggacatatttgaaaacaaaggttgcagctgcttttcatagctacaaagaatttatcatctcattgaaaaaaattctacttctacactaatttatctattctgtaatttattcattaattcattcattacctactaaatacctttttttttgttcaaggaactatgctggacacacgatgatatatcttattttccttctcatcctaccaaacctggagatggaacgcttaaagcttctagctgacaacacaatccttttattaggaacttaactntgctccctaactctntgatacactgaaactggaaggagttcctttgtttattaccagggtttattattatgggagtctgggtatgactctggacttttaattaccacctgtcctgtgtctcanaaaaattaacctcatataatataaactagttcannnn

SEQ ID NO: 21170 - DNA, 410 bp, Homo sapiens
  misc_feature 405, 406, 407, 408, 409, 410: n = A,T,C or G
actgcatgcctccttgcagagtgttgtgcacaaggaagaaagcctggggcccaagagacagaaagttggattcctgggatgatttgcacatcaactgctcaactgtggattgttttttacttttccttttaaaccggttcgtatatatttttcttcgctgttacgaatttacagcagcatttgtaccttctcagaaaagaatgtttgcaatgttggccctctgtccagccacagtagtagtggtctaggttgtaattcagcctgatgactcctgttgttaggagtttcacaagtgtgtggtttttcttatagtaggtatttagaaatttgctgtggtaaccaggccctgagccctcaaccaaagggtaactttgttttattaaccttaaggcctatcttagctgnnnnnn

SEQ ID NO: 21171 - DNA, 1901 bp, Homo sapiens
  misc_feature 1, 2, 1893, 1894, 1895, 1896, 1897, 1898, 1899, 1900, 1901: n = A,T,C or G
nnacccacgcgtccgcggacgcgtgggtttttttttttttttagtcaaagctcgaatcgattatatacagaggacgtactagttcatgacaatacagatattgaaaggaagttcccatgctgttcatgaactgaaaagtttaaaacaagaaaaagcaccagtttcaaaaacttacacggtaccacttaatgggcaagtttatgaacttttaactgtcttcatggactggatttcggatcatcatcttagcaaagtgaaacatgaagaatctggaatggatggtaaaaaaccacaactcaaatttgcttcccagagaaatgatattcaggagaagtgtgtaaagcttttgcctctaatgacagagcagctacagtggatgccatttgtgaatatcaaacttcacgagccttttgtaaaatttatatattggtccctaaggcagctagatgctggagcacagcactcgactatgacatcaacattgaggagattgggtgaagacatttttaaaggagtggtaactaaaggaattcaggataattctccacagcattctgtggagaataaaccaaagacagctgctttctttaagagctccaatttgccattgagatttttatcaaccttaattgttctcaaaacagtcactcaagctgattacctggctcaggcatttgattctctttgtttggacttgaagacagaagaaggaaaaaccttgtttttggagtatcaggctgttccagtaatattaagtcatctaagaatatccagtaaaggactcctgtctaatgttattgatagtttgctccagatgacggtggaatctaaatccttgcagcctttcctggaagcctgtagcaactctttattttttcgtacttgctctgtgctgcttcgagcccctaagcttgatcttcaaatactagaaaaactcagtattattttacagaaactttccaaaatcaagagtaataagaagctctttgaactttttacgattcatctgatgcttcaagaaatacaaaggacaacaaacccagagcatgcatttctctgtattaatctaaattcaactctgttcaatctgggtttaacaaaatgtaactccctggtctccagtgcaagcccttagactggctaattttttaatatagtatatgtggtgcttatttataaacatgtagaaattaccaaagtaactacaattctaccaagtaaagttatcagtagcatcatttatcatgaaaaataaataatttttttgaactgtaaaaatgaaatctgtagaaggtattggaacttttggaatgtttcagttcaggtaaggtagtactaatatacaagatggcgtttctagaatgtatgacactgaagtgactttttgtaaaaatatattaggaaaattatttcttaaaattatgtgattatttggaataaaattggtgcttatgtgagaacagggttaaataatactgtctttctattttcctaatatattagaatccttgcttttgaaagcaaaaatgtatatctttaaactatcatcttgataccataacttttctatatactgtattctagattaacagatgttgatttttattgggtgctcttggtgggacttggcacacacaggttcttattatgcctgttcacagggtttacaaactttggttttcacaataattattactggaggctgtatttccaggcaagacattctttaacattggaaggctaacaaaaatatcgtccgtaccgagaatctctgtggaagccaagattagttaggtgccaggtctggggagacacggggcacctggactctgacagagactgcgaacaagggaagaggcaaaatattggggagacacagggggaaaataaaannnnnnnnn

SEQ ID NO: 21172 - DNA, 536 bp, Homo sapiens
  misc_feature 1, 2, 3, 4, 5, 6, 7, 8, 9, 10, 11, 12, 13, 14, 15, 16, 17,536: n = A,T,C or G
nnnnnnnnnnnnnnnnnggtgctaagtagtaaccattttaagccaaaataaagtccaaatttcttgtagactgatatgcatacctgatcattatatcattttttttcccagagttttcttaaaactcaaatattgaatacctaatctttctaagctaagaggttggaattctggggaacccgtttataaaaatgaaaaggggtattaattacatcaacatgctggccataaggttaaaaacattcacaatttccccctcataattttgaagcttttatacacaaggattgaaaacctttaaaacttaagatctgcgtgtctagtttaaggctctataaagagcacttacccaaaggaggttactaatatgaattaatttaaaaaaaacatggtttccacaacaaacgaaattcttacagttgaatcaatttactctatggttaactactgaagcaaagtattctataatttagtaccttccctccttcctctttcaattctaattcatgacacttggcagtctgcacttgaaaggn

SEQ ID NO: 21173 - DNA, 1040 bp, Homo sapiens
  misc_feature 1012, 1013, 1014, 1015, 1016, 1017, 1018, 1019, 1020, 1021,1022, 1023, 1024, 1025, 1026, 1027, 1028, 1029, 1030, 1031,1032, 1033, 1034, 1035, 1036, 1037, 1038, 1039, 1040: n = A,T,C or G
acaattttccttgtagttcttttccttcaaacgcgtccggggaaatggagatcagcacataccatttgtaattatacatgttataaaacattatttccaaagccatatgttacaataacttatgtcagatttcttacatttctattcacttttgatgagcccatctttatccaaatccttatattttctaaagagaataaataagtggttactgaaaattaatatcacaataagtctttaataacattttattaataagtgcttaattacatttcagagtattcttaggttattggcaagtatccctcttcttgcatatatgtcttcaaaataatttcaaaccattattcatatatatctgttttatgcttttgggggctttctccctaattttatctgtgcctatttattgaactacttattatacagattgagcatccctaattagaaaatccaaaatgctccaaaatcccaaactttctgaacactgacatgctcacatgaccattgcagcatttcagattttggattcttggattagggatgctcctgcattctacaaagattcaaaaatctgagaatatctgaaatctgaatgcttctggtcccaagctgtctaaataagggatactcaacctgtattgattcgtgtgggcactaagctacttatttttctcaattagttttcttcttcctataagatgaattgaggctgcgcgcggtgggtcacgcctgtaatcccatctttttgggaggccgaggcaggcggatcacctgaggtcagaagtttgagaccagcctggccaacatggtgatacttcatctctattgaaaatacaaaaattagctgggcatggtgtcacgcatctgtagtcccagctagccaggaggctgaggtgggagaatcacttgaacctgggaagtggaggttacagtgagctgagatcacaccactgcactccagcctcagtgacagagcaagactcctgtctcaaaaaaaaaaaaaaaaaannnnnnnnnnnnnnnnnnnnnnnnnnnnn

SEQ ID NO: 21174 - DNA, 755 bp, Homo sapiens
  misc_feature 1, 2, 3, 755: n = A,T,C or G
nnncgaccacgcgtccgctgtgcagttccaacagtttagcacacagatgggattagtcttacaaggtggctaatagtatgtagaaagctgcatgcgacttaactcatcttggagagaaaatacaccagaatatttatatcctagtgaaaatgtcagtaatgtcatctttgtatatgaaggactatatctgcacacttggcatagcaatgtgatagaaaagaaagggcctggttttggagccagtcttcattactacctgacaccgagcacgctaagcttctgagctgcttcctcatctataatctggcaatgatacctacctcacaagttttttttatgtgtgtgtgtgaagattaggtgagataatttatatatctgtggtacttagtatacttaaaaaaatagtagtttcattacttcctttagacttttccaacctttcctctttctaaatgtgtccaatatagttacagtattttttttaagttttaatatgtaaaaatttcaaacacacagagagaaataatagcgcaatgaactaccatataccaactacctagattgaagttattattatctcatatttacttaattgctttcttttcttctgtgtccttattttttctctctctccctttctgtttctccccttttctcctttttctctctttatattttgttgttggtgttgctgacataacatttttctcttttggctgtagatactatttatgtcttcagcttcggcaggacan

SEQ ID NO: 21175 - DNA, 2528 bp, Homo sapiens
  misc_feature 2527, 2528: n = A,T,C or G
tccgggtgcacacattgtgttcttaaactgagacgtggctctgcaggtctcctgggctcattccatggtgtggtatgtttattccactgtccagagctattctctgatggatttgagcaacagcagtggagataaatgtcctagagtcaccaggtcgcttggagaagtcatttaagctgcctcgggtttttgttacttaaaatgtggatattatttctccacctaaatcactgagtttacagagtaataatgtgttgctctggacattgacagctttctagagccagtaatgggctcttctgaaggatgctgaattagaagtgaacctattcataggatcaaaagccacttgctttgaaatatgtagagttcctcagaattgacggtgctagaaatatccaagtgttaaataaccttttaaaagcaacaaaagctacttttttcttaccacttaatagaagaacctgtccctagaggcgacttcattgctatggatctggagtctctgaactcttaataggatgcagcctcacatacataatgtcacccattttatgttgatgaaaacattacaagttttcatcattgggtatgtgttgatgttcacagacagtacttgggcccattaggttttcgcgtctggtcttagagcatgtgtattcatctcagcgtgaatacctcagccagtcttatgaataggaggctatgtatgggcagggaatagattagattagaacactcgcacaagatgaccacatatagaagcagaaagccccaaattccctgggaactgttttttctctagtagctgaatataaggaaatatgtctaatggacaccagttaatactttttaaaactactctttaaaaaaaaaatacgttccccttggttaactgattttttaatccagggtggacattttttcaacctttattaaaaagacaaataaactattttgtagaagatcagactcctacttaactggaagagaaatgtctattaaatgtctctcctctttctctgggtcaagaccatgtaattttatgcttcagagatgaagatactgtttgtttacaaagagtttagtttttaagacatccaaaactctatgctagagcaaaaatcaaatagcaaaggacactagccagaaaatacagtgtgtgtgtgtgcacctgtgtgcctgctgaacaacttgacagtgtaacagataaggtaactgaagatggtggatatttgaattgtattagcttaatgtctacatatctttggccaaaactctattgtcatattagaaacatgttatctttttcatgtttattagtaatttatttttgattctttgttttctttttcgtccaactaaaacaactgtaatgtacttgatacatttatatcaagttctaaagtatttagacaaatccaaatactttgtttttagttttttcctcctttccatcctgttaaccacagtgaaacgctgcagtattttgatttggtcagtgctacggaggaagaccatgaaagctgaattggtctgtgccacccagagtaaacctcttctcttcttctggaaagatggcgtgatgtttttcaaggattctaataaatatcccgcagtcatctcctgagcagctttcctctgtttcacttcggaactccttcccccactttcttcactccagtttcttcacttgcagcgttttctgctaagaaagacttatcatcttgtatctgtttatgcctctcttctttggggcccctggatgtttttgtggatttttacagagtatttatatctgcacagcgtgtattttgttatacattcttacaagcattgatattggggggtacattcataatagtgagaatatctggcagaatgtgtgaatgccatatctgtagatgacgatgaatgtgaagggttaatgtagaaatgtttgtttattctgttacagctcaaaatggaggctgagaatctctaccaccattcccttctctatttgagaatctctaccaccattcccttctctatttgggaaacaatactctcttattttgctatttttaccttcccattaactggcttcactcaacagtgccagatacctatggagagggggcaagtcacaaacacgttaggtcacggcaattattaaaccatgagttagcttcagggccggtggcactgttcccggttcgaaccagtggcttgacttacaggacagaaaatgccatggccgagaactcgtgcactcaatccaggtcgaggatataccatgggccgggagaaacgcctatagtcatctaccctgtttaataccccaaaccaattggctcacaggcttcccgtacagtgctgtactctccgtgcacatctcaggggagacgagctgaaacaaccccctcatcgaagggcgtcacgtcaccacgttgacaaccacagtaatatcacacaaagacgatgtcatcatgtttccatccgtcgctgcgtacacgcgctcgtctgcatccatgatcatcactgnn

SEQ ID NO: 21176 - DNA, 1701 bp, Homo sapiens
  misc_feature 1, 10, 1701: n = A,T,C or G
nagcctccanaagtgttgggcttacagccttgagccactatgcttggctcaaagatatttttatgaaagccctgggactatagatttagctgattaaatttatagaaaaagtcctgtcatataaactggcaaagtctgttcttaatttaattagccaaatcagacttaacttccgtcagaacatgtcttggttttaattcagataaacacacaaacatacttctctggcacagccttcagaagcatcagtttttgttttgttttgttttgttttttgagacagggtcttgctctgttgcccaggctggagtgcactggcacaatcacagttcactgcagcctcgacctcccagatccaagcaatcctcccacctaagcctcccaagtagctgggtctataggcgcgtgccaccaccatgcccagctgaattttgtattttttgtacagacagcattttgccatgttgcccaggctggtcccaaacttctagcctccagcaaccctcctgcctcagcctctcaaagggctaggattgcagtcctgggctactgccccccaccctctctttgcgttcttaggagtcatttagaattttttttgatccctttggttagtgcctctggagctgcttacacccaggccatacgccttgatatactggatggttgagaggcagcctgttttttttttttttttttttttggaggatagggagtatggctgttgtgaaaagggaggtaaagagaaatggtagatctgaagaggcctcatcagagcacatattttaggacaacacatatggaaattggacatctttaagttggtttccatagagctatgcatgtatccttacccccatgggaaaatgttggtgtgttctcaagggtatgcatgtgtcattttgaagaccaaggccctagaattgtcaaacttaaggatcataaaaatcatgagggttgcttgttaaaaatgtccaaacgtgcagagactgatctttgagatctggaccaggaatttgcatttgaacaagtgttcctggaatctctatgcaagttttatacagaacatacttttggaatccttgccctagacaggggtgtccaatcttttggcttccctggtccacaatggaagaagaattgtcttggaccacacataaaatacactaacactaacaatagctgatgagctaaaaaaaaaaaaaaaatcgtgagctaccgcacccagccaagttgtaatttttaataaaacttaagaagtaaacattttacttatgtttataggtatttgatcctaaatttgacacatcattgcccatgaaagaatcctcttaggctgctcagcttcactcttcctgcttgcccaccggggtttttcactgcttctgttagcactaagtacttagacgatcctaagatatgtgcttgagccgaatttcatctttacttgtaggaaactttaaactatttcttttctttgctttcttttgtttgtttttttatttgagatggagttttgctcttgtcgcccaggctggagtgcagtggagtgatctcggctcactgcaacctctgcctcccgggttcaaatgattctcctgcctcagcctctcaagtggctgggactacaggcgtgcaccaccacgcctggctaattttgtgtttttggtagagacagagtttcaccatgttggccaggcn

SEQ ID NO: 21177 - DNA, 2952 bp, Homo sapiens
  misc_feature 1, 2, 3, 4, 5, 6, 7: n = A,T,C or G
nnnnnnnaaagggggaaatgggccccttaaaaaaaaaggcaaaaggccccccttttttaggaaatttcccaatcaattcattccatccttcccgccgcggttcccttacaacacccgttcacccccccttttgtacccctttccgttcctaccttccttcttcctgcccccacaagttaactttcgggccagccccccaattttgttttgtaaattttaacatgcatttattaaatttatatgcagatgactacactactgcaattacagaaatgagtaagaacatactctcaagatcttacagtcattggttggggtgaaagtatttcttctgtcttcatgaaaaattaaaaagatagaaaatcttgaagtattttgctaccttaaaacaactacccaccctacatttgtactaaaataggcttttgcttgttttaaaagcaattctagatgaggttatatttttacaatactgtatctcatctcaaataaatttatacattctttaccctgtctaaacttgcatgcaaaataagaaccagcaagccttcaaacttcaatcacagtattccataggctatattttaagtctattgcattagttgaaatttattttgcagagtatgttaacaaacatattctaacacttaaaaaatcattacaattttttctgtttttgtcttctaaattactctgagcagtgaattactggagggaagatacccatgtctaaaatttgtgtctggtgccagtctcagatttctgccaaacaccagtaggtattcaaaagtgtggtccctttaaaacagcaggccggatatcacctttctgtcttcaaagattcaaaccagactcccaatctgggatttctctacagagggttggctgcttcccagttaatgtgagttttgcaaagtttgcatttcatgaaaacagtgttgtgtaaacatatattgtgtcactttacctactatttactaaaatcagagagtttagcctttgaaatttatggttctctggagctatcataaatcaatcagtcatacgaatggactagctgtagactcaggatatcaataaaactaggcagtgaaatttgcctataattatactatatttagattaatagttatcaaaaacatttttccccaaaaaatacctcaagggtaaaacagaatggtaaagtttttttcaggataatgaattttcaaacatttccaagaccataaccagccattttaagtactgtaaactctgttatatttcatttggataagtatctaataagcaattattacatatcctctcatttaaattaccactgaaaactagaaataatctttatttaatacgactgttttaacaccatatggaacgggaaataactaaatgaaaattgttcacgtaaatgtgatgggagtgggggggtggggagcagtatttcttgacatgtggcatgtcactcaggaaagtaaaaggcccatcatatccaaaatgccagcttggatattcccttgccacccacttgacgaacagacataccacatggcattaaatgctgcaacctttcctaaaaatgccacttggattggtccgctgtggtgagtatataagaactcttggtctgtctcttgagtctgtgagttcaaagggaagaatctagtaaataacaccggctaaattttgccctcagatgtttggcataaatgatttgtgaggatattggaacctttggctgttttcacaccaatgaaataaattatgctacttgaaaaaaattctacagaacataatgctacacagtcacagtcgactttttgcaaaagtaccagagaatatcttttagaaacagtgcttataaagccccatatactccttagatatttcccaaggatttcttctcttggctagcaggaaaacaatcttaatattttatttattcttcataaatacaatgtatataatataaaacactttgtgcacatgtttccaacaatttcattttctatgcatctttacataaggtagtagctaataactctttctgtggacacgtattttccagttttctaaggtttatgtgttcaagcattgtaaaaacatatttaaaaattgaattaccagtaaaaatattgaatgtacaggtcattatgctcccacaaatacaaaatacattgaaaaattatatcaacagataattacatatgaaatatgaggcatatattttcttctattatttattttctccctaaagagttctaattgattaaatctcaagagacaaaatgtaattttataaaacaactgtattgttcagatttaggagacaacctaagaagatgattctgagtaggtaggatttttgctattactgttatgtgaaaaagactgctcaattaaatgacagattgttacatatctccctaacaagaggggcgaactgatactacaagcagccagaacaacataattagaatagaattccaaggttatattaatagagtaataagttaattaaaaccaagatcaactgagcttctatttacaccagttcagacagcccaagaggaaaagaactctattttagagacatatgtgactctttgagcttctgtcatccaggtgccatttctgatgcagcacatgtgcactgaacagttggcaaagaaggaaaaagattatggtagatgtatgtgcagatagtctctctaatgatgtaaaatacgtccagaaagaaagcagggctttgttgtaaaataaaaaatttcccatgactttttgttctttctgaatgtgatttgagcatgtttctgtaaataagaatatatactaacttatgatgtatatagaacaaaaatagacttactcatcaggaagtgatggaattatgcacataaattggcaatgacatttgaaaaatttaggatctggttcccatcttcatctaaatgt

SEQ ID NO: 21178 - DNA, 548 bp, Homo sapiens
  misc_feature 1, 2, 3, 4, 5, 6: n = A,T,C or G
nnnnnnctgtcacttgaaaaatgggttagaattttgtaggttgggaacacaaaatcaagtaatatttttgctgccattggaactgaaagtattcagaaaggaaatgcttcaattcaatccccaaaataaatgaacaatgagaagaacacgtttaaaatctactgagtgtgtagtgatcatctgtagttgttcaaacgctctctgaagcttatgctcttgttcatgtcccatttttgagttgtgcctacatgatgctggcaacagataagacatgtagttttaataaatcactaacctttatattctgcttatttttaaattataaattccatctgtgtaaatagtttctctcttcttgcactttactaaaagcagttaaaagaaaccattctgaggctgggcacggtggctcatgcctgtaatcccagcactttgggaggctgaggtgggcggatcacctgagatcaggagttgagaccagcctggccaacatgctgaaaccccatctctactaaaaatacaaaaattagctggacgtggtggtgtgt

SEQ ID NO: 21179 - DNA, 4638 bp, Homo sapiens
  misc_feature 4622, 4623, 4624, 4625, 4626, 4627, 4628, 4629, 4630, 4631,4632, 4633, 4634, 4635, 4636, 4637, 4638: n = A,T,C or G
cgtccgccccgcgtccggtccggccgggcagtagaggaaattgcggtagtgaccctcgggcctcgccatgaagagccgctttagcaccattgacctccgcgccgtactcgcggagctgaatgctagcttgctaggaatgagagtaaacaatgtttatgatgtggataataagacataccttattcgtcttcaaaaaccggactttaaagctacacttttacttgaatctggcatacgaattcatacaacagaatttgagtggcctaagaatatgatgccgtctagttttgccatgaagtgccgaaaacatttgaagagtcggagattagtcagtgcaaaacagcttggtgtggatagaattgtagattttcaatttggaagtgatgaagctgcttaccatttaatcattgagctctatgatagggggaacattgttcttacagattatgagtacgtaattttaaatattctaaggtttcgaactgatgaggcagatgatgttaaatttgctgttcgtgaacgctatccacttgatcatgctagagctgctgaacctttgcttactttggaaaggttgactgaaatagtagccagcgcacctaagggtgaactactgaagagggtgcttaacccattacttccctatggaccagctctcattgaacactgtcttttagaaaatggattctcgggtaatgtcaaagtggatgaaaaacttgaaactaaagatattgaaaaagtacttggttctctgcagaaagcagaagactatatgaaaacaacatccaacttcagtgggaagggatatatcattcagaaaagagaaataaaaccatgcttggaagcagataaaccagttgaagacatactgacgtatgaggaatttcatcctttcttgttttctcaacattcacaatgtccatatatagaatttgaatcatttgacaaggcggtggatgaattttattccaagatagaaggccagaaaattgacttaaaagctttacaacaggaaaagcaagcattgaagaaattagataatgttcgaaaggatcacgaaaacagattggaagctcttcagcaggctcaggaaatagacaaactgaaaggagagctcatagaaatgaacctacaaatagttgacagagccattcaggtagttcgaagtgctttagctaaccagatagattggacagaaattgggttaattgtgaaagaagcccaggctcaaggagaccctgttgcaagtgcaatcaaagaattaaaactacaaacaaaccatgttacaatgctgctaagaaatccatacttgttatcagaggaggaagatgatgatgttgatggtgacgtcaatgttgagaaaaatgaaactgaaccaccaaaaggaaaaaagaaaaaacaaaagaataaacagctgcagaagcctcagaaaaataagcccttacttgtagatgttgatctcagcttgtcagcatatgccaatgccaaaaagtattatgatcacaagagatatgctgctaagaaaacacaaaagactgttgaagctgctgagaaggcattcaagtcagcagaaaagaaaacaaagcaaacattaaaagaagttcagactgttacctctattcaaaaagcaagaaaagtatattggtttgagaaatttctgtggttcattagctcagagaactatctaattataggtggacgagatcagcaacagaatgaaataattgtgaaaagatacttgacaccaggagacatttatgtacatgctgatcttcatggagctactagctgtgtaattaagaatccaacaggagaacccatccccccacggaccttgactgaagctggcacaatggcactttgctacagtgctgcttgggatgcacgagttatcactagtgcttggtgggtgtaccatcatcaggtatctaaaacagcaccaactggagaatatttgacaacagattcatgatacaggttattcttttgtctaagagtaccctttgggaatgatcagacacttttctgttgattttttggagaaatatgggagaaacagtggaatatttttatgacatttttaggaaatcacctggcttggttggtagtcccacactgactttccttatgataattctacagatggaggtgacacgagcagtgatgaggataaagaagaacatgaaactcctgtggaagtagaactcatgactcaggttgaccaagaggatatcactcttcagagtggcagagatgaactaaatgaggagctcattcaggaagaaagctctgaagacgaaggagaatatgaagaggttagaaaagatcaggattctgttggtgaaatgaaggatgaaggggaagagacattaaattatcctgatactaccattgacttgtctcaccttcaaccccaaaggtccatccagaaattggcttcaaaagaggaatcttctaattctagtgacagtaaatcacagagccggagacatttgtcagccaaggaaagaagggaaatgaaaaagaaaaaacttccaagtgactcaggagatttagaagcgttagagggaaaggataaagaaaaagaaagtactgtacacattgaaactcatcagaacacaagcaaaaatgttgcggctgtgcagccaatgaaacgaggacaaaagagtaaaatgaaaaaaatgaaagaaaaatacaaagaccaggatgaagaagaccgtgaacttatcatgaagttgctggggtctgcaggttcaaacaaagaagaaaaagggaagaaggggaagaaaggaaaaacaaaggacgaacctgtgaagaaacagccccagaaacctagaggtggacagagggtctctgacaacattaagaaagaaactccgttccttgaggttataactcatgagttacaagactttgctgtagatgatccacatgatgacaaggaagagcaagatctggatcaacagggaaatgaggaaaacctatttgattctttgacaggccagccacatcctgaagatgtactactgtttgccattccaatatgtgccccttacaccaccatgacaaactacaaatataaagtgaaacttactcctggagtgcagaaaaagggaaaagctgcaaaaacagccttgaatagtttcatgcattccaaagaagcaacagcaagagaaaaagacttattccgcagcgtaaaggacacagatttatcaagaaacattcctggcaaagtgaaagtgtctgcacccaatcttctgaacgtaaaaaggaaatagctgaaatgaaattctaaaatatttgagaagagccaattttatagccttttggaagttcaaagatgaaagcaccatgtatcaggatttccgcattataaaaatgaactaaacattgccttgctatattcaccaaaaggacttacttcttgttttttcccagttttatatagaggaaacactgtctatgataggatttccaaaagtatttgtggacagttaaatgctaattaatatacatctgtagttattctacattttcttgaaatttgggaggttaataccaagtattcatttcatgatgtaaagaaactgaacagtgaagtggcttgattgcttaaactattgacttggtaagtctactgtatataacatctaatatatatattacaggccaaatgaactaaacattgccttgctatattcaccaaaaggacttaattcttgtttttttcccagttttatatagaggaaacactatgataggatttcctaaagtatttgtggacagttaaatgctaattatatacatctgtagttattctacattttcttgaaatttgagaggttaataccaagtattcatttcatgatgtaaagaaactgaacagtgaagtggcttgattgcttaaactattgacttggtaagtctactgtatataacatctaatatatatatattataggccagctacaaggggtttaaatatttaggattgtgtcttgaaaactaagtattggagtggattttcttctgctttcattgatacttgtcagaaaaaaatattagaccaaaatgtaaaatataagtaataattctcatgactcagcttaatcatttctattcatttgtagaccttcaggtttgatcttaattttttccttgtaatctgattcagttctgtaccattttaatttccacctttagtaattaattaccaatatagcacgttagagtatcttaacctataataccagaagcgcattttaggcttaccactaaagactctaacccacttttcctctgtctcttaacagaatggaaaatgatgtcatcattatttccattccttcatgagctataaaacctattaattaaaaaaaaactttttaattgactggacagcacctgcctgtattcagcatgaccacttgctccagcccctacactgaagcattaaggtcaaagtactgaacagttgttggtccctccacactttgtttttccagcttcgtcataatgtgaatattaatgtttaaaaaaaaaacctttattatattgtatttacaacactaggttacataactatagactactcttgccattaaaaaaaaaatctataatgnnnnnnnnnnnnnnnnn

SEQ ID NO: 21180 - DNA, 684 bp, Homo sapiens
ttatataggcatgagccactgagcctggcccaaaagcgtttttcttaaaggcccttagtgagataaattagatttggcatttcctgtcctgggccagggatctttttacaagagcccctgcccctttgttggaggcacaattttagaataaggaggaggagggagaagagaaaatgtaaaggagggagatctttcccaggccgcaccatttctgtcactcacatggacccaagataaaagaatggccaaaccctcacaaccctgatgtttgaagagttccaagttgaagggaaacaaagaagtgtttgatggtgccagagaggggctgctctccagaaggctaaaatttaatttcttttttcctctgagttctgtacgcgggtatggtagttttacattacttactggacattgtgggtgatagattttaaagtttatctcccactaaagaatgttgaattttgtcaagattggcagatcatcttgatcctatggatgctaggttttaggacacgttagggtgggcctacttctgttctgcccttagtccgatgacacaaatcttagtcatgggatagggctcttattcccaagatgtgacccttctaggggttcagtggaagtgtgaggggcctaccaagccctgaggtgttcattaagcccctctaaggcagaacttgtcct

SEQ ID NO: 21181 - DNA, 769 bp, Homo sapiens
  misc_feature 766, 767, 768, 769: n = A,T,C or G
cctatagggagtcgacccacgcgtccgattttctctacatagacctgatttttgacttttgtgaaattgtttatattgctaacatttatcattcagagaaaatattctgtaaatgttgatttaatgtaatagtttcccttaaaatagaatttatagagaatttgaaaagaaaaccacaagttaattcactttttaaaaaacttcatgtcatctgaatacttaagctgctttgtttggaaagtgtctttttaaagaaaatagttaataaaattacagtaagataattgtcacaaaataaaaatcttaggtggccagttgtgtattacagagatttggttttaacagttatacaagttatttaagtgggaaacattaatattaaattttattaagaaaaattttgacaccaaaaaatctgtccttcacttagaatataaaatgtatagctgaacaccagcaggtgtcactgtgataacatgttttccccccctgaacagttttatgtggatgggtgcataccaactatggacaaagatatttaggagataataaatgtaagttatatagctgaataaaaataccaaaatgtaggaaaagcctatgagttccatgttggttaggaatgctgtatttttttttttaggattgctgtatttttaggagaattgtatttttttctcgctttcttcatgtcgtaaacatacagtcttccattatgtaagtgatgtgctgttttattagcaataaaagtagagtaaaaatcccnnnn

SEQ ID NO: 21182 - DNA, 4702 bp, Homo sapiens
  misc_feature 1, 4699, 4700, 4701, 4702: n = A,T,C or G
ngtgctggaattcggcttcacagcttttctgctttacctgtccaggtagcctctgttttcatttcagtcttaatgaaaactttctaacttatatctcaagtttcttttcaaagcagtgtaagtagtatttaaaatgttatacttcaagaaagaaagactttaacgatattcagcgttggtcttgtaacgctgaaggtaattcattttttaatcggtctgcacagcaagaactgaaacgaatggggattgaactgctttgcctgttctttctatttctaggaaggaatgatcacgtacaaggtggctgtgccctgggaggtgcagaaacctgtgaagactgcctgcttattggacctcagtgtgcctggtgtgctcaggagaattttactcatccatctggagttggcgaaaggtgtgataccccagcaaaccttttagctaaaggatgtcaattaaacttcatcgaaaaccctgtctcccaagtagaaatacttaaaaataagcctctcagtgtaggcagacagaaaaatagttctgacattgttcagattgcgcctcaaagcttgatccttaagttgagaccaggtggtgcgcagactctgcaggtgcatgtccgccagactgaggactacccggtggatttgtattacctcatggacctctccgcctccatggatgacgacctcaacacaataaaggagctgggctcccggctttccaaagagatgtctaaattaaccagcaactttagactgggcttcggatcttttgtggaaaaacctgtatcccctttcgtgaaaacaacaccagaagaaattgccaacccttgcagtagtattccatacttctgtttacctacatttggattcaagcacattttgccattgacaaatgatgctgaaagattcaatgaaattgtgaagaatcagaaaatttctgctaatattgacacacccgaaggtggatttgatgcaattatgcaagctgctgtgtgtaaggaaaaaattggctggcggaatgactccctccacctcctggtctttgtgagtgatgctgattctcattttggaatggacagcaaactagcaggcatcgtcattcctaatgacgggctctgtcacttggacagcaagaatgaatactccatgtcaactgtcttggaatatccaacaattggacaactcattgataaactggtacaaaacaacgtgttattgatcttcgctgtaacccaagaacaagttcatttatatgagaattacgcaaaacttattcctggagctacagtaggtctacttcagaaggactccggaaacattctccagctgatcatctcagcttatgaagaactgcggtctgaggtggaactggaagtattaggagacactgaaggactcaacttgtcatttacagccatctgtaacaacggtaccctcttccaacaccaaaagaaatgctctcacatgaaagtgggagacacagcttccttcagcgtgactgtgaatatcccacactgcgagagaagaagcaggcacattatcataaagcctgtggggctgggggatgccctggaattacttgtcagcccagaatgcaactgcgactgtcagaaagaagtggaagtgaacagctccaaatgtcaccacgggaacggctctttccagtgtggggtgtgtgcctgccaccctggccacatggggcctcgctgtgagtgtggcgaggacatgctgagcacagattcctgcaaggaggccccagatcatccctcctgcagcggaaggggtgactgctactgtgggcagtgtatctgccacttgtctccctatggaaacatttatgggccttattgccagtgtgacaatttctcctgcgtgagacacaaagggctgctctgcggaggtaacggcgactgtgactgtggtgaatgtgtgtgcaggagcggctggactggcgagtactgcaactgcaccaccagcacggactcctgcgtctctgaagatggagtgctctgcagcgggcgcggggactgtgtttgtggcaagtgtgtttgcacaaaccctggagcctcaggaccaacctgtgaacgatgtcctacctgtggtgacccctgtaactctaaacggagctgcattgagtgccacctgtcagcagctggccaagcccgagaagaatgtgtggacaagtgcaaactagctggtgcgaccatcagtgaagaagaagatttctcaaaggatggttctgtttcctgctctctgcaaggagaaaatgaatgtcttattacattcctaataactacagataatgaggggaaaaccatcattcacagcatcaatgaaaaagattgtccgaagcctccaaacattcccatgatcatgttaggggtttccctggctattcttctcatcggggttgtcctactgtgcatctggaagctactggtgtcatttcatgatcgtaaagaagttgccaaatttgaagcagaacgatcaaaagccaagtggcaaacgggaaccaatccactctacagaggatccacaagtacttttaaaaatgtaacttataaacacagggaaaaacaaaaggtagacctttccacagattgctagaactactttatgcatgaaaaaagtctgtttcactgatatgaaatgttaatgcactatttaatttttttctctttgttgcttcaaaatgaggttggtttaagataataataggacatctgcagataagtcatcctctacatgaaggtgacagactgttggcagtttcaaaataatcaagaagagaaatatccttagcaaagagatgactttggggatcatttgaggaatactaactctgttgcattaatgcttcaaaaaatcatcaaatgattcatgggggcctgatttgcatttgaaaaatgtttgaaattagagtctcatttgtttcaggaatgcagctacctgagttttttgtctcggcaaagtcacaaagcccatatactcacattgtgtgtctatatttgccaattaattctaaacttctaggaaatatgccctctcttaaaggagaattttttttaaatctctgagaaatgagattctgagtttatttcagctaaaaggttgcaattcttctgaagatatctcaaatataaggttgaaagttaagtgttaataatttttgtgaatttatacacacctaaacgttaagtacacaaatattttatttgttttacaaataaggaataagtaatttataaattaagaagttacctataaaaataaaaagataacaaccctatcatatagcttatttttaaattacctgaaaaacgatattctacactgtttcctttttgactctgagttttcaaactgttacttctcccatatttctcaatccatttcactcagttgcacagtcttttaaaccctgtaattgtcataccaaagtttctttttaaaaaaaaattactttaaatgcttagtttattcaaagagcgatccaataatataaaaggaacatgtgttaaacacaataaaattttaaatggctctaaatcaagcacatcaagagtatacaagtcttaaaggctttttaatacatactcttttcccatctatgtaacccaacttgcacatttcagctgcatgtggtgaatatgcatcatatatttactttaagaggtaagattttacttgcaaaatacatgtgcaaattagggatccatcagttgatggaagagatggactctagaatattatttcttgtggttattactcctttacaaagcactttcgtctcacttgatcctcataaggaaactaaggctcagaatgagtagagctgggttcagaatctagctcttctaactccaagccatctcctctttccactgcaggaaactgcctcttttgtcagtgaaataatagaaagattgtgttagttaagtgataactgtcatttgtttgaaaatgttcgagactgaacaaatagcatttaaactgctggcatatagatgagatattgtacttttgtgcaatgtttattacctttgattaaattgtaatgtgaagcttttactaggtgaatagttcattatgtagtggaggcttcgtggttgtccattgaattgtcacagcaaaatctataagtttcttcaattctacaagatagatccatatacctttgatcacttggagactctttttttgctggtttctagataactcaggtaaatcagacctttacagagtacagggctaggtgaaagaattactgaaaaatcaccttgaaaatccgaagggctgatataccctttatgttcctgactgatgcgcagaacctgggggaaatctacagcaatatacaggttgcaatgctgataacacaacagcaatcctctcctctacgtggacttactgttgtttttttaattattattggaatgggattttagaaaatagaagttacctttgtgtgtgttttagggaaggtagagaagaatctgctctttctctgaatactgttttgaccccaggcaggaccttggaaaggccaaaacattaacagtagtacttctgttcactgaagagttatgttacatgaagataaaatggttttgtcgtgtttattattgtattttgtgttgatataaataaacatggtaatttaaacaatgaaccttaaaaaaaaaaaaaaggcccgagcnnnn

SEQ ID NO: 21183 - DNA, 573 bp, Homo sapiens
  misc_feature 1, 549, 550, 551, 552, 553, 554, 555, 556, 557, 558, 559,560, 561, 562, 563, 564, 565, 566, 567, 568, 569, 570, 571,572, 573: n = A,T,C or G
nagcgtgttcgcggccgaggtacgcgggagagcagcacgtagcaggcccccgtggaggatccacacagtggctgaacactgggaaggaactggcgcttggagtctggacatctaaaagttggtaaagtgactgtgtcaggaattggtgggttcttggtctcactgacttcaagaatgaggccgcggcccctcgcgctccattgggttagagtctccccgagcgagctggtctcggcaagtggcgtccattcgtggaggctcgaatccaggtcaaagggttgctggagcgacggttggaatggaaaactagctggaagacacccaagtactcttaaagcaatccccgtgttctggaggctgggaagcccaaggtcaagatgctgacaaatgatgagagctttcttgctgcatcctcacatggaagaaggtggaagggcaagagagaagaaactaatgcttggaaatgcctcttttaaaacggacttagtcccattaacaaagaagcaggtcttatggcctaaacatctcataaaagcaccacctgttaannnnnnnnnnnnnnnnnnnnnnnnn

SEQ ID NO: 21184 - DNA, 567 bp, Homo sapiens
  misc_feature 563, 564, 565, 566, 567: n = A,T,C or G
accttcttgagagatatcaaagaaagtccaatatccgttcttccccatcactctacagtgtatctagtaataattatttgtcttaatcataaggacaaataatgaaaattatatttcaaatttctaagcttttgtggttaaaaaaagcttctagaaactattgtttctcctcccatgcagttataatatgcttaactttctttaagatgggtgtttggtagtatcatttacaatatatttatttttgttttttaagcatgtttttatatttgtttaaggtggataggcatgtagacctgctagaagttgcccaggaaactgatgggttttcaggaagtgacctaaaagagatgtgtcgagatgctgccctcctctgtgttagagaatatgttaattctacatcagaagaaaggtatgttattttgacttgatttttaacacttgtcaaaatcttttagagcttttaggttagtttcttttattttgctttatattagaaacaccgcttatgaaataaaaagtaaatttggattatcaccccctgcaactttatttattggcannnnn

SEQ ID NO: 21185 - DNA, 5144 bp, Homo sapiens
ctctctgttatttgtgtgtgtgatttttatagtggagaaggcaaatgcaaaacccttccagatgcctgaaaaacagtgggtcctctgcagctacaggggattctagacattaactaaaggccagcaagcactcaagtgccccaagtgttttcctggtgtaaccatttgttaactacattttctctctttttacattttaggctgttaaagtaatttgacagaaaaaaatgagcaggttttttggatctaaaaagccactgtgacaagaaattttaataccattttgtaaaattttctaaggcgtattttataattagtttgttcccaatgtactgctacttgatttgcattttggtaactataaattttactcgaatcactgaaatatgataaaactgctggattttaagttaataatttaatatgctgaccaggatttaaatgctttcccctttccttaataaactggtcagtggaagtggaatcttaatattgttcattttagatgctatctgaaatctttgaaaacaaatgtgagcatttacaccataccttgtaaaagttgtgaaatgtctagtccttaacagagaagttgcctctggttttctaaagaaattaacttatatttataaatgggttaagacatgttatgtaatagtacctctgtctccatgatattaaagtgtatgagcccagttttaaggttttgtaatgtatagatagataaatttttgagttagtgtgttttggttaagcaatttcttttatgtcagtgtgcctgttgtaggataagaccatcaacagaaaatttacagaattcaaattcaggatgaataaaatagagtataggtcttggaacaagggtcaaatcatgtgagtaatatgtaaaacattttggttagcctgtaaatttaaattttttattggctaagtattatagttcccaatccctgaacataatacagtatatcatataaatgactttcataaatattttcaggccatagtaatttttctagacctatttttggaagtgaagtatttaggaatatacagtatatagaattaggggaatatttcattcagaattctattgttggtgaatttaattctggtatgatatgctgtattaatgttacctccagtaaatacaattccctccagatttagctattacacttcggtgttagctcttggtcagtgttttagaacagtagacatagtctacggtaaggaatagtcttaattggtaaaactaagatagctgaatttggaaggaactcttaatagtaatggatttggggattttttaggttccttggttaatgtttgtttcttttgtctgtttctttttctttcatttctacacattcatgcagtatttcatggttctatcaaagcagcagtaaaaaaaatactcttgacgcatgaaaattaactggtgaggggcctcattgctatttttaaattgtagttttatttttaaatagtctttttttaatcagaggatcagatgcatgacttttttttttttaatggatgcagatcttctatcaggtgtctcacaataaattcaagaggattttagtttgccagaaatgttgcaaatgcactaatttgagtaagatgttgatactgaatatatcctcttgagacataattttgcatgcaaaattatcccataatctttgtaggtttgttaatattgatgcattactgccctatatctaaatgatcttctcccccttcccctccataactcttggtatctaaattgatgacagctctgacacaagcaagataacagtgctgtgtagtatacatttgtttatattatcggcacttctcagtataggtggaaggaaccattacctttatttaacagtggtttttcttttttgttgttgtgttttacagttcttttccctggttcagcctgaactatataccaggccctgctgaaaataccacccaacagttttcttctgcagcttatccagtttctcttaagtgccctgtacatattgtatgttttatgatgagatgcagtttcttaatatgtattacagaaatactactggtatttgcaaatatgtagtttaattgtattattgaactctcattttgggggcttgggcacattaacagattaatccatctgtatagggcttttgctgttggatagaatttaaattgtctacataaatatttgttttaggacccttagattttatctgaatacacagattaggctttaaaaacagatatatatgtcatttttggcttaaggagtttggctaagttagcttttcaactggcactgtatggcagcattttttggtatggttagcatggcacatggcgaaacataaagcattttactgtacaggtaaggaatgtgccatgttgttttacctatctctctttctctctcactcccatgcacacatcctgtgtgtattcagagaccttcagaaacattcatattcattttcatgagtcagcaaaagccctacgcttgattccaacagaatatttcctttacatactttcttctcttaatttttacaaaatttgtatggtaggtgtaaaagaaaatcatagtaactgtaccatattattaacccctaaatcaaactttttttgtcttgtgtatcttgatttttctgtgtgctttatagtgaagcagccgacacgagtcgttgttcataaaacagcttttgaaagttgagagcacacccctggagaaccgactgtgcttgcttacgtttggttcatgacttaaaaatcgagtacaggagttattcctgatgaagctaaagctttgtctctgttggcaccagctaatgcagtggcaggtcttctgcctggtggtggactcctgcctactcctaacccacttacccagattggcgctgttccactggctgctttgggggctcctactcttgatcctgcccttgctgcacttgggcttcctggagcaaacttgaactctcagtctcttgctgcagatcagttgctgaagcttatgagtactgttgatcccaagttgaatcatgtagctgctggtctcgtttcaccaagtctgaaatcggatacctctagtaaagaaatagaggaagctatgaaaagagtacgagaagcacagtccctaatttctgctgctatagaaccagataagaaagaagaaaaaagaaggcattcaagatcaagatcacgttctaggaggaggaggactccctcatcttctagacacaggcggtcaagaagcagatcgagacggcggtcacattctaagtctaggagtcggcgacgatccaaaagcccaaggcggagaagatctcattccagagaaagaggtagaaggtcaaggagcacatcaaaaacaagagacaaaaagaaagaagacaaagaaaagaaacgttctaaaacaccaccaaaaagttacagcacagccagacgttctagaagtgcaagcagagagagacgacgacgaagaagcaggagtggcacaagatctcctaaaaagcctcggtctcctaaaagaaaattgtcccgctcaccatcccctaggagacataaaaaggagaagaagaaagataaagacaaagaaagaagtagggatgaaagagaacgatcaacaagcaagaagaagaagagtaaagataaggaaaaggaccgggaaagaaaatcagagagtgataaagatgtaaaagttacacgggattatgatgaagaggaacaggggtatgacagtgagaaagagaaaaaagaagagaagaaaccaatagaaacaggttcccctaaaacaaaggaatgttctgtggaaaagggaactggtgattcactaagagaatccaaagtgaatggggatgatcatcatgaagaagacatggatatgagtgactgaatattgcctctgagggagtccaactgtatacctgcatcagtgtcattcctttgtgtgatttcttaatgctgtatttgttcatctcaaacctagatgtatacagctctgagttataaatggttataaagctcctgttactcatattagttatttacatcaaaaagcttttagaaaatggtacgaggtaaccaattcttgtcatggtgaaatctgattgagtaaccaagcagttttactattctggtgctgcttcataacaaaaatgaaaagctgcatgcatctacagcaggcatggattggttatgtcgtatgatatcctttattaagtaagttcacttatagtatttctataatttgattcattgccgtaatagagccatgtaggaaatgcactgattgcatgttattgtggcaagaatatcctaaatgtcattaaaatcctccaacatgatggatctacttatggtcttgtttgttgacatgacaaattaacattcttatagttacatctggaaatgagcatttgaaatagataatcctttaagccttgtggcaaaatttttgtggcttttgtttaactttgaaaggttattatgcactaaccttttttggtggctaattagggtttaaatacagaaacaagatttcaaataaaactgtctttggcagtgagtaaatagcatattttgaagtagagttgtatactttttcataagatgtttgggaatttttttcctgaagtaataatttattccacatctacatcagtgaaagctatctacctatcctgagtctatcttaaaggaaaaaaagaaaaaaaccttatctcttgcccttattttgaattttccactctttcattaatttgttttaagctccgtgttggaaaaaaggggtagtgcattttaaattgaccttcatacgcttttaaaataagacaaatctacttgataatgtacctttatttgatctcaagttgtataaaaccaataaatttgtgttactgcagtagtaatcttatgcacacggtgatttcatgttatatatgcaaagtaggcaactgttttcttagttacagaagtttcaagcttcacttttgtgcagtagaaacaaaagtaggctacagtctgtgccatgttgatgcacagtttctgaaattgttttacaagaatttgataataaaacccttaaacttaaaaaaaaaaaaaaaaaaactggagtggcggccagg

SEQ ID NO: 21186 - DNA, 725 bp, Homo sapiens
  misc_feature 722, 723, 724, 725: n = A,T,C or G
acgcgggtgaatgaagccttagcaagtctgtccagagctcccctggtgccgcctggcatgctgctgatagtttgcaatgtcttcacaagaaatggtatcagaaacctcctgtcatatcagcatgggtctcttgcttcctgcaggaagggcgatatcctgggaggcacagaggtggagcccgagagacgcagtgttccagcgctgctcggctcaagactgggtcttttcttccgtatcctcaagcagcttcctttgacttactacttctttttgtttgtttttttcttcattgggctttaagcgttgcttctctttagtgtatgtgtgactgaagccaaacacaacattgctttccctttgcctgcaaataatcttgttgcccaagcccatctctgccattttcagtgacagctggctggccaatgagcctgagcactgggaatgcccagcagcgcacatctagggggctgctttatatttggagctagcaggtctcttttctagggctttccaggaaagatttagaattaaacattggatggattttgtgtgttcatttctttttccatcactgtgcctttattttcttggggctttcattaaaagcagaaaaacagataatggtagaaacatctatagcatgcatacaaagaagtaaaagatttttataattttttgccttaaaatatatctaatgctgtggcctctgagccattctcagnnnn

SEQ ID NO: 21187 - DNA, 2655 bp, Homo sapiens
  misc_feature 1, 2, 2650, 2651, 2652, 2653, 2654, 2655: n = A,T,C or G
nnacgcgtccgcgcgacggggcggtgcgcggagcctccagccgagcctagccctgcccggccccggaggacttgcaacactccgaggccaggaacgctccgtctggaacggcgcaggtcccagcagctggggttccccctcagcccgtgagcagccatgtccaaccccagcgccccaccaccatatgaagaccgcaaccccctgtacccaggccctccgccccctgggggctatgggcagccatctgtcctgccaggagggtatcctgcctaccctggctacccgcagcctggctacggtcaccctgctggctacccacagcccatgccccccacccacccgatgcccatgaactacggcccaggccatggctatgatggggaggagagagcggtgagtgatagcttcgggcctggagagtgggatgaccggaaagtgcgacacacttttatccgaaaggtttactccatcatctccgtgcagctgctcatcactgtggccatcattgctatcttcacctttgtggaacctgtcagcgcctttgtgaggagaaatgtggctgtctactacgtgtcctatgctgtcttcgttgtcacctacctgatccttgcctgctgccagggacccagacgccgtttcccatggaacatcattctgctgaccctttttacttttgccatgggcttcatgacgggcaccatttccagtatgtaccaaaccaaagccgtcatcattgcaatgatcatcactgcggtggtatccatttcagtcaccatcttctgctttcagaccaaggtggacttcacctcgtgcacaggcctcttctgtgtcctgggaattgtgctcctggtgactgggattgtcactagcattgtgctctacttccaatacgtttactggctccacatgctctatgctgctctgggggccatttgtttcaccctgttcctggcttacgacacacagctggtcctggggaaccggaagcacaccatcagccccgaggactacatcactggcgccctgcagatttacacagacatcatctacatcttcacctttgtgctgcagctgatgggggatcgcaattaaggagcaagcccccattttcacccgatcctgggctctcccttccaagctagagggctgggccctatgactgtggtctgggctttaggcccctttccttccccttgagtaacatgcccagtttcctttctgtcctggagacaggtggcctctctggctatggatgtgtgggtacttggtggggacggaggagctagggactaactgttgctcttggtgggcttggcagggactaggctgaagatgtgtcttctccccgccacctactgtatgacaccacattcttcctaacagctggggttgtgaggaatatgaaaagagcctattcgatagctagaagggaatatgaaaggtagaagtgacttcaaggtcacgaggttcccctcccacctctgtcacaggcttcttgactacgtagttggagctatttcttcccccagcaaagccagagagctttgtccccggcctcctggacacataggccattatcctgtattcctttggcttggcatcttttagctcaggaaggtagaagagatctgtgcccatgggtctccttgcttcaatcccttcttgtttcagtgacatatgtattgtttatctgggttagggatgggggacagataatagaacgagcaaagtaacctatacaggccagcatggaacagcatctcccctgggcttgctcctggcttgtgacgctataagacagagcaggccacatgtggccatctgctccccattcttgaaagctgctggggcctccttgcaggcttctggatctctggtcagagtgaactcttgcttcctgtattcaggcagctcagagcagaaagtaaggggcagagtcatacgtgtggccaggaagtagccagggtgaagagagactcggtgcgggcagggagaatgcctgggggtccctcacctggctagggagataccgaagcctactgtggtactgaagacttctgggttctttccttctgctaacccagggagggtcctaagaggaaggtgacttctctctgtttgtcttaagttgcactgggggatttctgacttgaggcccatctctccagccagccactgccttctttgtaatattaagtgccttgagctggaatggggaagggggacaagggtcagtctgtcgggtgggggcagaaatcaaatcagcccaaggatatagttaggattaattacttaatagagaaatcctaactatatcacacaaagggatacaactataaatgtaataaaatttatgtctagaagttaaaaaaaaaaaaaaaatgaccgtcgttttacaacgtcgtgactgggaaaaacctgggcgtttaccaaattaatcgccttgcagcacatcccccattcggcagctggagtaatagcgaagagggcccggacggacggccttcccaaaggtggcgcacccgtaaggggcgagggcaagggaacgcgaaatctggggaaaagccggtaacttggggagacacccacctgtaccaagacgacacgggaaaccccttcacagcacacaggccgtgggccgcgagagcannnnnn

SEQ ID NO: 21188 - DNA, 1027 bp, Homo sapiens
  misc_feature 1, 2, 3: n = A,T,C or G
nnnagtaggaggcccacccagtcccaccacacataccgggacatctttgaccacatgggtcctctgccgttcgtattttagcttagatgttcttaactgaactaacttccaattttcatatacactgatcatcttgtccctagcattttccctccaagatcctgctaacaggcaaactagccctttcaaacagttggtacctgagatttctcagagctctcttatcaagagtaaggagtgagattgcagaaggggcagtaatgtcaataccaagttattggaaactacttaaccagccactgcattacatactggagcccgtctaggacacttgcccttggaaatggtggaaagactttgttttatttctatttcatcaacagaacttttgtagcattgaatctaagcaaaggataacatcatattataatggaaagttatttttaactacaactgttattgttaaatttagaagaaaatattgtctttgaagtttcagtccaaaactctaaggagaacaaggtttttactgccatcggtaatcctgtgagaaatttgacactccagatcttatttgagacagataagtctatgataaatatatgtatgagacttaaaatattcttgatattctcaggttgttctcacaaattctgcatagatttagttgtttttttttttatgagaacctttcttatcaaaaaggattgaaaatttttccaacaactggttgttaaatgagtctagcacccaaagaagctgtgagcagttggttctaccagtgactcttctaggagctctttccaggttggtctcgaactcctgacctcaggtgatccgcctgccctggcttcccaaagtgctggtattacaggcatgagccactttgcccagcctgatagttctgactcaatccctagacacattcttcagaaacaactgtacatggtgagagaaaagtgaaaaggaaaaaagttttccttccttcaaaatacactaaatttgcttatcacctttaaaatttgga

SEQ ID NO: 21189 - DNA, 2164 bp, Homo sapiens
  misc_feature 1, 2136, 2137, 2138, 2139, 2140, 2141, 2142, 2143, 2144,2145, 2146, 2147, 2148, 2149, 2150, 2151, 2152, 2153, 2154,2155, 2156, 2157, 2158, 2159, 2160, 2161, 2162, 2163, 2164: n = A,T,C or G
nacgccgtgcgcacaattttaaccttacctaaatgtagtatttggagtgttaattttatttggctgctatgtgtgtgagacatcttgtctgagagattttaattgtaccattcagtgaaactaagactatgaatagtgatgcactgaaattacagcataagaacaaggtttacttttatatggtttcttgtttagagttattaagtatatggagaaataaatgtcttttaaatattttaaaacattacaaaacccacaatgtaaagttgccatgaggcagccaaaaataatacatatggcattcaggagagcagttgctaattggctgctgcctgagaaaatggtacacttggcgtctacttaacactgtgggtttggcagaaggccaaatttggggtcaggttgttgtgaatgaagctgcatgtggttagggaggagttaaagtgattcatgtcttagaagctctcgcacgttgagcagaggtgcgtgcatgggcctgagcgtggcagtcttcgtggccctggccacctcccagcacacggtgtgctcatcttacgtgaaggtcctttgctgctcttttcagtcctattttgtgctcatatgggagtaaatcattacttttaaaatattctagtagatggttttaaatacatgcctgaaattttcttttgttgcagaaggaatctggagaggaggtagaaattgaggaattctatgtgaaatacaaaaacttgtaagtaaattgtgattctgtttttaatggggggctatattttccaagtagtaaacgaccatttttttttaaagttgggaaattaagaaactttggtatgatttctttagtcatcatggcctgggaggccattttttaaccaacttttgtatgtttgatattttatgaatttttctggaaaatgtgtaattggtgtaaaagttgactaacttctgtgtataaccaataagtatttttttagagaggataaaaacttctacaataatagaaaaatgaataaagcagtatttccctgtcctctgatcatgaattctaccctgtggggctacacttcgtcccttcacctgtgcatagtgtgcgaggccctagagacaagaactctcctgtggaatgaaagctctagagaaccatgacatcactcaggttctaaaatgcagtgagctatagctttatctgtttttgtttgtttctgatatttatttagtagatttgaattcataacttaaaaatctgaattgaaaaacacggtgagttgttgtccttgtagattctgttgtaagcagtacacctggcccagacagatattgtgatgagctaggatgttttcagagtcagtaatcattctgctgaagaagactgaggccattttgtaacctaaataacaatcatagaacaaggacaaaaatgttcattgataatgtaaacattaaatttcttttttaccccttttaaggcaaagaactaaaccaccatattaatacattcttagggctttaaagagaggcttttgtgagttgctgtgcgaacagcctcagaaaatttaccccaccctagaaaatgaaagcatcaggtgccatgggttttctgtcattctctcttgttgtagttggcactgttaataaattgatgcacttctgaagaagttgtgagtaaaatcttttatcaagtaaaaagataaagaagtctctatcagttttatcatgagagttcaatgaaatacagtctgacaattttaaaaatgctcggaaaatgttaactgtcatcattcttttgtcctcagagcatgtcagtttacacatgtggaaattatgcctacaacacgatttcctatggtaaggaggaggtaaactaagtaaaccagagggagagagttcccttgtagatttaccaaattgaaacaagagcaaaggagttcaaatatcaatcaccaaaataatggcactaccagagagacctccagatcagtgtgtgacagtgaggcctgagctgcctccttccagtcagcctgttagtgaccccagagatgggctccgagttcctgaccaggtgccagtgccagaccaggagactctagccctcctcaaaagtcatttgaggtgaggtaaagggagttttgaaaaaannnnnnnnnnnnnnnnnnnnnnnnnnnnn

SEQ ID NO: 21190 - DNA, 2086 bp, Homo sapiens
  misc_feature 1, 2, 3, 4, 2086: n = A,T,C or G
nnnnaggagctcattcactttgaaagccaaaaagatagaatgttcatttgagcatttgcaaaatgttctcaatttatatttttaaaattttgatacatgtaagtttttctggcagattctttttgtatgttacaaaacaaaacatcaaaagctcagagtaagataagaatccctttttcttagaaaggtcaagcagatacttcttgacatcatgtcctttatacaatggcatattgttcatataaaaggtctcttatcctataaaaatcttgacaaaggcagccttctaatccaatgcgtccagtttccgttctgcggactgctacttgattgttgcaaacaagtacacctcctacaaattcagcttgaatcccctcccgtaagagaacttgcttgaagtctgacagccttggttcattcataaaaactgactgatgtccaggaacctcatgaggtggcaagggttccaaagtaggaatgatctcactttcttcacctgtttctttttcatcatctccgaacagacttttcatggccttttgttgtgctataacgctagaatctgagggagcttccacttgcatctctgagtcttctccatcatcctttagttctccttcttctaaaataacccctgtgtccactttggaaactctcatatctaagacaccatctatccaagctaattcagcatcttttgccttacaaaactgaagagagctgacaagtgagtcttttaacctcacctggtagatgtgagtttcactagtggcatcaactgtttcatgtagctttggcatgtacactttaatatctttcccaccaaaggcgcgacagcactctgccagatcttgactggcctctggtgggccatggacgatgatcaactgtcgtggtttcatctgattaatgatttttttaatggaatccccatcagagcgtccttcatagtctatgtaggtaacccgggcttttatttcaatagactctgttgtagaaatacatttagtaggaacatcagataaatcctgatccataggttcatctccatttgtcaaaccagattctaatttgcttttttcttcttcagtagcttgaagctctggcactaagaaatcctctggtttgataatctctccatattcatcccatttaattctttcttctggggcaggaaacataggataggacttttttgcctgtttgaaaaaacttcctttacgactgccttcacctttcatcatcaagtcatgcttcgtcttatgagctgatggctggtcaatatcttcctcaatatcactctcatcactggaatctatatctgcctcttttgactgctcaagctttttggcagcttctttctttagtttctctttttccaagtattcttcaagttctttcccttcaagcttcacacgtttcctcaactctatttctgtaattttttcagaaggattatcaattaggaaacgtgctaaagtcccaggagtagttctgtaggttagaatgattgagtttttagggtcctgacaccactgaataaagagatcccttgaaaatccgcattccaggtcaggttggctggcaagtacaactttagggctaggtacacgggccaagtcagaaagaccatgacataaagagagatggcgaaactgaaacggattatttcttttgtcttcaaaacatctcatcaatttatcactcatccattctacctgggacttagaaaactccaccacattgtaactgacattatttaggagtgccaatgagtaaacacccaatcctgcatctttagtcctccaaatctgatcaagaagttgagcaagttccaaaactctgcctgctgtgtccactgctattaacacatttccatcacctcgaagtgtttccaggacatttgtcagaagctgctcatctctctgttttcttctaggctgtacatatgtagcattgaatgaatctgtgataagtagggaaggcctgcttagcatttccagggaacatccatttaaatggatctccctcttgtggttgaagtcaactgcataaacaatttcttcttctccgtcgcgggcgtcgn

SEQ ID NO: 21191 - DNA, 2017 bp, Homo sapiens
cacccctcctctcctgtgttatattcaccatttacaaaaaaaaccctgcgcccccagttttgaaagggaaagtttttgtcccaaaaaggacaaattttgacccacatcaacccgctcttcccagataggccaccttaatagcagaatcctaagttcacccagtataattgtgtgaagcaaaatatccagaccagcatgatgaatatgaggcagaccaccctgccttaacccaataattccaccattatcattattgttatgactgtggtgggggctatttaaaggagtatccactctgcagcacagatgggggttccttcacctgaatcccctcaaaggctcttgaaataaatcacttgataataaaaggcaatccctgcatacccaccccgaccccaacagaatcaactgatgtcaagtttatatgcaaagggaaaaaatttcttttgtgcttggaatgaattttgaagaagcttattcccccctattgcttgtctccctttcttaaatcaggtaaagaagctgtacaggtttaattaagagcttatacaaaatgctggggtgctttattgacagtaacggcttgaaatcagttcatttccaaattgagtctctgggattggtgaaggactctacattttagaaattagcagatttaaagtaaaagcagatatgctcaaaagaagaaaagtgtgcttttctttgtccttaaaggaacttcattcatagcaaagcatgcacaaacaaggcctgtttaacaaacacagatctgcccgggccctactgtaacagaatcagggagggtacaagtcatcgttatcttgatctaactagaaagagaaagagagaaaaacagagagagagagcacaaatgtaccatattgtgtatatcatctgggatattttaaaggacaatttatctacctattaagtgtcactgggttctaaacaatgaaacttgttatctggatagcaaaaaacactaagttgtaaagccacaagcttcaattactttaaaaaaatgaaaaagccagtgtaaaaattcacactttgaaagaaaaaagttcacagtgatacctgggagcatcacttgctctgttttaggatttcccttaggaagtggcaagcgtctaaaacctcatttaaaaacaaaatgagctaagatgctgtctttctctgcagtttctgtttctttcagaggtggtgggtgagtgcgtaggtgagtgaacctccagtgtttacattgtgacatacaggctcagaatccacttgaataaggcataaagatactctgcagtattgacataaataaaaataacagcaaaaagtgttttatgtgccagtttaaaaaactaagacttcaagtctctgcaataaaaacctgccatgaaataaagtgttacatctcctattagatacagaacctgatgttaaaaaaacaacaacaaaaaagtaagtagttaactttacaagaggaagtacgattaataaatattcagataactagttaaaatgccaccaaaatgtagcaaaagcatcccaaactgcattacttgttaaattcaatacacactgacttttgctttggactgtgtgtgtgtgtcgggatgggggttggtgattatttttccatttttgtttttggtttactgagaatatttccatggagtacagaaggggaaagactttaagcaaccatgatgaccttggaaactggttatgtgccttatttaacatataattataattaaagttaactaaagtctattccatcttcctttactatggttgcaagtacccccaaaaaagatggtaagctagatttgacaataccacatgcttcaaaatttaggcttgggaattgaatcttttgttatcatatgtggatatataaaaacacatttttaactcttaaatgtattactactgtaataattagataaatttggtctcatcctattacatccaaattgccacttaaatgctggttttaaagtaagaagagcaaggatcggac

SEQ ID NO: 21192 - DNA, 598 bp, Homo sapiens
  misc_feature 584, 585, 586, 587, 588, 589, 590, 591, 592, 593, 594, 595,596, 597, 598: n = A,T,C or G
acactaattccaagcagcaaaggaacagggcagcacccagtgtaactgataaggtaattcatgccacacaagacgcattaggtgaacctggtggtgccctctgcctgtaggggaacaagagaaaactatccccagaatcagccacctcagcccctagtattttttctatcaatgccttgtatcagcctcaaagcagcctgttcaagttaactccctgttgaactccagggcctatacctctcttggctgaatagatataagaacatccttgcctgatgggttcatattcctcttcaattctgctgtctaaaagaagaagagatggacttctttcttccctgatccctgatacaaataatccctgggagagacagtaatttgaaaatgagtcattaatgctgtgtctacattacagagatataattcccattccaacagccaatatttattgccggtttattttagtcatctaccttaggaattcatttttggcaatgctgggttatgctgagtttatcttactaaaatagaatctgtgtcaaaaacccccaatgactttagcaacaattaaaccctgaagcacnnnnnnnnnnnnnnn

SEQ ID NO: 21193 - DNA, 2232 bp, Homo sapiens
  misc_feature 1, 2, 2231, 2232: n = A,T,C or G
nnctccaccgcggtggcggccggattgcctgaagtcagaagttcgagaccagcctgaccaacatggtgaaaccctgtccctacttaaaatacacaagagctgggcatggaggtggtgcgcgcctgtaatcctagctactcgggaggctgaggcctaagaatctcttgaacccaggaggcagaggttgtagtgagccgggatcacgccactgcactctagcctgggcgacagagagagagactgtctaaaaaaggaaaagaaaaaaatttatacgccaaaaaagatattctgagataacctgtagttaccactaactttgtgacaaaattataaaaatccacagccatctatgaatctgtaggcagacctgaagtttgaacgactggtgaagacatctgattttctttatagccaagttaggataacaaaatgcaaacaagtcattaatatttactatatgcaagatacagaaagatgaaggaaggagtaagaagttatccttcgtggaactattcaaagcaaaaatgcaaaataccagggaaagctttgaagaaccaagatttgagcaggttcttagaatatagattggattggatttgatttcaagaaagatgaacgtgtaaagcagaagtgggaagccaaaaacttttttccaaattagaattaagcattctttcaatgaacatttggaaatcaaggtagaaaaatatccctagggcctagctgaggagtctgtatgttgttgggttttgatagtaaccagtccaagattttgttattagacgtgggtttctgaatagacaggcatttctgaacagacatgacaggatcaaaacaatgtttgagcaaactgcccttcatctactgtggatatgttgggggatgatggaatatagtgaaagataatgggtgctcatacagcagtctagacttaaggtgattcaactactatatattaaactagattatcttttattttttaattttgaaatctggatgctcaagctctgcctgcacaaccacatgaggaagaaggaacaatgacaacaaaaataacactaaatttaaatttaagagtactacttttaggaaatagacaaaccattatttgggtacaactaaaggcaactggcatggactcaaatattttggggaagaaaaagactaaaagttctaaggaagaaaatgcgaaccttgatagtttgaaatagttaaaaagacagtgtagaaactgtttaggcagtttgattatggactattagatgatacttgggtctgataatggtataaggagaataaagtatttagggatccaatattacgcctgcagctttttccaaatagttcatgggggagggggatgtgtaagtggttaactgaagtctaactagataggtttgttgtaagcttaggatgtttacagttcttcatgttaagttgagcgtgatgggaagggaaagaatgctgatctttaaatttttgtccttagttaagttctgtatttagtgaattaattgcatcctaaaaagtcaaacttgaaaagcacattttaaatggcaaatctattttttacatgtttgtgaagtttttattttttagtaaacagaccatcagaagagaacaatggtacagagcaggggtcagcagatggattttgtaaagcatcaacttgtaaatattttcaagtttattagctgtatggctctggtttctgttccctgttccaaatgttaaagtctactgttgtattctaaaagcagccatggactgaatgtagctgtgttccaataaaacttacacaaaagcaggcagtgggccataatttgcaacacctgattcacagcataattttgtcacaaactgaaagtgttcctcaattaaagtgatttttttttcttgaaaaaaaaaaaaaaaaaactcgagggggggcccggtacccaattcgccctatagtgagtcgtattacaattcactggccgtcgttttacaacgtcgtgactgggaaaaccctggcgttacccaacttaatcgccttgcagcacatccccctttcgccagctggcgtaatagcgaagaggcccgcaccgatcgcccttcccaacagttgcgcagcctgaatggcgaatggcaaattgtaagcgttaatattttgttaaaattcgcgttaaatttttgttaaatcagctcattttttaaccaataggccgaaatcggcaaaatcccttataaann

SEQ ID NO: 21194 - DNA, 753 bp, Homo sapiens
acctgctttgtcacataacgtgactgaaaatgactcttgcagacctcactattttattttcaactcacaggtaactaaatatgcttattttctcaaaagaagagtttagggaagaaaagagggaagctattcactcccagggtaaagggaggaggataataggtgctttatagaaaacatgtgattagctaattattgaggactgtgaagaaagttttggtttacatctgaaaatagattgagaattgagataatcgtatggtgctaataattgacacattcagaagtgaggatattgatcatacttcatgaacggattagaagaatggaagctaattacacaaaggaaacttaggctttgattctaagattgtttacataaaatatatgctgcggaaatgtgacagcatgagttcgttacatcagaattaagtagatttttacgttttctttcagactgtctatgctgtgccaattctgatcttttcatttgtctgtcatcctgctgttcttcccatctatgaagaactgaaagagtgagtatttcatttttacataaatttgagaaaatattagacaattgctgtaactgctgctgaaatatatatttgaattttctcttgaattacatagccgcagccgtagaagaatgatgaatgtgtccaagatttcattttttgctatgtttctcatgtatctgcttgccgccctctttggatacctaacattttacggtaagtaacgcctccttta

SEQ ID NO: 21195 - DNA, 2716 bp, Homo sapiens
  misc_feature 2694, 2695, 2696, 2697, 2698, 2699, 2700, 2701, 2702, 2703,2704, 2705, 2706, 2707, 2708, 2709, 2710, 2711, 2712, 2713,2714, 2715, 2716: n = A,T,C or G
gcgtccggtcctgcagctgtccagttatcttttgactgccacatatggaccccaaaagatctcaaaaggaaagtgtcctcattacaggaggaagtggctattttggttttcgcctgggctgtgccctgaaccaaaatggagtccatgtgattctgtttgacatcagcagccctgctcaaaccattccagaaggaatcaagtttatacaaggagacatccgccacctgtctgacgtagagaaagccttccaggatgcagacgtcacttgtgtgttccatattgcctcttatggtatgtcagggcgggagcaactcaatcgaaacctgatcaaagaagtcaacgtcaggggcacagacaacatcctccaggtttgccaaaggagaagggtgcccaggttagtttacaccagcactttcaatgtcatctttggaggtcaagttatcagaaatggggatgaatctctgccctacctgcctcttcacctccaccctgatcactactctcggacaaagtcaattgcagagcagaaggtgctggaggcgaatgctacacccctggacagaggcgacggtgtcttaagaacctgcgctctgaggccagctggcatctatgggcctggagaacaaagacaccttcccaggatagtcagctacatcgagaagggtctgttcaagtttgtctacggggaccccaggagcctggttgagtttgtccacgtggataacttggtgcaggctcacattctggcctcagaagccctgagagctgacaagggccatattgcctctgggcagccctacttcatctcagatggcagacccgtgaacaactttgagttcttccggcctctggttgagggcctgggctacacattcccgtctacccgcctgccattgaccttggtctactgctttgcttttctaacagagatggttcacttcattttgggtcgactctacaacttccagcccttcctcactcgcactgaagtttacaaaactggtgtcacacattattttagcttagagaaagccaagaaagagctaggttataaggctcagccatttgacctccaggaagcagtggaatggtttaaagcccatggtcatggcagaagttctggaagtcgtgactcggagtgttttgtttgggatgggctattggtcttcctcctgattatagcagttctcatgtggctgccttcttctgtgattctgtcactgtgaaggaggggccagaaataaggtgatcacagttggctgagatggttctcaagaaacatgggttttaaaatgtgtacagtgatatctggtgccaaacattggctcttcaaattgctacttaagaataggttcttggattgaatctttatgtcttatttccttgcactaatccagatgggaatgaaaaagcagaagcagagattagtttgaaaaaaaaaaaaaaaaaagcttaggggttgggtgggtaccatagaagtcagtttggagccatagaagtaggcttagttgagttggagatgcccatcttgaatttctgagagggcaagatatacttatttccattttatgcagtctgcatctacctaaaacctctgactgatgtgggaatggcgaaacactatcaggcttgaatgcgtgtgaaaaacaccaaattggcccagatccctaacagagcaatcctcgaggggatggtggctattgctggagaggcattagctattcacagggtacgttttaggtgttaacttttgccctttatgatatcagggcattatgcctatgtgaacacatggtaatgtttgatgtttaaggcctttattctacctcataggattctttttgaggattaaattcaagcatacaaagcgctcctcaacacacatagccccctattctttttatcagaattgtcatggtacattccttatgagggctttcttcctcagtgttctctttagagggctattgctactggactttctgcaatgtcttttgggtgtgccctcagagcctgcaacaagtgtatttggatatactctatttgtaaagtttaggcctctaagaaggcctcaatgaagcaactaaaaatctgatgattaagggagtcaatcaagctgatgccatttttagtttaaaaatgaagcagagctctaaactcatagatgggttttcttactgggaagaagattggctctctgaagacagcttccaatgaggaatgtattgaacaatggcagcactgtctggccacccacaaactgttacagatgatccagttacactgttgcataggaacccaagtggaaagaagacagagtccatgtctgtccatggctccagctacagaaaggatagtatgggaacattacaagggggatacattactgtggaaagttctgctagagttagtcttgagagtatctgtaaaatacaaatagatgagcaatccctgtggaatgctgcctggatattttcagaaaagctctgaacttgatgtcgtaataccaacaccgtgaatatcgtgtgtggccttaaccaaggaacagaagccctttagaacttagcttcctcacttgggagctgggactgactgcatttgccctttgtataaacccacccaccccatagggttcactgggagcataaagcaagatgtggtgaaagtacttctaatataaattgcaacatcagnnnnnnnnnnnnnnnnnnnnnnn

SEQ ID NO: 21196 - DNA, 789 bp, Homo sapiens
  misc_feature 1, 2, 785, 786, 787, 788, 789: n = A,T,C or G
nntacagattgtctcagttatacaagtggcaagaagaggacagtggaccagctcctgggaccttccaaaacattggctttgacatctgccaagatgatgattccatccacctggagtccatctatagtaatttccagccctccttgagacacatagaccctgaaacaaagatccgaattcagaggcctcaggtaatgacgacatcattttaaggcatggagctgagaagtctgggagtgaggagatcccagtccggctaagcttggtggagcattttcccattgagagccttccatgggaactcaatgttcccattgtaagtacaggaaacaagccctgtacttaccaaggagaaagaggagagacagcagtgctgggagattctcaaatagaaacccgtggacgctccaatgggcttgtcatgatatcaggctaggctttcctgctcatttttcaaagacgctccagatttgagggtactctgactgcaacatctatcaccccattgatcgccaggattgatttggttgatctggctgagcaggcgggtgtccccgtcctccctcactgccccatatgtgtccctcctaaagctgcatgctcagttgaagaggacgagaggacgaccttctctgatagaggaggaccacgcttcagtcaaaggcatacaagtatctatctggacttccctgctagcacttccaaacaagctcagagatgttcctcccctcatctgcccgggttcgtaccatggacaacgctatctctttcccgggatcctctannnnn

SEQ ID NO: 21197 - DNA, 3127 bp, Homo sapiens
  misc_feature 3001, 3022: n = A,T,C or G
gcgtccgcctctgcacccaagcctgggcgacacagcgagaccctctctcttaaaaaaaaaaaaatagcagagctcaccaaagtgatgttcacctttttatgacattcctttttcttagcttaagaaaagaaagctgctagatgagagtcttagttttcctgcataagacctcctttatgaatagaataaaagactgtcaaagtaggctgggcttgggcccaggctaatctatgaaggaagcaagctcgtgttccttacctatccttttggtgtccattggattgtgccccgaagtggcctttacccttgagccgtccccagccatggtgctcacacataggcttttgagctccttggagctatccagatcctgctcacttttccttcctgagatcagaacaaatcacccccttactcccactccaaacaaggccttgatgataaactaatccttcctaaaatgctggtaggtaaacaagcaatgatgaagcattgaacacaggttaactcctgacttttgtaccattgtctattccattacacattaacatgactctgaatgccagatccaaacctttgcccaccatctgcttgtcgtgcaacagttgaggcagtaaccaggggagattcacttcctgtcttgtccttccccagggatcacccccctgctgccctctagcagccaaactcagatgagttccattgttaccctaggtgtgcccatctctttggtagggaaggagaaaggtaagaatagccatcagtgaggaaggattcttggagcgaggagccactgtggtttttcctgctatttaagatgttgagaccggataactttagaaagatacctgcacaaacccataaatagtgcttttataaagtttagttcaccggaacctgagttcagtatttgacattagctttttgtccaaagagttgaagcctgctggaggtctttgctcaaataataaataccacatatttccaagtgtgttcaggtataggcactaggtactgtctgtttacttcatgttaggcacattacatgcattggctaatcaaatcctcatcaattacatatgtaataatctaaacttgcctccttgtattataaatggaaataatcctgtttatttaaacgggttttcatgtacctgtagggattaggaaactcaaatggcctttttaatacctttccctagtttgagctccctgttctctttaacagataaaacaacatatttgcttcagcctggaatctgtttttggtgctttggtgcagagacaggaaatgggcactcagagtcacactggtagttgcacactgtatctacagagggcgtgtctcatctgtactctgctgggttacaggatttcagtaggtatttgtgtccacctgagaattctgtttattacctttcatttgacagtgtctttcctttctgcagttgattttgctagagaggcaattcataaggtgaggtcctgttcatagtatgacttgctttctcaatatctccttcaatttttagtaactcttggtctatttggtgtctttaaaaaaaataacctagtaataaagacttcttttaatgtggaaatgtggtctggtagtaagttatttctttccacatgtaactgacccaatctggtttccaaatgagaagtgtgcaggccccagaggttgagaagccatatttcaactgtgaaaaaaatctgcttcctgcatctgttgaaatatagttgttcatacttgccatcccttatctttcttgtaacaatttgcacagttcttgccagaataaatgccattatctgtatgtttcagggagttccccaatttgatcatttttgtgtgtgtgtggtgtgtgtgtgagagagagagatactgcagtaaaacatttctaaaggatgaaagctcttgtatggcatagatatgaattccttcctctggtaataattaggttattcccagaagcacagtgtcattctttaaataaaagctttcctgtttaaagcttttcaaaggagcagaccaccttgaagattccccctagggttgatatgtgtctaattcattttataaaaattattcttgtcttcattttaaagctttggctatatagtcagaaatgtcctaaataacaaactattttgtatttaatttagggaagactaaagggaagaaaaatgaaaactcagtctttatgtaagctccaaggatattagggcttaaagggcttttctagttttatgagaatttgtactactgatttttatatattcctgtttttgagatgaacagatctctggggaaattgttgagttacaatggcatttcactgtgatccctctcaagctcagatcagttctataacccaatgacaacctgtctctttggtttactgtcctgtgaaatgtcagctcaagtttcccagaagtcgtgtgtttatgatgagtcagagtgcttttcctcggtgggacagttgctggccctcttaattttggtgtatgtgcttccaagtatctaaacctccagtctgatctgtatatgttccgacacataatctctgtctcttggacctgccaccatcactttctgggtcaggattggaattgggatggaatgggacagttgtctataaaactctagtgtaaatattaaaaaaaaaaaaaaaaaaaaactcgagggggggcccggtacccaattcgccctatagtgagtcgtattacaattcactggccgtcgttttacaacgtcgtgactgggaaaaccctggcgttacccaacttaatcgccttgcagcacatccccctttcgccagctggcgtaatagcgaagaggcccgcaccgatcgcccttcccaacagttgcgcagcctgaatggcgaatggcaaattgtaagcgttaatattttgttaaaattcgcgttaaatttttgttaaatcagctcattctttaaccaataggccgaaatcggcaaaatcccttataaatcanaagaatagaccgagatagggntgagtggtgttccagcttggaacaagagtccactataaagaacgtgactcttaagggagcccccgatttagagcctgaccgggaaagccgcgaacgtgcgagaaa

SEQ ID NO: 21198 - DNA, 1188 bp, Homo sapiens
caacaaatgaaagtctacagctggtaaaccatgaagcaaattctgtggcagtggatgttattcctcatgtgacaacccaacctttgaagaagacgaaactcctaatcaagagactgctgttcgagaaattaaatcttaaaatctgtgtaaatagaaaacttgaaccattagtaataacagaactgccaatcagggcctagtttctattaataaattggataaatttaataaaataagagtgatactgaaagtgctcagatgactaatattatgctatagttaaatggcttaaaatatttaacctgttaacttttttccacaaactcattataatatttttcataggcaagtttcctctcagtagtgataacaacatttttagacattcaaaactgtcttcaagaagtcacgtttttcatttataacaattttcttataaaaacatgttgcttttaaaatgtggagtagctgtaatcactttattttatgatagtatcttaatgaaaaatactacttctttagcttgggctacatgtgtcagggtttttctccaggtgcttatattgatctggaattgtaatgtaaaaagcaatgcaaacttaggcgagtacttcttgaaatgtctatttaagctgctttaagttaatagaaaagattaaagcaaaatattcatttttactttttcttatttttaaaattaggctgaatgtacttcatgtgatttgtcaaccatagtttatcagagattatggacttaattgattggtatattagtgacatcaacttgacacaagattagacaaaaaattccttacaaaaatactgtgtaactatttctcaaacttgtgggatttttcaaaagctcagtatatgaatcatcatactgtttgaaattgctaatgacagagtaagtaccactaatattggtcattgatcttcgttcatgaattagtctacagaaaaaaaatgttctgtaaattagtctgtgaaatgtttcaaacaatgtgactttgaaatctggttatgtttgacttaaagggtaaatacattagataaataaatttgtcggtactataaatttgtggatgctctctggggtggaaagacgggggaaccgggccgaataagtgaggtctcacaagtaataggttaaaagcgttggcgggggggtgaagggctaggcaaacg

SEQ ID NO: 21199 - DNA, 2289 bp, Homo sapiens
gtccggcggaatttaaggaccatagtacagctatggatactgaaccaaacccgggaacatcttctgtgtcaacaacaaccagcagtaccaccaccaccaccatcaccacttcctcctctcgaatgcagcagccacagatctctgtctacagtggttcagaccgacatgctgtacaggtaattcaacaggcattgcatcggccccccagctcagctgctcagtaccttcagcaaatgtatgcagcccaacaacagcacttgatgctgcatactgcagctcttcagcagcagcatttaagcagctcccagcttcagagccttgctgctgttcaggcaagtttgtccagtggaagaccatctacatctcccacaggaagtgtcacacagcagtcaagtatgtcccaaacgtctatcaacctctccacttctcctacacctgcacagttaataagccgttcccaggcttccagttctaccagcggcagtattacccaacagactatgttactagggagtacttcccctaccctaacggcaagccaagctcaaatgtatctccgagctcaaatgctgattttcacacccgctaccactgtggctgctgtacagtctgacattcctgttgtctcgtcgtcatcgtcatcttcctgtcagtctgcagctactcaggttcagaatttaacattacgcagccagaagttgggtgtattatctagctcacagaatggtccaccaaaaagcactagtcaaactcagtcattgacaatttgtcataacaaaacaacagtgaccagttctaaaatcagccaacgagatccttctccagaaagtaataagaaaggagagagcccaagcctggaatcacgaagcacagctgtcacccggacatcaagtattcaccagttaatagcaccagcttcatattctccaattcagcctcattctctaataaaacatcagcagattcctcttcattcaccaccttccaaagtttcccatcatcagctgatattacaacagcagcaacagcaaattcagccaatcacacttcagaattcaactcaagacccacccccatcccagcactgtataccactccagaaccatggccttcctccagctcccagtaatgcccagtcacagcattgttcaccgattcagagtcatccctctcctttaacagtgtctcctaatcagtcacagtcagcacagcagtctgtagtggtgtctcctccaccacctcattcaccaagtcagtctcctactataattattcatccacaagcacttattcagccacaccctcttgtgtcatcagctctccagccagggccaaatttgcagcagtccactgctaatcaggtgcaagctacagcacagttgaatcttccatcccatcttccacttccagcttcccctgttgtacacattggcccagttcagcagtctgccttggtatccccaggccagcagattgtctctccatcacaccagcaatattcatccctgcagtcctctccaatcccaattgcaagtcctccacagatgtcgacatctcctccagctcagattccaccactgcccttgcagtctatgcagtctttacaagtgcagcctgaaattctgtcccagggccaggttttggtgcagaatgctttggtgtcagaagaggaacttccagctgcagaagctttggtccagttgccatttcagactcttcctcctccacagactgttgcggtaaacctacaagtgcaaccaccagcacctgttgatccaccagtggtttatcaggtagaagatgtgtgtgaagaagaaatgccagaagagtcagatgaatgtgtccggatggatagaaccccaccaccacccactttgtctccagcagctataacagtggggagaggagaagatttgacttctgaacatcctttgttagagcaagtggaattacctgctgtggcatcagtcagtgcttcagtaattaaatctccatcagatccctcacatgtttctgttccaccacctccattgttacttccagctgccaccacaaggagtaacagtacatctatgcacagtagcattcccagtatagagaacaaacctccacaggctattgttaaaccacagatcctaacccatgttattgaaggctttgtgattcaggagggattggagccatttcctgtgagtcgttcctctttgctaatagaacagcctgtgaaaaaaacggcctcttttggataatcaggtgataaattcagtgtgtatcagccggagctacaga

SEQ ID NO: 21200 - DNA, 438 bp, Homo sapiens
  misc_feature 438: n = A,T,C or G
acaattttgcctagggccagcttgagatataactgtttgtataaggtttgtataaggttgcagtgagccgagatcatgcagagaaccctaaatgcagagtaattatcacttatagacattcatcattactatatcaactctgtgacgaggggaataatgtgctatttacattaaatgtgcagtttataaatcaaaaaatggatttcagtagagtaaagtcgggtagaatgagagatatatttaccaaaaaatcaaaaacaaaaaagagtcctattcagccctggagtctaggttccaatcatttctaggatacagatattcaatatacaatatagttcttgctgtgctaaaagaatagaattattggagacgaccagtatgtattgtttttcataatatgacctctgccagaaaaattgtgatcttgcaagttttagn

SEQ ID NO: 21201 - DNA, 2288 bp, Homo sapiens
ttttttttttttttaatttttttttttttttttttttttttttttttttttttttttttttttttttgcttgggggagcatggagtttattcaggggtggggacaggcgggcggctcagtagcaggtgccgtccacctccgccatgacaacagacacattgacatgggtgggtttacccgccaagcggtcgatggtcttctgtgtgaaggccagcggcagggcctcgtggcccaccatgcaggagaaggtgtcccccttcttccagtcctcggctgccacgcgcagtatgctggtcacagcgaaggtggtggtgccctggctgggctcctgccgggatgcccaagtcaggtacttctcgcggggcagctcctgtgacccctgcagccagcgaaccagcacatccttggggctgaagccacgtgccaggcacgtcagcgtcaccagctcgttcagggccagctcctccgacggcggcggcagcaggtggacctcgggccggaatgtgtttccggattttgtgatgttggcggttagcggggtcttcaactcggggtaggcagcagtgcaagtgaaggtctccccatggttccatggctgggcacagccaggcaggacactggacacgctgtagcagccacagaggtcacgctcaggtggtccttgaacagcgctcttcccacttgagggcgtccaggtgaaggtgacaccagaggcatctctcaggccggtcagtgtgcacgtgaggttcgcttctgaacctaagagcaggtcctcgagggccggtcggtgcagtgacagtcgggggtggcagcatgagggagatggggtaggtggagttgagggagatggggtaggtggagttgagggaactgggcagggcacagtcacatcctggctgggattcgtgtagtgcttcacgtggcatgtcacggacttgccggctaggcactgtgtggccggcagggtcagctggctgctcgtggtgtacaggtccccggaggcatcctggctgggtgggaagtttctggcggtcacgccctgtccgctttcgctccaggtcacactgagtggctcctgggggaagaagccctggaccaggcaggcgatgaccacgttcccatctggctgggtgctgcagaggctcagcgggaagaccttggggctggtcggggatgctggggagacggtgaccagggttccctggccccagatattcaaagtaataaccaatactatcatagcctatggcaggggtcgcacagtaatacacagccgtgtctgcagcggtcacagagctcagcttccagggagaactggttcttggacgtgtctacggatatggtgagtcgactcttgagggacgggttgtagttggtgtagtctgttgttcccactataaaagatacgcccaatccactccaggcccttccctgggtgctggcggatccagccccagtagtaactactactgctgatggaggcaccagagacagtgcaggtgagggacagggtctgtgaaggcttcaccagcccggggcccgactcctgcagcagcacctgggacaggacccatctgggagctgccaccagcaggaggaagaaccacaggtgtttcattttcttgcacaggaggtccaggacctgctcttaggttcagaagcgaatctcacgtgcacactgaccggcctgagagatgcctcaggtgtcaccttcacctggacgccctcaagtgggaagagcgctgttcaaggaccacctgagcgtgacctctgtggctgctacagcgtgtccagtgtcctgccgggctgtgcccagccatggaaccatgggaagaccttcacatgctttgctgcccacaacgagttcaagacgccactaaccgccaacatcacaaaatccggaaacacattccggcccgaggtccacctgatgccgccgccgtcggaggagctggccatgatcaagctggtgacgcttacgtgcctggcaagtggcttcagccccaaggatgtgctggttcgctgtatacaggggtcacaggagctgccccgcgataagtacctgacttgggcatcacggcaggagtccaatcaaggcaccatcacctttcgttgtgaccagcatagtgcgcgtggcaactgaggattggaacaagggggactccttttcgtgcatggtgggccactaggccctgccgctggccttcgcacaaaagaccatcgtccgcttggcgggtaaaaccacccatgtcaatgtgtctgttgttatgacggaggtggacggcacc

SEQ ID NO: 21202 - DNA, 1603 bp, Homo sapiens
agtcgacccacgcgtccggaagaaaatctcatttgaaaagcccagaactattctgttacacagaagaccaggaaagagaagtttaaaaccaagtctaagaaaagtccccagggtcacacagttcataagcgacagagccaggattccagcacctggtctgaatgacccagaagccaggacttttcccccgcacctctacatcaggcgtgctggagcaggaagcggggagcagtggtgtgtgagagccaggcgtccctctgcctgcccactcagtggcaacacccgggagctgttttgtcctttgtggagcctcagcagttccctctttcagaactcactgccaagagccctgaacaggagccaccatgcagtgcttcagcttcattaagaccatgatgatcctcttcaatttgctcatctttctgtgtggtgcagccctgttggcagtgggcatctgggtgtcaatcgatggggcatcctttctgaagatcttcgggccactgtcgtccagtgccatgcagtttgtcaacgtgggctacttcctcatcgcagccggcgttgtggtctttgctcttggtttcctgggctgctatggtgctaagactgagagcaagtgtgccctcgtgacgttcttcttcatcctcctcctcatcttcattgctgaggttgcagctgctgtggtcgccttggtgtacaccacaatggctgagcacttcctgacgttgctggtagtgcctgccatcaagaaagattatggttcccaggaagacttcactcaagtgtggaacaccaccatgaaagggctcaagtgctgtggcttcaccaactatacggattttgaggactcaccctacttcaaagagaacagtgcctttcccccattctgttgcaatgacaacgtcaccaacacagccaatgaaacctgcaccaagcaaaaggctcacgaccaaaaagtagagggttgcttcaatcagcttttgtatgacatccgaactaatgcagtcaccgtgggtggtgtggcagctggaattgggggcctcgagctggctgccatgattgtgtccatgtatctgtactgcaatctacaataagtccacttctgcctctgccactactgctgccacatgggaactgtgaagaggcaccctggcaagcagcagtgattgggggaggggacaggatctaacaatgtcacttgggccagaatggacctgccctttctgctccagacttggggctagatagggaccactccttttaggcgatgcctgactttccttccattggtgggtggatgggtggggggcattccagagcctctaaggtagccagttctgttgcccattcccccagtctattaaacccttgatatgccccctaggcctagtggtgatcccagtgctctactgggggatgagagaaaggcattttatagcctgggcataagtgaaatcagcagagcctctgggtggatgtgtagaaggcacttcaaaatgcataaacctgttacaatgttaaaaaaaaaaaaaaaaaaaaaaaaaaaaaaaaaaaaaaaaaaaaaaaaaaaaaaaaaaaaaaaaaaaaagaaaagaaaaaaaaaaaa

SEQ ID NO: 21203 - DNA, 445 bp, Homo sapiens
  misc_feature 1, 2, 3, 4: n = A,T,C or G
nnnnacacatttttatctaattttttaattatactttaagttctgagatacacatgtatacatatgtaactaacctgcacattgtgcacatgtaccctaaaatttaagtataataataatttaaaaaaagagcagagagacattgaataatggggaaaaggagccccaaagcctgattaatgatgatgtatgtgatgtttacccaaaataaaaagtccaaggtgaacttaccacaaatgaataataaacacgaagacaatcaccttgcctacaaaacaataatcctgagtacaccaataacagaggagtttggctttctcctgaaagttcctgaagtcactgaaggatattagggagtaacactgtcagagtgcttctagaaagcctgctgtggtaacattgagcaacagagaggagaccagctaggtataggaggcaggttagt

SEQ ID NO: 21204 - DNA, 2918 bp, Homo sapiens
  misc_feature 2895, 2896, 2897, 2898, 2899, 2900, 2901, 2902, 2903, 2904,2905, 2906, 2907, 2908, 2909, 2910, 2911, 2912, 2913, 2914,2915, 2916, 2917, 2918: n = A,T,C or G
gggagtcgacccacgcgtccgacctccgtggatggacactgcctcttagaactagaacttagaactttatcttgaaaatgtaccactgttgcagaagctcctcacagagtatgtgtcaggcatttttaacctgctaaaggcaagaagaagtgttcaccacatagttgcaaaggtcttcaacttgccacagccaacagaaaaatcaaaatgattgaaccctttgggaatcagtatattgtggccaggccagtgtattctacaaatgcttttgaggaaaatcataaaaagacaggaagacatcataagacatttctggatcatctcaaagtgtgttgtagctgttccccacaaaaggccaagagaattgtcctctctttgttccccatagcatcttggttgccagcataccggcttaaagaatggttgctcagtgatattgtttctggtatcagcacagggattgtggccgtactacaaggtttagcatttgctctgctggtcgacattcccccagtctatgggttgtatgcatcctttttcccagccataatctaccttttcttcggcacttccagacacatatccgtgggtccgtttccgattctgagtatgatggtgggactagcagtttcaggagcagtttcaaaagcagtcccagatcgcaatgcaactactttgggattgcctaacaactcgaataattcttcactactggatgacgagagggtgagggtggcggcggcggcatcagtcacagtgctttctggaatcatccagttggcttttgggattctgcggattggatttgtagtgatatacctgtctgagtccctcatcagtggcttcactactgctgctgctgttcatgttttggtttcccaactcaaattcatttttcagttgacagtcccgtcacacactgatccagtttcaattttcaaagtactatactctgtattctcacaaatagagaagactaatattgcagacctggtgacagctctgattgtccttttggttgtatccattgttaaagaaataaatcagcgcttcaaagacaaacttccagtgcccattccaatcgaattcattatgaccgtgattgcagcaggtgtatcctacggctgtgactttaaaaacaggtttaaagtggctgtggttggggacatgaatcctggatttcagccccctattacacctgacgtggagactttccaaaacaccgtaggagattgcttcggcatcgcaatggttgcatttgcagtggccttttcagttgccagcgtctattccctcaaatacgattatccacttgatggcaatcaggagttaatagccttgggactgggtaacatagtctgtggagtattcagaggatttgctgggagtactgccctctccagatcagcagttcaggagagcacaggaggcaaaacacagattgctgggcttattggtgccatcatcgtgctgattgtcgttctagccattggatttctcctggcgcctctacaaaagtccgtcctggcagctttagcattgggaaacttaaagggaatgctgatgcagtttgctgaaataggcagattgtggcgaaaggacaaatatgattgtttaatttggatcatgaccttcatcttcaccattgtcctgggactcgggttaggcctggcagctagtgtggcatttcaactgctaaccatcgtgttcaggacccaatttccaaaatgcagcacgctggctaatattggaagaaccaacatctataagaataaaaaagattattatgatatgtatgagccagaaggagtgaaaattttcagatgtccatctcctatctactttgcaaacattggtttctttaggcggaaacttatcgatgctgttggctttagtccacttcgaattctacgcaagcgcaacaaagctttgaggaaaatccgaaaactgcagaagcaaggcttgctacaagtgacaccaaaaggatttatatgtactgttgacaccataaaagattctgacgaagagctggacaacaatcagatagaagtactggaccagccaatcaataccacagacctgcctttccacattgactggaatgatgatcttcctctcaacattgaggtccccaaaatcagcctccacagcctcattctcgacttttcagcagtgtcctttcttgatgtttcttcagtgaggggccttaaatcgattttgcaagaatttatcaggatcaaggtagatgtgtatatcgttggaactgatgatgacttcattgagaagcttaaccggtatgaattttttgatggtgaagtgaaaagctcaatatttttcttaacaatccatgatgctgttttgcatattttgatgaagaaagattacagtacttcaaagtttaatcccagtcaggaaaaagatggaaaaattgattttaccataaatacaaatggaggattacgtaatcgggtatatgaggtgccagttgaaacaaaattctaatcaacatataattcagaaggatcttcatctgactatgacataaaaacaactttatacccagaaagttattgataagttcatacattgtacgaagagtatttttgacagaatatgtttcaaactttggaacaagatggttctagcatggcatatttttcacatatctagtatgaaattatataagtattctaaattttatatcttgtagctttatcaaagggtgaaaattattttgttcatacatatttttgtagcactgacagatttccatcctagtcactaccttcatgcataggtttagcagtatagtggcgccactgttttgaatctcataatttatacaggtcatattaatatatttccattaaaaaatcagttgtacagtgaaaaaannnnnnnnnnnnnnnnnnnnnnnn

SEQ ID NO: 21205 - DNA, 745 bp, Homo sapiens
  misc_feature 1, 2, 23, 736, 737, 738, 739, 740, 741, 742, 743, 744, 745: n = A,T,C or G
nngcctggcacatagtaagtgcncattatatatattaatttattaatttgtttgaaaagtattttaaaaggatgttcttcccaagttgaaatgtatagtataatgatatcatttgatttcagaaatgaatcataaaacagtgcttcttcaactttaatgtccatctgaatcactggggatcttgttgaaatgtaggttctgattcagcaggtctggggtggagcctgggaatatgcattcttaacaagcttccaggtgatgctgaagctgctgatccagggatggtactttgagagccaagggaatataagaggtattcaaattgtcttttattataaatttcaaatacaacattgcaatctccatatatatttgttaaatatccactaggttccaggagctatgccagacaccaggggagtgtgtgatgagcaaaagcagtcatgctccctacccttgttgagcttaccaaaaaaaaaaagaaaacagagacatgaaacaagcaatcacaatctgatgatgatagtaaagggaacaagcaaggtgtcacaggagtgcagcacaagggaattttacccaggccagggtctttgatgaattgcagagcaggggatagtgccagagaagggcatgatgtaggtcaaagactggacccctaagaagaactgactggggtgttccctaaccttgtttcagtgtttgcctctattgatcattcctccaaatgctccaagcnnnnnnnnnn

SEQ ID NO: 21206 - DNA, 769 bp, Homo sapiens
  misc_feature 489, 743, 744, 745, 746, 747, 748, 749, 750, 751, 752, 753,754, 755, 756, 757, 758, 759, 760, 761, 762, 763, 764, 765,766, 767, 768, 769: n = A,T,C or G
actttgaggaagtttctgatcgttactgttttatggatgagaagactaaacctcagagaagtttattccttatccatggtcacacagctaataatcagcagaatcaggatacggtctcaggtctgtctgactcctaaatctgtgctcttaaccagtcttatgtgctgactcaatgaaattagttgggaatagaatgaaattcactcagctaccctcagccttctggatggtgagccttccttcaaggaaaacagaacaacaaatcaagatagtaactgacatctctcgggagaattactttatattactacaaagtaatataaagtgataaatccttattcacatttactgttttctcttattggcttcagtgttgcatttccccataaactagaggattaatttagaaacatgaagaaccttgtcagcctttggccaattccttttgtttgtggggaaacaaaaacaaattggataggaaaaaaaaancccagaaagaaaaaaaaaaaagaaaaaacagatttggctgttgttttgtttttacatacagatgttatatgaccatgcctgtaaaattatatgtttggaaaggacatatttaggctctaagaaatttacacaagatgaggttttttaaataaactatttcctggatggtggagtttttaaaaacttaagtgctgctgatgatattataattaagccacccctcctacctatctccccttttatactaataatcnnnnnnnnnnnnnnnnnnnnnnnnnnn

SEQ ID NO: 21207 - DNA, 3848 bp, Homo sapiens
  misc_feature 1, 2, 3, 4, 3848: n = A,T,C or G
nnnnccgcggcgtgcgagcgcgcctccgggaggcagcgggagcgcgcacgctccggggccaccgcccctccggggccgggcccgccctccttccctccctccctcccccgctgtcctggcccgccctgcccggcccgccctgcgagtcagttcgctggttccctccctccctgggcgcgctcgggccgccgtcgcgctccccgccctcgagcctcggtgccggagccgcccgccgccggaggaggaggtggagggagccggaggggcccgccgaggcggcggcggcggcggcaagatggcggacttcctgccgtcgcggtccgtgctgtccgtgtgcttccccggctgcctgctgacgagtggcgaggccgagcagcaacgcaagtccaaggagatcgacaaatgcctgtctcgggaaaagacctatgtgaagcggctggtgaagatcctgctgctgggcgcgggcgagagcggcaagtccaccttcctgaagcagatgcggatcatccacgggcaggacttcgaccagcgcgcgcgcgaggagttccgccccaccatctacagcaacgtgatcaaaggtatgagggtgctggttgatgctcgagagaagcttcatattccctggggagacaactcaaaccaacaacatggagataagatgatgtcgtttgatacccgggcccccatggcagcccaaggaatggtggaaacaagggttttcttacaatatcttcctgctataagagcattatgggcagacagcggcatacagaatgcctatgaccggcgtcgagaatttcaactgggtgaatctgtaaaatatttcctggataacttggataaacttggagaaccagattatattccatcacaacaagatattctgcttgccagaagacccaccaaaggcatccatgaatacgactttgaaataaaaaatgttcctttcaaaatggttgatgtaggtggtcagagatcagaaaggaaacgttggtttgaatgtttcgacagtgtgacatcaatacttttccttgtttcctcaagtgaatttgaccaggtgcttatggaagatcgactgaccaatcgccttacagagtctctgaacatttttgaaacaatcgtcaataaccgggttttcagcaatgtctccataattctgttcttaaacaagacagacttgcttgaggagaaggtgcaaattgtgagcatcaaagactatttcctagaatttgaaggggatccccactgcttaagagacgtccaaaaattcctggtggaatgtttccggaacaaacgccgggaccagcaacagaagcccttataccaccacttcaccactgctatcaacacggagaacatccgccttgttttccgcgacgtgaaggatactattctgcatgacaacctcaagcagcttatgctacagtgatgtacaaaagacttgctgttttaatatctttttgtgtttttgatgttttctgtttgttttgttttttaaaatagcagtttacaaccagaattagaacaatcttaattctacgtttaacttcttgaaaatcttagtactttttctgcggcctttggtttgtggctgaaagctgttgagtgactcatcgccaagatttgctgtaatgcaggctttgatctgtttcaccatggcttctattcaagtccagttaaaacctcccagctgacctcagactaggcatatttcaggctttaaattattctactttccaaactgaattctcctgcagtgccaagtatcaaaggtgtccttaaatacttgtagggatgaggttaggaatattcagttccaaaacaagatatcttctgtccgccttacatatagcagtgacacttgttgcctaactttatggtgacctcctattttgtaagggctgttagaagttctatctaagaaatggcattctgtaggtttatagaaggtttagccttcatattttaattgcttgtatacacaacagctgttttgcttttagatttctgtgtttctgaaggtaatgttcttcctgttttcaagtttacataaggatctttggtctgatgctgatgaagagttcacaggtggtatgggagagcaaaaggcaagctaatgctgtttaccgtgttttggtcaaacgtaacgagtgaaatagaatttgcctttctcatatttaattatcatgtagtttaatgtaccatatgtgaaacattctggccatagcagcaactaaaaactgcaagcaacttggtaacagaactttctaaataaacttaacctgttccagaatgtcatgtatttgacttttaagccctatctcagttggtcagtaaagaccaatccttactgtaggaaatcattgttgtatcatcacaaacatctatcttttgctgtcctgtccagtcccatcaactccacactgtgccatttgtggcatcgttttgtttatttggagtttgctaagggcagtatttttctgtcaagactattcaagaaggcattatttgagattcctgttcattcttggtgtgtctctaacagatacagtatgtatacatttgtataattgttgttgttgaaagtccagcttttttgaggtatattttaaatgttttaaggatgcttctaaggatcagtagtaatttttttagttcgcacctaaagatgattacattgacctcccccgactgcttaccaaattaaaatgtgtccacgaagtagctttgtgatcgcagatacattcatagtgaactcatcagaatggctggtttgcagtactgaaatactatcttctaggctgtatgtagtgctacaattagagaaacagaagtccaaggctggcgacagcttgaaaagtctgacagcttttctacttttcctgaaaattttaagactgtgatatctgtcattttactgtatagctgactgtgtactcaggtattttattggtccttgaaagattggtcgttatggatcacccagcctttccaagtcagtggctgttgttctgtcttgctgtctgatacgagagtggggcttttcagtgaactaaccagggattgttcttgacatacctgacttttctcacatttgaacttccactatcattgtatccatataacttctagcattttcatgccatggtaatccatgagctacacatacgtagcccggcaccgtgatgcaagttcatggtatcgtgcatgttcgtggtatcatggtatcattcatgcgtgtttgaatagttctacatctagtgcttcttgccaaaaagaatacattgtttaaattcacaaaattagcataattgcagtgctaatgaatatcggaatatgtgcacagtaacatttggactattcattggagagtttacccatacatttagcaaattgaatggccaaaacatttgactccagtgagggctcaagttagatccctatagaaagaggacacttcatcttacttaagtcatagttaagatctgtgatacgaaccatagatattgcctgacaaagcagaaatcaccaagtttcccccttttgaattaccaccaagaagtgttgaaacaccaaatagatatcatgttattttgggcatttgcagttttcttccctgctgcatgtaatgtctcagaatcaacattcttttaaaatctagacatattttgaggcaagaattactgtattcactaggttggtgggatcgacaaattaggtcactaaggtcgggccccatttttacgcgtgttaaaagtggaggggtaccggttgaaaggttgacctttaaagaacgcttgggcagaggggggtttgcgccccaaaagaaggtgcggtgcatgctgtan

SEQ ID NO: 21208 - DNA, 316 bp, Homo sapiens
  misc_feature 316: n = A,T,C or G
actgtcataaatattgttatcttttcttgcactcgataagacattttacactactgatacggacagaggctgtatcccctcaaagtatttgaagaaactacaaaaggagaggacaaaaggatgtgaattgtaggaagaatggggagaaggggtcattggcagtcatcttggggactggctattgcctcacaaaaggatatgtgatttgatttttgcaaaaaaaaaaaagtttaaataacagtcttctaaaaaaaaatccccttcaataataattaataagggggtctaaaaaacaattgcctaaaaaattgtttgn

SEQ ID NO: 21209 - DNA, 846 bp, Homo sapiens
  misc_feature 845, 846: n = A,T,C or G
aacaaattctgaaactgactgcacgataagtgagaatcccgcgtgcccttgctgtgcctaggcccattgattgatactggctcaggatttaaggattcttttggttgtgaggcgaaaagaggaactgatcttgatgacttgcctctgattctctagagcaggacttacctagggaatcccatcctgtatgtctcagatttggattatttaataaaggaatatcatattatatttgctagtaccattttctaggaatgagtactcattgctgtctgacagtttggcaaatatcagacttgtaatatggatatttggtttgctttaaagaaaatctgtatttatacaacttttgttttcttctatagcctttggaggtgagaagtggaaaacaaatgttttattaacatcatttctttgtcctgggtaagtgaatttttcaagaattactttcttaacatagttacatgttagtccccaaattttcagtcgttgagtctttaatcctccgtgtctctaaatcatgtacctaagaaagtaaatttaatttttgaaaaggggtaaaataaatattttataaacgtttgccgaatgattaccacatgtcttatctggggaaagtacctttagacatgagaaatgttttaattccttctcttcaaagtctttctgtttcttggtttttagtggtcagtctgacatgttgttctgtaggctgcatttaaagcttttgagccaggcacaggaaggaatcctgaagatagttcaggcaagcatatgttttcccatttttatccaaagcattgccattttttagagtttattccattaagtaaagtaatatacann

SEQ ID NO: 21210 - DNA, 2753 bp, Homo sapiens
tcgacccacgcgtccgccgccgacgacctgtctcgccgagcgcacgccttgccgccgccccgcagaaatgcttcggttacccacagtctttcgccagatgagaccggggtccagggtactggctcctcatctcactcgggcttatgccaaagatgtaaaatttggtgcagatgcccgagccttaatgcttcaaggtgtagaccttttagccgatgctgtggccgttacaatggggccaaagggaagaacagtgattattgagcagagttggggaagtcccaaagtaacaaaagatggtgtgactgttgcaaagtcaattgacttaaaagataaatacaagaacattggagctaaacttgttcaagatgttgccaataacacaaatgaagaagctggggatggcactaccactgctactgtactggcacgctctatagccaaggaaggcttcgagaagattagcaaaggtgctaatccagtggaaatcaggagaggtaggaatgtctgttgtcaccacagtgttctaaacttcagtgtgctttaaggcattgattccttggacctaaggaaagtgttaacttgaggaaattaatccttctctcattcctcctcttggcctggagaaatcttaaactgggttttcctttagcaagcttggctgtatggtgggtaggtactgttaggtaattttgatattttacttagttggtttcttttgtttttggggacagggtcttgctctgtagcccaggagttcaagaccaccttgggcaacatagtgagaccttgtctacaaaaataaaagaagctgagcatggtggcttgagcctgtggtctcagctactcccttgagcccaggatgtcagggctgcagtgagccatgatctgtgctactgcactctagcctgggcagcagaacaagaccctgtctcaaaaaaaaaaaaaatttttttttttaagttaaggcattaaaatatttgtcacaaatctcaagatttctacttggcatagaagccatgagagaaataaacattgtaatgacatatatcgttgaactaggtgtgatgttagctgttgatgctgtaattgctgaacttaaaaagcagtctaaacctgtgaccacccctgaagaaattgcacaggtaaggacttaacatgttacacgttttttaaaaaaaatttaatggcatgtgtgattttttttttcccttgatcacaccaatgtcagaataacaatactacccaatcatcaatattagaatcattgtttcttactgctaaaacctttgaaaagaattatgaccataatggttgtcatttagttctacatgtggttgtcattttagttctacatggctgtaaaatggattcatatgattgtgaaaatgttcttagccattgtcaaaggtgcataagttttgtcagtttgtaatgaagtcagcatttttaaactttttgttacaagaatagttttatgtatcatattcttcaaaacaatgtagtcaaataatgaatcggaaaagagcaaagaaccagtacttcatgaaaactaccataacgtaaattccccttctctcccctggatggaagtatcaatttggaagttactaggaaaaggtaagggaactgactgaggacactaggcttaccttttaatttcgaagagtaactggattatttcaggttgctacgatttctgcaaacggagacaaagaaattggcaatatcatctctgatgcaatgaaaaaagttggaagaaagggtgtcatcacagtaaaggcaagtgtgtttgtatttttaaagataattttgagttatcttatgatcaaaagtttgagttatctgatgatcaaaactgaatttttcaaacagaaaaattctgttttaaaaactgctttttttattccttcatatgtagtctcagcacatgtatagaataaagtacttactgtgttttatgtgaattagcctttgctgcatgaaatgaatccatcctaacttaaatgattattcaaataagcacttttgggattttttgcagaagtgtaattggatgtcctgggctgtttcatactctaccctgcatctcttatggccagaggggtctgtttttattaatctggcctgtaattccatgttttgtgttcaatgaaatccatatacctaattctttgacttttcataggatggaaaaacactgaatgatgaattagaaattattgaaggcatgaagtttgatcgaggctatatttctccatactttattaatacatcaaaaggtcagaaatgtgaattccaggatgcctatgttctgttgagtgaaaagaaaatttctagtatccagtccattgtacctgctcttgaaattgccaatgctcaccgtaagcctttggtcataatcgctgaagatgttgatggagaagctctaagtacactcgtcttgaataggctaaaggttggtcttcaggttgtggcagtcaaggctccagggtttggtgacaatagaaagaaccagcttaaagatatggctattgctactggtggtgcagtgtttggagaagagggattgaccctgaatcttgaagacgttcagcctcatgacttaggaaaagttggagaggtcattgtgaccaaagacgatgccatgctcttaaaaggaaaaggtgacaaggctcaaattgaaaaacgtattcaagaaatcattgagcagttagatgtcacaactagtgaaaaaaaaaacaaaaaaaaaaagt

SEQ ID NO: 21211 - DNA, 878 bp, Homo sapiens
  misc_feature 808, 809, 810, 811, 812, 813, 814, 815, 816, 817, 818, 819,820, 821, 822, 823, 824, 825, 826, 827, 828, 829, 873, 874,875, 876, 877, 878: n = A,T,C or G
acctccctttacctgtttccctactggaaagtgggataatactttttacctcatggacttgtcaggaggattcattaaaacgactcgcataaagcctatgccacatggtagatgccaattcagggtctcaagaaagaacagcccacaggattgacactgaaccttaacaaagttaacaggaccaagctgcagagagggtgctaagacagcgaagccaaagaggacccctcaaacccaacaagagctgtgcggctccctgattcctcgccagtgttgctaccgcccttggctcttcttgcatggctggctcttgagacccctggaagctgatggaggcaacgtgagaagcacatggacatccgtccttgagcttgagaggcagaggcctgagttctagttacagccccagcagtaccagttgtgtggactgggagggaggctatcacgtacatactccaagcctccaagcctgtttccccttctgacacaggatcttttgtggctggtatacagtgggcactcaataaatgctgtctggtcgtctggctggcatgccttatgggcctgagaattgaatagaattacagtgatagaagcatgctggtattgtaagtggtttgtaagtgtgaggactaaattattattaaatagtaatcacatctaatcttggataaattagtaaaagcaagaatgggagcagtaaaaacctaagcaacccgaactaaaattttattgaattaattcaatttcttgtcatgtaacacaaccccagaagagaataaaataaagtttatatacatacacccannnnnnnnnnnnnnnnnnnnnntttccttcccgggggggcttttaaagggggaaattccccccccnnnnnn

SEQ ID NO: 21212 - DNA, 516 bp, Homo sapiens
  misc_feature 1, 2, 3, 4, 5, 6, 7, 8, 9, 10, 11, 12, 516: n = A,T,C or G
nnnnnnnnnnnnatgatgaaggaattacgttatccattcatattttgaattgatttctgactatgaaaatcaaaaattttcacatttgattatgaaattctccaaacatatgcacaagcagagatcatggtataataaatccctttgcaactccattcagcctggcaacccctgctatgacgaccatgccggctagtttggtatcgagctcgcttctattagtagcggcccacagtgtgctagaattcaccgttcttcatgaaatatcgagaatacgccagagtgggtatatcaaagccaccatgaccagcactgctctagtgatgccaacgctggccgcagctgaaaggtcagcagcacttccagagtctgtgatcatcgtgaatgtggtcatagtaagtccagtgcataaggtatgggcttggctcatatagaatccatttctattcccagcaaggttaggtataaaaagctcatgtcagaagtgctggaacgtccctttgatagagcaagagn

SEQ ID NO: 21213 - DNA, 909 bp, Homo sapiens
  misc_feature 1, 2, 3, 909: n = A,T,C or G
nnnatcacagcgtttgttgcatgagacagtgcagccatggatctcaggctgacttctcaggattcaaaattctcaccagacagcccagtgatagggaagatcagaccatgggaggcagctcgttcctgagcaacagtcatgagtgagtttctgtgccaggcactgtgaaggtccctgaggctggtctctgagatagcaaccttgagggggcagcatcccacttttctggctcactctggcccagcaggggtagaggaccagtgtgacctggcagaatctttcaaaagctggagcaagggacctgggcaggaccaccaggctggctggtcggagctctccagccatgctggatgtatttctgatgtttggtttcttttgtagaatcaaactccttatggcagagggaaggcgggacctcaggtggagtgtgaagggcatcgtgtcaacttgaataagtagcagagaatcttacagagtcgtccctttgaaggcagggttaaacagggtgtaacttggctccttcagttggttggtctggtctcagaatcacacattggtccagaattacacttgccctgctctgaagaagaatgccacctgcttgtcagctttggagtcaacagccctgaggactcaagtccccttttgacagagtggctctggacaagtcacttgcctttccttctccattgtttgtttggggcgtctggacgagggctacaaacagttcctccctttgtttccacggccttgcagaatgtgtgcttccctcaaaagggcataaaggccccctttcttctgctctcctgcgccacggggggttgttctgcagggctcgggtctacaagctgaggccagccccaagcgctgactgtagcagctccatccgctcccacagcctccccgtgn

SEQ ID NO: 21214 - DNA, 605 bp, Homo sapiens
  misc_feature 1, 2, 3, 4: n = A,T,C or G
nnnnagcgtcctgagctacacacataagaaggtatgtaatcatgtaaaacttcttacggccattatcagtaatatttaaaagctatctttcagtattgtacttataggtacttctctttggtggcctcaagatgccaggatagaagttgaggtagtgggatgccccaatagctattgacccagaccagttaacagaagccacctcatgaggaaaatgagctctactctctcctacttttggattttatcccatgcagtggccaccagattgaataggtgaggcagtgtggattcacaaaagcattgagtttatatgtaccaaccagaactgcatttctaggagatatatagcaagactactgaagtaagtctgacttacagactcagtaaaataaaattttcatgtttttaactgaagacactctcgttatgagcgtatttgctcaaattcctcccagatactcccctgccccttccagggtcttttatttttatgatatttgcatgtatcttttttcgtaagaacacaagaatcaggtctcgattccaaggagtagagcctctgcagttcaatctgtgaccaaaggcctacaatgtcttgggct

SEQ ID NO: 21215 - DNA, 903 bp, Homo sapiens
cgggcaggtacgcggggactggagacactgaagaaggcccttagagtcttggttgccaaacagatttgcagatcaaggagaacccaggagtttcaaagaagcgctagtaaggtctctgagatccttgcactagctacatcctcagggtaggaggaagatggcttccagaagcatgcggctgctcctattgctgagctgcctggccaaaacaggagtcctgggtgatatcatcatgagacccagctgtgctcctggatggttttaccacaagtccaattgctatggttacttcaggaagctgaggaactggtctgatgccgagctcgagtgtcagtcttacggaaacggagcccacctggcatctatcctgagtttaaaggaagccagcaccatagcagagtacagatcctggtctggcaagtccatgggtgggaacaagcactgtgctgagatgagctccaataacaactttttaacttggagcagcaacgaatgcaacaagcgccaacacttcctgtgcaagtactagcttcataaagtatggtgcctgcagtcttagatatatttatgtttatgtttaaatacagatatatttaaaaggctacagcaacatctacccgctccttacagcctggtccagtgaggggtattccctcctctcaaagtccacctccaggcttcttgttctacttcaggtacctgattctctaggtgcagttttgaagtagttgaccatgtttgaagtgggtaggatgatttttctaggtaattattcttagctgcctgattattttaaagttaataatgtgtaagaccctccaaagggctttaaaaacaacccaaaactacctggttgaaacgactgctcaaaaaataaactttcagttaaatgttcctttaatc

SEQ ID NO: 21216 - DNA, 493 bp, Homo sapiens
  misc_feature 1, 2, 3, 28, 493: n = A,T,C or G
nnnccggccttgttagacgattggttangtctctttataagttaattgttcctgtcaacaggtacgtatatttttcagccgtttttttttttttcgttccaaattacatttggggtttcggcatacgattttttaggctacgatccttttatgtttattgtagtagggccttagattgcaccgaaaaggctagggtaatagtgtctgtttaccttaccacttttattttgagtacctaaaaatgcatggttttcaacataagtgggaaaaccgcaaaacactgcgtaaccgctcaaaatggcggaaagcaaaaaacaaagccggtgcctggcaatgggccggacccgcaaattagcgcaaccaatcattttcctggaaaggagtgtgggccttaaattctagcggcctgttttctattacttaacctaacaaccgagtttaggtgtgtaaaagttcctggggtaaataagctcacgcaaggaaaggttgcaan

SEQ ID NO: 21217 - DNA, 494 bp, Homo sapiens
acctggaactacaggcacatatcactacagggggctatttattgtatttttagtaaacagtgttcatcatgttggccaggctggtcttgaactcctgacctcaaatgatctgcttgccttggcctcccaaagtgctgagaccacaggcgtgaaccactgcaccagaccagataggataatttagccctctataaaattgaaaattggagaccattttctcttagaacttcaaacattattttttgtcttctggcctctattgtgctattaaaaaatgtgttataattttaattgtaaacccattgtagatcattgttcccactttaactgattttaatatcttattctctttatagtatttagtttcaatgatgtatctatattttaaacaacttataggatatttgcttatcctataagttttgataaaattcttaggtctatgacatctttgaataatcttgtcaaattcttatctattatctcacccgcgt

SEQ ID NO: 21218 - DNA, 1067 bp, Homo sapiens
gtgatggctgggtgcagtggctcacgcctgtaatcccagcacttgggaggcttaggcggctggatcacctgaggtcaggagttcaagaccagccgtggtcaacgtggtgaaacgccgtttctactaaaaatatgaaaattagttgggtgtggtggcatgcgcttgtagtctcagctactccggaggctgaggcaggagaattgcttgaacctggaaggcagaggttgcagtgagccgaaatggcgccactgtactccaacctgggcgacagagcaagactccatctcataaattaaaaggaaagtatgatagtgttatggattttagctctgagtgagctggaaaactaggtcattatctagatgatttcagacttgaccctaattgaccatatatgaccaggaaacacttctgagtttacagctccgtggagatgacctcaacactgccccttgatttgtttgatgcatgtcactttcattaattttccccctcctttttgaaagtcctgtggcagtactaatattttcattttatgtaatctctggtgctgctttccagtcactgtatgaagtgtctccccaacactagcaaatctaggtcctactaaatacaaatctctgggtggatgatcttctagtactgtatttttaaattaaggagttttagttataatgaaattgatttgtagtctgttttgccgtaaacttgtttttctttaaattgttcttacagtgatatcttactatttttaactgtctggggtttctgatatggggatttcagcccctggttaatcagtcttgtccctacaagtccctgatgcagtatgtttatttgtgatgtttaaagaacatttcttggctgggcgctgcggcttgcgcctgtaatctcagcactttgggaggctgaggtgggtggatcacctgaggttgggagttcgagaccagcctgacaaaacatagtgaaaccccgtctctactaaaaatacaaaaattagctgggcgtggtggtgggtgtctgtaatcccagctattccggaggctgatgcaggaaaatcgcttgaa

SEQ ID NO: 21219 - DNA, 938 bp, Homo sapiens
  misc_feature 1, 928, 929, 930, 931, 932, 933, 934, 935, 936, 937, 938: n = A,T,C or G
nagttacactcgtgtgaatcgatcgtactcttacgcctgtttgttgttctattccgtggggtgtctatgatatgagataatctaagtctctccaatggatctttatttacagttaacctcggggcaattgtaccacgacttacgcagaaaccgatatctgagcatggtagggtacttggaaggccacaaccctgtgctaaaaggcaagagcaggtacttggggccaattgcgccccggggtcccgctgtgtttaacccccacatcctatctagcaactcaagcccaataggaaaaattcacccccaggacccctggtaaattctgcacccaaagtggacaagcaagaagatctcaatcccccaaggcagagatccgtgtagacaacactccctgaccgcccgggaaggagactagaaagaggagtggatggaacccaaaaagccacgttactcaaatgtttcagaacaaacttctcgattaaaaaggaactctgatgaaattacagcttcggtttagaaatgaatgccagtgaaaatattattcatcaaagtccgcagggagcagccaggagcacacaggaaacacagccggaaatgcgcttacaaagacttggcgggcacgtgggctcacgcctggaatcctggcactttgggagactgaggcaggtggactgcttcagcccaggagttcagaccggcctaggcaacacagcaagactccatccatctctacaaaaaattaaaaaagttaactggtgtgatctgccaacagtgtctgctactctggaggcttgggcaggagcccaggaggcagagggtacagggagccgtgatcgcaccattgcactccaggttgggtgagagagccagatcccgtctcaaagaataacaaaagacttttaactcaagatgtcagaaaaaccaaagnnnnnnnnnnn

SEQ ID NO: 21220 - DNA, 1489 bp, Homo sapiens
  misc_feature 1, 1487, 1488, 1489: n = A,T,C or G
naccagagagcccaacgcctggtgctcaagactttctccgagtgccacatgcttgttggagagagagaaggcaagatcagggctaccaactgtagctgtgctcaaggcttcgccatccgagctatgaaacccacggtagtccgaacaccgtgatgcttctcctgcagggcgtgtgatgaggaggcgagcttggctttggagtgctgggaacctgaggaattgccaaggacccagagcccagccctgaccaccagagtgcccaaaacacaatgaacaaattgaattttcataacaacagagtcatgcaagaccgccgcagtgtgtgcattttccttcccaacgatgaatctctgaacatcatcataaatgttaagattctgtgtcaccagttgctggtccaggtttgtgacctgctcaggctaaaggactgccacctctttggactcagtgttatacaaaataatgaacatgtgtatatggagttgtcacaaaagctttacaaatattgtccaaaagaatggaagaaagaggccagcaaggtacgacaatacgaagtcacttggggtatcgaccaatttgggcctcctatgatcatccacttccgtgtgcagtactatgtggaaaatggcagattgatcagtgacagagcagcaagatactattattactggcacctgagaaaacaagttcttcattctcagtgtgtgctccgagaggaggcctacttcctgctggcagcctttgccctgcaggctgatcttgggaacttcaaaaggaataagcactatggaaaatacttcgagccagaggcttacttcccatcttgggttgtttccaagagggggaaggactacatcctgaagcacattccaaacatgcacaaagatcagtttgcactaacagcttccgaagctcatcttaaatatatcaaagaggctgtccgactggatgacgtcgctgttcattactacagattgtataaggataaaagggaaattgaagcatcgctgactcttggattgaccatgaggggaatacagatttttcagaatttagatgaagagaaacaattactttatgatttcccctggacaaatgttggaaaattggtgtttgtgggtaagaaatttgagattttgccagatggcttgccttcagcccggaagctcatatactacacggggtgccccatgcgctccagacacctcctgcaacttctgagcaacagccaccgcctctatatgaatctgcagcctgtcctgcgccatatccggaagctggaggaaaacgaagagaagaagcagtaccgggaatcttacatcagtgacaacctggacctcgacatggaccagctggaaaaacggtcgcgggccagcgggagcagtgcgggcagcatgaaacacaagcgcctgtcccgtcattccaccgccagccacagcagttcccacaccttcggcattgaggcagacaccaagccccgggacacnnn

SEQ ID NO: 21221 - DNA, 220 bp, Homo sapiens
gacccacgcgtccggaaattttgaagaatattagaaaatatctgaaactgaatgaaaataaaacacaacatatcaaaattagtgaaatagaaataaagtagtacttagtggtaagtttataattaatttacttacgttagaattaattacttttattcggaaagaataaaggtctcaagtcaacactttaagcttttgctttaagaaatctaaaaaaaaa

SEQ ID NO: 21222 - DNA, 4124 bp, Homo sapiens
tcgacccacgcgtccgtactctctggagtcgattgccccgagacacatgggccaaggaggggtcagcggcgaattctttcggcctgttggggacccctcgtgtccccacgccagactggacctcccgtatgaacttctcttcgcatcggcggcggcttccgtcacctccgctcccccgatcctattcccagtcgtatgccagcttggagagtcacgtgagagcaagagagtagctttctggttgtcctggtgccctgctcaggcaaactgactgccattctctgaggatggcagctctgtcccccacatttgccacgtccacccaggattccacctgtctccatgactcagaatttcctgtttcttcaaaagaccattcctgtccccagaatttggacctgttcgtgtgcagtggtctggagcctcacacacccagtgttggttcccaggaatcggtgactttccaagatgtcgctgtggactttaccgagaaggagtggcccttgctggattcttctcagagaaaactgtacaaagatgtaatgctggagaactacagcaacctcacttcactggggtatcaggtcggcaaacccagcctcatctcacacttggagcaggaggaggagccgaggacagaggagaggggcgctcaccagggcgcttgtgcagattgggagactccatctaaaaccaagtggtcacttcttatggaagatatttttgggaaggaaacgcccagtggtgtgacgatggaaagagccggtcttggagagaagtccactgaatacgctcacttgttcgaagtctttggcatggaccctcatctcactcagccaatgggaaggcacgctggcaagaggccctatcaccgccgcgactatggggtagcgttcaagggcaggccgcacctcactcagcacatgagcatgtacgacgggagaaaaatgcatgaatgtcatcagtgccaaaaagccttcaccacgagcgcgtccctcacacggcacaggagaatccacaccggggagaagccttacgagtgcagcgactgcgggaaagccttcaacgacccttcagcccttaggagccacgcaagaactcacctcaaagagaagccctttgactgcagtcagtgtggaaatgcattccggaccctctcggccctgaaaatccacatgcgagttcacactggcgagaggccttacaagtgtgatcagtgcgggaaggcttacggccggagctgccacctcatcgcacacaagagaacgcacaccggagagaggccctacgagtgtcacgactgtgggaaagctttccagcacccctcccacctcaaagagcacgtgaggaatcacacgggggagaagccctacgcgtgcacgcagtgcggcaaagccttccgctggaagtccaactttaatttgcacaagaagaaccacatggtggagaagacctacgaatgtaaagaatgcgggaaatcctttggcgatctcgtgtcccggaggaaacacatgaggattcacatcgtcaagaaacccgtggaatgtcggcagtgcgggaagaccttccgaaaccagtccatccttaagactcacatgaactctcacactggagagaaaccatacgggtgcgatctctgcgggaaagctttcagcgcgagttcaaacctcaccgcacacaggaagatacacacgcaagagagacgctacgaatgcgccgcctgcgggaaagtcttcggtgactatttatcccggcggaggcacatgagcgttcaccttgtaaagaaacgagttgagtgtaggcagtgtggcaaggccttcaggaaccagtcaacgctgaagacgcacatgcgaagccacacgggggagaaaccgtacgaatgcgatcactgtgggaaggccttcagcataggctccaacctgaatgtgcacaggcggatccacaccggggagaagccctacgaatgccttgtctgcgggaaagccttcagcgaccactcatccctcaggagccacgtgaaaactcaccggggagagaagctctttgtgtcatccgtgtggaaaaggctccagtgagcgcgcctgctttagagacacaggatgattcagaccggaaacagacctcgtgggtgtaagaggaagcctctgtgagctcgcaccttactgggtgcaaaagaatccacggaacttgggagaagtccagttcctgtaaaaactgggaagacgaggcgttctcatcccataggaggtttgtgagaactcacgccgggggtgaaaatgtacgtctgtagcatggagaagccttcagggtacattcagctcttaacaaacacaggaggacttaatggcagcttggcatttaatgtcaaaatccaagccgtggcatttaatgtcaaaatgacttcagaccacttctagccttctgggcccatgagtaataatgagcacactagggagcatctctgtaaacacagtggctggggaaacccttcctagtctcacttgattcctcatgacggaaatcacactaaagagagaaatcagtgaagtaaggaacgtggaaggtcatgaatgggccgcaaaccacggccagctgcttgtctttgtatggcttgccagctaacaatagtggttccatctttaaggaagaagaatgtttgatggagaaaatttgtggccaatgaagtctgaaatacttcctgtcatctgcccctttccagaaaaacttggccgacccttggtctacagcacgggttctcagtcgggcgacgatttggctgtctaggcgtcatttggcaatgtctagagacatttttggtagttagaatggggggaagatactcctgacttgtaataagaagacatcagagatgctgctaagtcggctccagcacacaggagccccccacaacgaagagttagtgcccccaaacgtcactgttgctgaggttgaaaataatcatgcagtcattcctcaattactgcctgcagcaattcctccatttttatgaatcttgtgagcacttacgctaggagaaatttcttttacaaaacttttaaaatacaattagtgctgataattcctatgtggaaatgattccagccatggtcccctcacttgagcatgtgaatattctcacggagagaagccccagcgagattttccggtgaatacgggattgcacttactctttcatcacggaaacagaccccccgagagaagccccaacgagattttccggtgaatacgggactgcacgtactctctcatcatgaaaacagagccccgttcataaaaatttttcatctttatttttaaggttatactcctctaaataacccttaagcctcatcaagaaaggtttgtttatagtatttttactatagcttcatccttgataacgtcctaatttccttctggacaacctccttgaccaatggcatattgagatctatgtgacatgaggatatttctcagtaccactttgttactggtacctgatgcacacggattgcgaccagagcatgatgcctccatcaagtggtaatatgtttgcagcctgctgtccagccaagagtgacagatacttctagtgacttccccggtatccactctcatcttcttccaatatcaagagaatccaggttctgtcagattagtaaggtgtgctaatctaaattttaaaaaatctcttacaggttttcttgcagctggtaccatccatgtctcacagccctggccactgacagatcagcagatgtcaccacatgggcttctgagaaagctcttgaatggggatcgttcttaaacatgaattcctccctgtatgttttgttctttgctttacttttcaccttgcaaagagatccagtacctagtattggaagatccaccttaacgaccgtgcatatgaaaaccacagtctaaggaagtgactgcagaaagctcacagcgaccctggcctcccctgtgggcctctttgagtgtctgcagcagccctggacttccagacttctatcacatgagaaaaaataaaactgattattggtttaagctgctatggatatttcattgtgtctatcttttaaatttatttattgtaagatagggtaccgacaggggaa

SEQ ID NO: 21223 - DNA, 501 bp, Homo sapiens
  misc_feature 499, 500, 501: n = A,T,C or G
acctacacttggaataagacactgttctgaatttgtggcatagttttttttttcatattgacattaatagaggcttctattggggttaggctaaaaatcttttgtaaaaattttaaatgacactgctgatttttatccgttaattatcagtttataagctaataaaaactttggcttgatattacattctagtggttaaatttgtcataaaaggaatatgtgctgagttacttatgtattgtaatcttgagattacaattttttatttgaaaattagacaaagttggtttttaatttttatttcattttaataattgagttcaaattaaatgggaaggctaaattggaattctgtttttctctcaaaatactgtttttctattattttaaggcattccttggaggtctaaattgggcatttataggtgttgatgaaccacaccgattaaagaatgatgactcccttctgtataaaactttaatagattttaaatccaannn

SEQ ID NO: 21224 - DNA, 307 bp, Homo sapiens
accctctctcactgtgggtcccctgtatttcttatctcccacccaagatcagtgtttctgaggctaaaatccaagcaagtgtgccctagaggtagggggctttcttcttctacccaccctccactcacagagccatgctctacggtaggcatgccagcctgagaatacagggctctctcctgctctcatttcagctcacagggcagaagttttgcaccagatgaggcaagccaagaccagaggctgctgtcactgtctagtccctagcttcagagcagtgggttagagatttttttcccaggggaag

SEQ ID NO: 21225 - DNA, 631 bp, Homo sapiens
  misc_feature 1, 630, 631: n = A,T,C or G
ngtaccgcagtatggttggccatgggattatccttcattacatcaaatgaggtatggtggacaatcttgtttataacatcacctgaccaagttttctccaagaattccaacaccttgtggatctcatgttttggattttttttaatatcctcgtagaagaggtagaggatccggtgcatgtcttttgcagcccaccatcctttcacatggtcaaaccaggacccgccaacaacttttccggacatgaatttctcataaaattcctctaagttctgaggatcaggcataaaggaagccatcctgtgaaagtggtagtaggacaccaggcaatccttgggatttctggccacatagacaatcttgcagttttctttccagatagatggtggaatcagatgtgaagggagatgtgtttttatcagttgtggtgaggacatttcaagaacgaactccaaatctggtttttctttatggggaaatttcagttcaaggaaagcgtgtctatctagagtctgggctcttttgcatttctccacatcaccatcatttagaatcatgtctaaaatttcatgcatccatgttgtacctcggcaggcggccgctcggccaccgcggtggagctccaatcann

SEQ ID NO: 21226 - DNA, 384 bp, Homo sapiens
  misc_feature 384: n = A,T,C or G
tcgacccacgcgtccgaataatgtgtgtcaggtacttagaacagtgcctggcctgaagtaagcattcagtaaaaattaccaattggttattattattgtagggcaaaaacatgggcagataatgttataatcttggggcagagaaggcctttctaagcataactctcaacctagtgaccacaaaagaaaagattaattatttgatttcataaaaactaaaagcttttacatggcaaaatctccatgataagaatcaatgaacaaatacccaagtgggggagaataattgcaatatggttgacagaaggaggattgatatcattaatatttagggatcactgataagtcaacaagaaaaagatgagaaaaaatcagtatgaacan

SEQ ID NO: 21227 - DNA, 4165 bp, Homo sapiens
cgcgtccggtgggagtctccgcgtcccgctcgctgggagagaggtacctctccttttccctctccctttccctaagagttgtctgctggttctcagcttgaagaagattctgcagtccttattgatcctttttcttggcgttaccattttttgaagcaaagttaacctagctttctagtttgagctttctttttggccgtctttaaaaaaaattttttttttaatctataaaatagacaagagctagttctacaatgtccaagtcattccagcagtcatctctcagtagggactcacagggtcatgggcgtgacctgtctgcggcaggaataggccttcttgctgctgctacccagtctttaagtatgccagcatctcttggaaggatgaaccagggtactgcacgccttgctagtttaatgaatcttggaatgagttcttcattgaatcaacaaggagctcatagtgcactgtcttctgctagtacttcttcccataatttgcagtctatatttaacattggaagtagaggtccactccctttatcttctcaacaccgtggagatgcagaccaggccagtaacattttggccagctttggtctgtctgctagagacttagatgaactgagtcgttatccagaggacaagattactcctgagaatttgccccaaatccttctacagcttaaaaggaggagaactgaagaaggccctaccttgagttatggtagagatggcagatctgctacacgggagccaccatacagagtacctagggatgattgggaagaaaaaaggcactttagaagagatagttttgatgatcgtggtcctagtctcaacccagtgcttgattatgaccatggaagtcgttctcaagaatctggttattatgacagaatggattatgaagatgacagattaagagatggagaaaggtgtagggatgattctttttttggtgagacctcgcataactatcataaatttgacagtgagtatgagagaatgggacgtggtcctggccccttacaagagagatctctctttgagaaaaagagaggcgctcctccaagtagcaatattgaagacttccatggactcttaccgaagggttatccccatctgtgctctatatgtgatttgccagttcattctaataaggagtggagtcaacatatcaatggagcaagtcacagtcgtcgatgccagcttcttcttgaaatctacccagaatggaatcctgacaatgatacaggacacacaatgggtgatccattcatgttgcagcagtctacaaatccagcaccaggaattctgggacctccacctccctcatttcatcttgggggaccagcagttggaccaagaggaaatctgggtgctggaaatggaaacctgcaaggacctagacacatgcagaaaggcagagtggaaactagcagagttgttcacatcatggattttcaacgagggaaaaacttgagataccagctattacagctggtagaaccatttggagtcatttcaaatcatctgattctaaataaaattaatgaggcatttattgaaatggcaaccacagaggatgctcaggccgcagtggattattacacaaccacaccagcgttagtatttggcaagccagtgagagttcatttatcccagaagtataaaagaataaagaaacctgaaggaaagccagatcagaagtttgatcaaaagcaagagcttggacgtgtgatacatctcagcaatttgccgcattctggctattctgatagtgctgttctcaagcttgctgagccttatgggaaaataaagaattacatattgatgaggatgaaaagtcaggcttttattgagatggagacaagagaagatgcaatggcaatggttgaccattgtttgaaaaaagccctttggtttcaggggagatgtgtgaaggttgacctgtctgagaaatataaaaaactggttctgaggattccaaacagaggcattgatttactgaaaaaagataaatcccgaaaaagatcttactctccagatggcaaagaatctccaagtgataagaaatccaaaactgatggttcccagaagactgagagttcaaccgaaggtaaagaacaagaagagaagtccggtgaagatggtgagaaagacacaaaggatgaccagacagagcaggaacctaatatgcttcttgaatctgaagatgagctacttgtagatgaagaagaagcagcagcactgctagaaagtggcagttcagtgggagacgagaccgatcttgctaatttaggtgatgtggcttctgatgggaaaaaggaaccatcagataaagctgtgaaaaaagatggaagtgcttcagcagcagcaaagaaaaagcttaaaaaggtggacaagatcgaggaacttgatcaagaaaacgaagcagcgttggaaaatggaattaaaaatgaggaaaacacagaaccaggtgctgaatcttctgagaacgctgatgatcccaacaaagatacaagtgaaaacgcagatggtcaaagtgatgagaacaaggacgactatacaatcccagatgagtatagaattggaccatatcagcccaatgttcctgttggtatagactatgtgatacctaaaacagggttttactgtaagctgtgttcactcttttatacaaatgaagaagttgcaaagaatactcattgcagcagccttcctcattatcagaaattaaagaaatttctgaataaattggcagaagaacgcagacagaagaaggaaacttaagatgtgcaaggagatttaatgatttcaaagaaaataatggttctttgtttttaatgttaaccttttttaaatacaatactgatagttagaagaaaactattgtactcttttgttttagtggagaaataatagatgtctgttcatgtgttaagtgttatagcaaaaaaaatacacatatggttaagttaatgaatagtttttgttttatcagaatggcaacagacagaagtactttgtagagattgacttcctaagctacttaagacaacttgcaccactaagaaaaaaatgtagaaccatttggaaaaatgaaatttagtagttccaagtttcaaagaaatgtcaacattttattccattcaataaagaacaaaaccaatagtgtttttattactttcatctgaaacattccatgttttaatctgagccttgcagactttcatttggagtttgaacccgttttggttgcatttcatttttggagaacttaattaacgtgagattggcaattgaaatgcaggtgcagttttctgttaatgtcatgctgttgtttaggtaataagaaatattaagtaattggctttagattttgtaatttttttccctgagttcctgctagatttcgtattctagtagtcaatgtattttcagtgaaatgcaaaaatattcccgttatctttgaccagtattaatttttgagatcttactgcttgttgcttataccagagatgtatgacaatcccgtgattcaagtgacaagcagtaagatctctggtataagcaacatttgatttttgaagtgtgtagaccatctcttcatattttcaagatgtaattttacatttctgcatttttaaaacagtttggccataatcctagatgcacgcttctaattcatgtacctgcacatgtgacctttgtgaacagaaatttgcatgtataatttgtgtttacttgtaactttctggttatatactgcttatatctgtggattcaagttactgaagtgaataccaataaaaagaaaaccctaggccatgttaattggttatacatgtttggaatgttaaccaacgtatttgtcagttgtggtttttattcgctcttaaactttgtgcatgctttaacaatttattacttttaaatctagagtgaattctaaagactgccgctaaagatctgagttttaaaaatgttgttgctggtggatttcttgttcctgttacataactaaaagtgaggccatttgtggtttttaaaaaccttatgaattaaaaatgctacaggtgaacaaacagaagcttatgtttagagatattgatgacttaacagtacaattggaagtaatacggatgagcaagaattag

SEQ ID NO: 21228 - DNA, 368 bp, Homo sapiens
cctgtagtttattcaaagttgaaaaaaaaacattcattattctttaatattacatgaaaatcttgttcaagagtgaaagccaaattttatccttgcattattgccatttactactggttttcttctgacccagtcagatgtaagaggcctctaactggatccaagccacttaattaccagatctaatttgattctggacccagttcagtttttggcatgacttccaaacgcagtttggattagaaatgggctcatagaaacttggagagctcaaaacacaaatatgcggagcttctgaatctgagagagaacttaccatgatgaccagctgctccaagagaacaatggacataatcggcctggtgggt

SEQ ID NO: 21229 - DNA, 513 bp, Homo sapiens
agaaagcttgtttctaagatccttttgggagcaaaggcaagtaagtattcattaaatgtttaccttcttgactttaattcacttcagcagatgataactcaggtgggattatgctatgacagtgatctgacaaggtccttgttcagggtagttactgacttttccagtatcacccttctagatacagcatgaagccaacatccttgtgtctgaactatataaggaactggctttcttttaattttatgtgttttgagtttgaggaagatccatattttgccaagatgtggcttttgagacttccgtgctgaactcatttggtctgaaaactactgataaaatttctacttttgcaaacttgtttttttgtttttgtttttaaaaagtaggcaaactcagttttttaaaaaacaagtctacagtagtgaatgccctaactgacacagcatgctttggcttctggaagcttgggccagactctgagagattttaatagccagtatggacctatgt

SEQ ID NO: 21230 - DNA, 1390 bp, Homo sapiens
ccgatttacttaacttttaaatgaaatgcaaaacaacaggtctaaaaattaagcagttcttgatatggctgcttctatggattaaaagtttacaaataatattttgtaatatcaaaatattaaatgcaaaatcatgctgccgtgttccgtgtgggaagcgtgttgcaagaaggttgtgggaaaatcagcaagctctacggagacctaaagcacctgaagacgttcgaccggggtcagcagacagtgggctctgtgcacactgttgggccctgccttctgcagggtgggctggtgtctgtcccgtcagtgctgacttagttccgtgcttgctgtctggatgggtcctggcccacagctataaagccacaaccagtgactccatggactagcaggcccaggctgacagctcggagggcccatgtgactgggtcccgcctgcccctgatggaactttttgtgtccccaggaatggtctggaacacggacctggtggagaccctggagctgcagaacctgatgctgtgtgcgctgcagaccatctacggagcagaggcgcggaaggagtcacggggcacgcacgccagggaaggctacaaggtgcagattgatgagtacgattactccaagcccatccaggggcaacagaagaagccctttgaggagcactggaggaagcacaccctgtcctatgtggacgttggcactgggaagtgcacagccagagaacaacacatcacacacaggaaacagttgtgctcatgtgatgggggcctcagcactaggaaggagtggactattggcacacgcagcagcttgaataaatctgaaagtcactatgctgtgtaagagaagccaaatttaaaaagtgcatgctgtgtacagagggtgtcaagaatgcctcctacgtgacggaaagcagatccgtggttgcctgcagactggcaggagcagattccaaaggcacaggaagaagcttgtgggtagaatgtgttcattaccttctgtgcattataccataaaaaagctggtcacaaaaatgcaaaccaaaaacaaaggtgaagctaggataagatttctcacctgtgtgattggtaaacgtgcagatgtgccgtcatgctttgtttatgaagctgtgggatacaaggactctcatacgtcactgtggaatgcagaatattgcagcctcatggaagaggatttggcagcgtctaacaaaactacatggcatttgccctttgactcagcaattctagaatctgcctcaaaaaaactccagcaaagaaatgaaaggactttaggcacagagttcttttcacagcctgcatgtgtttgcaacaaagttcttcactgtggcgtttgtaaatgtggggaaaagagagatcaggctggt

SEQ ID NO: 21231 - DNA, 646 bp, Homo sapiens
  misc_feature 1, 2, 3, 4, 5, 6, 7, 8, 9, 10, 11, 12, 13, 14, 15, 16, 17,643, 644, 645, 646: n = A,T,C or G
nnnnnnnnnnnnnnnnncaacactttatttcaagcattaaaaaaaaagaaaaaatcaattaccttcaatagaacagaaaatctgaaaaattaaataaggctaggcatggtagcagatggaaaggaattactatcctgtatgattttaatgacaatgaccatgccaaataatatcacccagtgggataagggagtacacagaaaggcagaagttgaaattagtttgaagactacattgtatattacacaatatacattgcttaagcatcagcaacgtgaagcaacatcaatgccgtttctggatggttacagcagttatgtcaaaattagatttttaaaagtaaaaaggcaaagaaatttgccacatatttaataattactcttgggaatgactgcaaattagagatgttaggtattattgattcatttattctttagcaaatgtgtattgaacacatactatgtatcaggcaaatggatatcacctcccctactatggaagaataacagtaatcagataattaaaaattatatactccagggtggcagaatgacaatcagtaatcaaaattattacaaattatatactacaaggaaaacaaagaaataaaggaataatggaggatttaccctagggtggttannnn

SEQ ID NO: 21232 - DNA, 1026 bp, Homo sapiens
gtcgacccacgcgtccggaacgagtctccagcaccatgtctggtttgtctggcccaccagcccggcgcggcccttttccgttagcgttgctgcttttgttcctgctcggccccagattggtccttgccatctccttccatctgcccattaactctcgcaagtgcctccgtgaggagattcacaaggacctgctagtgactggcgcgtacgagatctccgaccagtctgggggcgctggcggcctgcgcagccacctcaagatcacagattctgctgggccatattctctactccaaagaggatgcaaccaaggggaaatttgccttttaccactgaagattatgacatgtttgaagtgtgttttgagagcaagggaacagggcggatacctgaccaactcgtgatcctaggacatgaagcatgggagtggaggcgatgcgacgcctagaagacctttcagaatctattgttaatgattttgcctacatgaagaagagagaagaggagatgcgtgataccaacgagtcaacaaacactcgggtcctatacttcagcatcttttcaatgttttgtctcattggactagctacctggcaggtcttctacctgcgacgcttcttcaaggccaagaaattgattgagtaatgaatgaggcatattctcctcccaccttgtacctcagccagcagaacatcgctgggacgtgcctggcctaaggcatcctaccaacagcaccatcaaggcacgttggagctttcttgccagaactgatctcttttggtgtgggaggacatgggggtacccattatcttagaaaatctagtttaaactgttttctttcaccgcaaaagaattaaatgggaaaatcatttgtttatctctaagttatactaattagtagaaccaaacaaattatcttcttttaaaaaataaatcttataggaaaatagacagtccaaagtcatgtctttgaacagtggattggatctgtgccagtaatgacaaaattatttttttgacttgctt

SEQ ID NO: 21233 - DNA, 395 bp, Homo sapiens
  misc_feature 1, 393, 394, 395: n = A,T,C or G
ngaaagagatatgggtctcattatgttgccccagctggagtgcagtggctacacacagggacaatcatggcccgatcattgcttcaggctcctgggctcaagcaatgctcctgcctcagtgtcctgagtagctgggactacaggtgcatgccaccacgcctggcttattttttatttttcttttcgtgtggctgggaatattacaacagagacgtgggagtccagcaacagatggttcttaaactgcacaattaaaatgcaacagagaagggcttcctttcaatcaaaggaataaagggatgctttgcttttaaagggggccattcaaatcgatgactgcttgccttaattcatcttagttatttttaaatcaagaacttttgcccaacaacnnn

SEQ ID NO: 21234 - DNA, 352 bp, Homo sapiens
  misc_feature 324, 325, 326, 327, 328, 329, 330, 331, 332, 333, 334, 335,336, 337, 338, 339, 340, 341, 342, 343, 344, 345, 346, 347,348, 349, 350, 351, 352: n = A,T,C or G
acacattagcctcccagaaatggttcttaaccagagtgagctgactgtggacatagaattcagaagttggatgacaaggaagctcagtgagaatgaggagaaagttgaaacataatccaaggaatccaataaaacaattcagtagctgaaagataaaatatccattttaagaaagaacccaattaaatttttggaactgaaaaatttacttccagatctccccaatagaatctgaagcctcagcagcagaaaaattaagatgaagaaagaatctctgagctggaagaccagcttatacaatcaactcagtcagccaaaaaaaannnnnnnnnnnnnnnnnnnnnnnnnnnnn

SEQ ID NO: 21235 - DNA, 907 bp, Homo sapiens
  misc_feature 1, 2, 3, 4, 5, 6, 7, 8, 9, 10, 11, 12, 13, 14, 15, 16, 17,904, 905, 906, 907: n = A,T,C or G
nnnnnnnnnnnnnnnnngtacagcattggaaaaaatgtctttcttcatcgtctgcgaaatccttaagggcaggctttattttttttccttctctctctaagtctctatgtgctgtgtgtagcagttagcaaagtgggcctttcagttttcaaggataatatatagtgcattattgtacctgcctctcagaggtattttaattgatatgtagttaatgaaggacgtggtgatgttcttagaaattgctgtgaaatgtgaattaaagaatgatcaacgggactagtgggcacagcttgtcaggcatgtttttaattagcatttatgtaactttcctatttctgggcatccttgggaagacacatttaatttaagaaattaaaaaggaaaatttatttttccaaaacgcttcctgaccttcacagaataaaaaccaatgaacccgagcttcggagacgacagactgtcgggaattgtaaagatgatttgggcagcgcattgtttggcgggaggagctcagccttccactaacagaaaagtctacgtcagcatttacttagaaaatttattttaaaagagttacagaagcagtccacaagtatcaatattctctgtacaaactcatatctttgttctgttctcttgctcttgtgccgtctttctctttttgaatttcctataaaagctaaattaggtctcaagggttctgcaccactaagcaaggatctcttctagtccattgtgatggaagtaaatgtactcaggagaaagatgtacttgaaggaaaggctaaagaatctcccttcattgaattcccctgtctcccacacaacctacccaccctgacttctctaaatacttcccgcgttaattaattctagaagatctccgagggagggcccggtannnn

SEQ ID NO: 21236 - DNA, 3076 bp, Homo sapiens
  misc_feature 1, 3076: n = A,T,C or G
ncctggtggcgaattcgcgctacggcgagggattcacggcgaaatgagactgttcgtgagtgatggcgtcccgggttgcttgccggtgctggccgccgccgggagagcccggggcagagcagaggtgctcatcagcactgtaggcccggaagattgtgtggtcccgttcctgacccggcctaaggtccctgtcttgcagctggatagcggcaactacctcttctccactagtgcaatctgccgatatttttttttgttatctggctgggagcaagatgacctcactaaccagtggctggaatgggaagcgacagagctgcagccagctttgtctgctgccctgtactatttagtggtccaaggcaagaagggggaagatgttcttggttcagtgcggagagccctgactcacattgaccacagcttgagtcgtcagaactgtcctttcctggctggggagacagaatctctagccgacattgttttgtggggagccctatacccattactgcaagatcccgcctacctccctgaggagctgagtgccctgcacagctggttccagacactgagtacccaggaaccatgtcagcgagctgcagagactgtactgaaacagcaaggtgtcctggctctccggccttacctccaaaagcagccccagcccagccccgctgagggaagggctgtcaccaatgagcctgaggaggaggagctggctaccctatctgaggaggagattgctatggctgttactgcttgggagaagggcctagaaagtttgcccccgctgcggccccagcagaatccagtgttgcctgtggctggagaaaggaatgtgctcatcaccagtgccctcccttacgtcaacaatgtcccccaccttgggaacatcattggttgtgtgctcagtgccgatgtctttgccaggtactctcgcctccgccagtggaacaccctctatctgtgtgggacagatgagtatggtacagcaacagagaccaaggctctggaggagggactaaccccccaggagatctgcgacaagtaccacatcatccatgctgacatctaccgctggtttaacatttcgtttgatatttttggtcgcaccaccactccacagcagaccaaaatcacccaggacattttccagcagttgctgaaacgaggttttgtgctgcaagatactgtggagcaactgcgatgtgagcactgtgctcgcttcctggctgaccgcttcgtggagggcgtgtgtcccttctgtggctatgaggaggctcggggtgaccagtgtgacaagtgtggcaagctcatcaatgctgtcgagcttaagaagcctcagtgtaaagtctgccgatcatgccctgtggtgcagtcgagccagcacctgtttctggacctgcctaagctggagaagcgactggaggagtggttggggaggacattgcctggcagtgactggacacccaatgcccagtttatcacccgttcttggcttcgggatggcctcaagccacgctgcataacccgagacctcaaatggggaacccctgtacccttagaaggttttgaagacaaggtattctatgtctggtttgatgccactattggctatctgtccatcacagccaactacacagaccagtgggagagatggtggaagaacccagagcaagtggacctgtatcagttcatggccaaagacaatgttcctttccatagcttagtctttccttgctcagccctaggagctgaggataactataccttggtcagccacctcattgctacagagtacctgaactatgaggatgggaaattctctaagagccgcggtgtgggagtgtttggggacatggcccaggacacggggatccctgctgacatctggcgcttctatctgctgtacattcggcctgagggccaggacagtgctttctcctggacggacctgctgctgaagaataattctgagctgcttaacaacctgggcaacttcatcaacagagctgggatgtttgtgtctaagttctttgggggctatgtgcctgagatggtgctcacccctgatgatcagcgcctgctggcccatgtcaccctggagctccagcactatcaccagctacttgagaaggttcggatccgggatgccttgcgcagtatcctcaccatatctcgacatggcaaccaatatattcaggtgaatgagccctggaagcggattaaaggcagtgaggctgacaggcaacgggcaggaacagtgactggcttggcagtgaatatagctgccttgctctctgtcatgcttcagccttacatgcccacggttagtgccacaatccaggcccagctgcagctcccacctccagcctgcagtatcctgctgacaaacttcctgtgtaccttaccagcaggacaccagattggcacagtcagtcccttgttccaaaaattggaaaatgaccagattgaaagtttaaggcagcgctttggagggggccaggcaaaaacgtccccgaagccagcagttgtagagactgttacaacagccaagccacagcagatacaagcgctgatggatgaagtgacaaaacaaggaaacattgtccgagaactgaaagcacaaaaggcagacaagaacgaggttgctgcggaggtggcgaaactcttggatctaaagaaacagttggctgtagctgaggggaaaccccctgaagcccctaaaggcaagaagaaaaagtaaaagaccttggctcatagaaagtcactttaatagatagggacagtaataaataaatgtacaatctctatataaaaaaaaaaaaaaacccaaaacaaaaaagaattctccgagaagagctaattgttctctcactctctcttctcttctcctccccgggtgagaagaactccgggggtgctccccaaggtgggagcgcgacggccacagccgacgtgtgtgggtacccgcggcgttttgggcgaaaaagaccaggcgcgggggaccccagaagagggtctccgctactaggcgcgggggggtgtcccctctgatgggcccaaaaagattacn

SEQ ID NO: 21237 - DNA, 1850 bp, Homo sapiens
  misc_feature 1, 2, 3, 4, 5, 6, 7, 8, 9, 10, 11, 12, 13, 14, 15, 54, 73,74, 75, 1644, 1840, 1841, 1842, 1843, 1844, 1845, 1846,1847, 1848, 1849, 1850: n = A,T,C or G
nnnnnnnnnnnnnnnaaattcccccttttaaaggcccccccgggagggaaattnttttttttttttttttttnnnttggtcctgaagtaagattttatcatattctttgtaattttcagtcttccctgagatgtagctcagtggttcctagctttagctgcacattagagtcacctgcagctcttttcaaactgtcgctccacagctgggcctcaggcatcaatgtcgaaagctctccgggtgattccagcttgcagccagggccgttccagcaactccaaggctggctggtgtgcgctgaagctgtcgggagtcggaccagctgcacagttaatacatatgtgtcctaggctcctctctccttccaacgcaaatatgtgtacaaaccctgcctggaaccgcagccctgctctcagaatcaaattcctgaaagtgggcaagcggaagcggaaataagccctctcccaacgccagctgactcgatttcgtctcggtcttccccagagctggacacgaggcaccatgatcagagagacacattccctgcggacggcgctcccatcggatactggagggacgcgacactagaggcaggcagtacttcagggtgaccataagtctcccaaacagccacaacggctcgctctcccagctaaggcgacagcgctgccattttggatcctgttcagccacgggaagccggcgtttgcacacattttcggacgtcatattaaagcgcaccggacgccgagacttctgggagatgaagtccttgcgaaggccccgcattgattgggagcgcagtcgccaggaccctgtgcgcaggcgcgttggtttcccgacctgaagaggcgccgtcttcccgggtcccgagcactctgtgccggaggactctgcccttgtccacaaggagagcacacaggagagaatggctgctgtgtctccgaccaccagatgccaggaatcagtgacattcgaagacgttgccgtggttttcacagatgaagagtggagtcgtctggtccccatacagagggacctctacaaggaggtgatgctggagaactataacagcattgtgtcattgggccttccagttcctcaacctgatgtgattttccaattgaagagaggggacaagccgtggatggtagatcttcatgggtctgaggagagagaatggccagagagtgtctctctagactgggaaactaagcctgagattcacgatgcttcagacaaaaaatcagaaggatcattgagggaatgccttggaaggcaaagtcctctgtgtcctaaatttgaagttcatacacccaatggcaggatgggaacagaaaagcaaagcccttcaggggagactcgtaagaaatccctctcccgggacaaaggcttgcggcgacggtcagccctgtccagggaaattctcactaaagagagacaccaggaatgcagtgactgtgggaagacctttttttgaccactcatccctcacccgcatcagaggactcacactggggagaagccctacgatgcgcgagtgtggggaagccttcagcacaggagcagctcagcagacatctgatgtcacacacctggggagagccctacgagtgcaggtgtgctcaaaagcttcttgacgtncgtcctactgtcatcagcgattccactgggagaaaccttcgggcacgagtgggaaacctttgacgtatcctatcgaaagaaattactgggaagctttaagttagggggaactttcgaaggttcgccacaaacgtggactaggcagggattgttctctaaaaaatggccactaaggggggcccacacaaaaagagannnnnnnnnnn

SEQ ID NO: 21238 - DNA, 3511 bp, Homo sapiens
tcctgggggggttatttttttgggtgtgtgtgtgtgtgtattgtgccttagaaaggttgcagatttcatcttcacctaccaagaggcggccgcctccttggacaagccgctcatggaccattagacttgagaagacgacccacgtggtgactgcaaagccctgggtacttgccttcatgttctggtttggttttccctttttctgctgctcttggcagcagcctggtcatcatctgcttgtgggagtgggaaatgggtattttagacccaacacaggttctaaatttaaaacaaataataattggaacaaataaaggttcttgtacccagagtgattctacatgggaaaaacaaaccagcttttttcagagagtgaccgaataggaagaagggattcagaaatatgatgtagtagaacatgccctgcaggaagaaaatgttttctctcctgcgtatgttaagaggaaatcagtttaaaatgcctgctaatcaaatgtcgactcagctaaccatatgtccaggttgctgcagagtttctttcaaatctgagtgttgcctgctgaactcggaggggagtttggagaaattttagacagcagctctgtgttctttttttgccgcagccaataagataatagcagaattagccaatcctaaaaccttctaaagacgatttttgagcatcccactgggattatttaatttttctttttgacgtgtgtttttagtttagaagtgctgtattccacaaggtttaagtcagtgaggttggaagataccctatcttttttattcaaaaagcacaatcaatcttttgtttgaaaatctatataaagtacaacttgcttttagcatgattattttcctaaataaaaagacaaagaatttacttactttatgttaattacgggcatgaagcaaaaggttttctttaaaaaaaaaaaaaagtgcagtgatgtagggctgtggttagttaaccgtactgagttatccatctagcatctgtggcttgctggaagggtagtattaactatttaacatgtaatggtgtacttcactcttacctagcacgctgtcttctcattgctttgggggagggagggtctctctgctggcactgtctaacttgcttacctgctgactttgcagtttgcttgtgctatgacatttattgtaggtgctatttagggtaggcttaaagtgctgggtggtgatttgagttcaaacaataaaaaattgtattttttcaatattgtataaacaatagtgttctaattaccttaaaaaaaaaataatgaccagttaagaattgcttttgatcttgtcaaaaaactgaatagaccccagtttcgggaaggtgtgtgagcagtgccatgactctgccccttacctaatcccacatctctctaatgataagacattggctcgcctctgaccagagccccagcaccagagagcggaagatgcagaattgtcaaatgacctgctgggggaggttgtaggagtttagcagatttgagtgtggctgcagagagagagagagtgtgtgtatgtgtgcacatgtgtgagagtgtgagcgagagtgtgtgtgtgtccatctaagtgtgtgtgatgaaggtgggataaggctcctctgttagtgctggaagctcctgtaattgccgcatggatcccactgtgccctcttgttctgtgcaagtctgtcctgtctgggcactaaccttggtcccatgcatgtttatgttctgggtggggctttgcctctccactgggaaactgacttttgctgggttgaacagagtcccttatgctttttgtcctctccctgcgcctgggagaggtgggagtaggagcccaaacacacaggtacagaaagatctggaagaaggcctggcagtgaatccaaggactctgggcccccaacaatagatggtagcgtaagtctggagcagcggtgttttcaccaccaaatgcctttccaggctgcccttccaacactcaggagagcatccagatccctgggcagaggctctacattcttggctttagaggtggtggcagcggcagcaggtcagagccacttctggcggtttccctcccctttttagtgcccatagtttttggatcctcccttgagttttaccagcacaagccattctttgcccctgttcacataactgagctcaagctcttgccaaacaccaacaagcaagatggttgcaacctggcaacattgaatccaccacccttgggctccctctggaagccccagcaccggggggcttttgggcacagggtcagtggtagccatcttagacactgacatttggctttgtcgtcaatttcatcaccctccttgaggttactgtgcagtttcaaccagcattttatcctagtgaggtcattatcaggagttgccatatcatctctccagtacctaacatttctcatccacttcaaaagctgttctgactgccagctggctgatctaagctcctgaggaatgtctcctctcaaaggaatttttccctccaaaggccccctgaagtcctagttggcattggcctggcacatgctttatgttaggcctcccgttgggatggctgagaatcatgaaagacagatcctccgctagcctctgtgggtcaagtttctggacaccaagtctctgggaactagtgtttgattttaaatggcatgtggcccttccttgtttcagtgacttagaaaagtaaaagccatttaaaaaagttagcaagattttttatcgacttcccaactgggcttccagccttgttgaatgaaatcatctatctctgattgggcgcaacgaactgcatttctttggacttctgaatccatgtttgtgctttctctggcccgtgaacacctcggcgattctgttagggatgggatgagtgggaggaagccctttgagaagggggagccggccctgtcatgcgcaggttttccactcatctgaggaagagccagggctctgaatttagcctaacactcatcttggctgtgggcttgggaagaaatggccattatttacagattgtatttggtacatattgtgtgatacttgaaaagataaaagggactgccagcccctaactgaaatctgaagctttttatcgcttatttttcctcgccctgtctcctcccttccacctttctccttgcattgtgatgatctagtaggcacgtctgtcaacaggacacatgcctcctctgactataacctcttaatagttgtgtataatgaaaactgtaaagaggttatttacagattgtatttggtacatattgtgtgatacttgaaaagataaaagggactgccagcccctaactgaaatctgaagctttttatcgcttatttttcctcgccctgtctcctcccttccacctttctccttgcattgtgatgatctagtaggcacgtctgtcaacaggacacatgcctcctctgactataacctcattatacacaactattagagcggac

SEQ ID NO: 21239 - DNA, 2181 bp, Homo sapiens
gcctataaaaattccttaagccaattaagtcagcattaacccagcatttaatatggttttcagtgattctaaatatctatttagatatttatttgagtcagcgtctcgctctgtttcccaggtgccaccacacccagctaatttaaaaaaaaaaaattttttttttcggtagagaccgagtctcactatgttgcccaggctagtctcgaacttccgggctcaagcaatcctcccgcttcagcttcccaaagtgctgggatcacaagcatgagccactgcatccagacctaaatgcctactttcttttaactcagttttcattcacatgaaggaactccaaaaaaaattcaagtctgattattgtgataatggtataaaatgtttgtcaaaaaatgtcatcagtgaactaacaaaccagctcctttctaaattaaaatgcttctgaataatcactataattttaatattccattttaaatctctgttgaaaacactggccatctatgaaaaaaaatgtagttatctgggattgtagattgaccttattcacaaaataaaattttaaatgaaaattaagtttcttggtgacttgctatctctcaagtgctattactgatataagtgattctttactatactgtatcagataccttaaggaaaggtaattgcctaaaaaataatctgtcaaaaatatgtgctgttatgcactgcgagtagaatcattacatttaatcatttaaagagtttaattattttctttcatttttggcagtgagatggggacactttctctaacatgaacacattaagaagatacacatattttgaacaagagattttaactttttatggcaaaatttactggtgtcaattgtattttaattgagaggtcaacaccatgttgctgtctctattccactgaacaaaaatgactttgaaatagaggaaaagaatagccagttttaactggcgataattttttaaaatcacattttcacaacactacaacatatggagatgtagacagttagtctttaacacagagtgctgtagtattttatactgtggtgcttggggaaatattcctagtgaataaccggcagtctgtgcaggaaccagcagtccacacttctaggtataaatatggaggacaagcttctgctcaccgcctcaagagaggtggactcccgaagggtagcctgtctcattttaaaacctataccatgaaaccaattcccagttcctacactctgttctaccttcataatttttctttctcatatatctttccgccagccatccaggctcctgccagtgattagcttccacaagatgatccacatttcccttctttcacactaagaaggacatcttataaaatatacacagatagagaagaaaggcattttatacagaagcagtataaaatttacaactgaagcagtgtcagaaatcaggtcaacagcttatgtgaagctgcaaattgattggaagggactctgagatcagaaaagtctggcctaagggttcgtgcaaactttaccataaaactgtagaatctcaagcacaagtaagttcaaacactgaaagatgtggaaaatttcctaaaaggcaatgataaaggaagagacccttcttgactcataagtttaaaatcacaagacaaattagagactgttcacatgggcagtactacacattatcaatcccaaactgattttatgactcttgtcatagaaacccccaaaacatcagggagggtaagatattccaaatggaccaatcacaaaaaggattcctgtgattcaactatccaatacttatggctatcaatttagtctggcttggggctgttttttacagggaggtggcctcccatggcgcacaatgtgtttttctaagctatccagaatggccacagcaatctgttggacatggggatcagtatgttcatgatctttgatgttgtataaatgctgcaatcctccttcttcaatcagcatgctgcaataccttgaaggattcttgctgcagacatgttgcatggcccaaactgcccatagctgaactcctggtgttgtgaaacagccaagtaatgggaaaaatggattaaaggacctgtatgctaccatctcacactctggagttggccatcccacgcgtccgcggacgcgtgggtcg

SEQ ID NO: 21240 - DNA, 516 bp, Homo sapiens
  misc_feature 322, 323, 324, 325, 326, 327, 328, 329, 330, 331, 332, 333,334, 335, 336, 337, 338, 339, 340, 341, 342, 343, 344, 345,346, 515, 516: n = A,T,C or G
acattctattcacaaagttggggcaaggtgtggtggctcctgcctataatcccagcactttgggaggctgaggtgggagaatcacttgaggccaggagttcgagaacagcttgggcaacatcatgagaccttatctcatttttttaaaagtgggcaatgataaataaaatgatactgaaatttttgaacacttcatatttcatatacgtttacaaacctgttataattggctaccaaaatcttcacatttttatccccttccagtctctacttactccttgtattttagagcatctgggttttttggttttggttttgggannnnnnnnnnnnnnnnnnnnnnnnntcattaccctatcatgctcttgtccttgaattttttctcaatttccttattatctccaaaaatatctgcagcacattgataaagggaatggtatagatagacaataggggaaaacatcccacaaaatattctaacaatactaaattcttatctgcagttttctcttgcnn

SEQ ID NO: 21241 - DNA, 1940 bp, Homo sapiens
ggccctcgaggccaagaattcggcacgagggtggtcgccctttatagtgagacagaaaagcctgttagagcctcccaaaaggagcatgtttgggaatgggaagggatagaaaaactacaactgctcttgttcattcagagccatccctagacctgggccttgaccccacgcacccctccttccctgtctgcactccctgcacagtgtgatccacaggaatcccaaagctcttcaggcccttctaatacttcccttctgtttctctaggtatttctgggaaaagccagcttctgtttgcactggtcttcacaactcgttacctggatctttttacttcatttatttcattgtataacacatctatgaaggtatggtatgccatccacaggaatgtatttcatctacagtgcacaggtctatggacacttaatttatgtcagctgtgtatttttaattaaaatgctccaaaaataatgtcttaatatgctgttcttgactttaaaactttcagaccaccttgtatatataactgggactaaacgagctatcagtaagcatacatttttggtttcaaaacagtagttaattaaaatactttgaagttagaacttttttattttaggttccttaagtatgataaatctaaagctcttgataactctgtaagtaagagcggtaactattatattttcaagccgtgggaaattacagagtccccagagaaatccagcaagttggtacataacaaggaacgaaagcaggactcctagttgcagtgtctcatttcgctgctgtgtgaggaactgtctataggcttctatcttttttctttgccactgagtcagttttacttaaactgttgtgtgtgtgtcatttttattacatttgccatgcttaaatgatctctataccatcatttacttagtaacgtatttttttaaacctttcaacttgtcctaattattagtatctataacacctttgttgtctttcttatattttttctaattcacattaaaacaagtgtataactattaaaatacaaaatgtttgcacaccacctaacactttgtgtagcactggtggcacacaccccacactgggggaagttgtggactacgtgagcttcagttctttcgcacagtgttgaattcatgcttgtgaacacctacagagctgggaactgaggatgcggcagaaaataagcagaagtctctaggctggtgtgggagagtacacagatcatggcagtacaaatgactgcgatttatgatgggtgccacaaaggaaaagtataagagttgcgaacctatggatataaaaaacatgaaacaggcccagtagctcccgcctgtatatcccagcactttgggaggccaaggtgggtggattgcttgagccaaggaatccgagaccagcctgagcaacatagttagacccctgtctctataaaaaatatcatctacaaccattctctctcacatttaaccagtcgcattggttggaataatccctggttccccaactatcctcgagagggttaacaggcgatcaatatcttgacacccgtgagtgttcaaagctgcttcggtgcccgaatgtcgcctctgtaaccctcagcacctgtcatccccggggcgaccgagacacgaactcctgctgacaaaatccaccacacaaatgcggggcccgcgcaaaatacttccctgcagagggaccaccgatcgtcgatccccgcatcgtgatcacaaacgtgctcccctcacagaccgtgcataaaacaccacgcacgacgcacgaacacacgcgtcaatggacacagtcacacgcagacatcgtaacgaccccactcgcgggacaaaagcaccaccatagtgaataagccacggacaatacccagcacgtcgacaaccaatgccccgatgcatgcagattaagca

SEQ ID NO: 21242 - DNA, 330 bp, Homo sapiens
  misc_feature 328, 329, 330: n = A,T,C or G
acgcggggacgcactgcggccgcgtagcgccgcgggtttgatgaacgcggttcccggggagactgtatatttttcaaatttttatcagtctaagtataagagaagaactctaacctccccaggtgatttggatatctactctggagataaagttggttcatcgttaaaatattctgatgaaagcaagcattgtagaacaccattgggcagcttattcaagcacgtaaatgtgaattgatgatgaactggattctttccatgattttgagaaacaggaaacagaagaagagttaattgaaaatgattatagagttagtaccttctgtgnnn

SEQ ID NO: 21243 - DNA, 3779 bp, Homo sapiens
tttttttttttttccggtccttttatctgcggccttccaccggcccttaaccatccgttcattcttttgaacgccgcattcgacccttgcacgggccccaacctgggatccccccccaccagtcggtccccacgtgtcggcccgcccccccacacgaatctgtaccttccggataccgtagcccccggcacccagccttggaagccccccaggaccagcccgtcccagctgggatagagcgccacacaggcctccagctgagccatgtccgtctcatcatcccaaggcttggacatccagcaggatgggaggactttggccaccagtgcaggcttcttggccttcttctccgcgtactgccgtagccgctcctcccgcagctgtgccgcctccttgtcctcctcctcattgtcactgccaaacaggtcaatgtcatcatcctcgtcatcctctgctggtgtggctggcttcttggctgggggctccacttggcgcatgggagatacgtgctgggtctgtggggccgtggcccggtggccagcgcgagctcttctccagcacgttcagccgggcctccagcttggagatggcctgctgcagctcctgtaccacgccacgcagactctggttctccacttccagactggcatccggacgacgagctcaccgtggtctccgctggtgccgctggaggccccggggcctgagcttccagccagggatttctggatgttctctctggctctcgcaatgtcacggaggatcacagctggcgccgttctcctggcgggaggcacctgccacaggcccgttcatctgctcgtagaatctcctttctgcgtcgtcatatttgaacttgtcgaaccagatcttctcatgtgctaggaagtttgtagccatttttctgttgggtctcaggctggacacggacaggccaagaccgaggaccgggtcggtgagacagggaggcagcttcgagggcaccaggccacacgcagggcctcggcagcgtggtggcggcactcggcgctgtcgtaggcaggcttgctgagccagggggcctctgcatccttctgcaggaagtaacagtagggcaaggcagagggggcctccccatcggcccgtcgcagcccggcccgcttgttccctaagatgttgcggccccgccggtctctgcggccccgccgggcaccctcggccaggccggctcgctcttgcaggcgcaccttccctgggggatggccgtcaaacagggcctcgtagaagcccctctcggctgcatcataccggggcttctccagccacacctcccgaaccagtgcctgcaggctgcccagcgggggctggccattgaccggtgggctgggctggtgggccaggtcggggacggccacctgctggcctgtgttgggagtcccctgcctgcggctgccctcgggggccagcaacagggcctgagaccactccacgaaggcccgctcagcctggtcgaaggaggacttgttgacccagatcccccaggtcacgtggtggcaggccacctggtttccatgggtgcagagaccccaaggggccaaggcaggaggccaggctgcctgggcagccacatctgccagcttctggcggtaggagctctctgcctggtcgaaaagtgacttgtccagccacacacgttcggccgagaggcccaggagggccaggtccgcggggccgagcccgctcttgggggagcgcttcctctttttctgcaggggcttcctgctgtcctggctcttcctgggatcacgcctgctgccgccgtcaggggcttccgcctcatcagcgtcctccttggtcgccgcgtccttggctggcgtgaggccaaagcaaaatgaggagcgggaaggcctcctgcaccctggagaccgtgtgggaagacaagcacaagtatgaggaggccgagcggcgcttctacgaacacgaggccacacaggcggccgcctccgcccagcagctgccagccgaggggccagccatgaatgggcccggccaggacgaccctgaggacgctgatgaggcggaagcccctgcacggcggcagcaggcgtgatcccaggaagagccaggacagcaggaagcccctgcagaaaaagaggaagcgctcccccaagagcgggctcggccccgcggacctgggccctcctgggcctctcggccgaacgtgtgtggctggacaagtcacttttcgaccaggcagagagctcctaccgccagaagctggcagatgtggctgcccaggcaggcctgggcctcctgccttggcccccttgggggtctctgcacccatggaaaccaggtggcctgccaccacgtggaccctgggggatctgggtcaacaagtcctccttcgaccaggcttgagcgggccttccgtggagtggtctcaggccctgttgctggcccccgaggggcagcctgcagggcaggggactcccaacacaggccagcaggtggccgtccccgacctggcccaccagcccagcccaccgggtcaatggccagcccccgctgggcaagcctgcaggcactggttcgggagcgtgtggctggagaagccccgagacaatggctacaaacttcctagcacatgagaagatctggttcgacaagttcaaatatgacgacgcagaaaggagattctacgagcagatgaacgggcctgtggcaggtgcctcccgcccaggagaaccggcgccagcgtgatcctccgtgacattgcgagagccagagagaacatccagaaatccctggctggaagctcaggcccggctgaacgtgctggagaagagctcgcctggccaccgggccacggcccccacagacccagcacgtatctcccatgcgccaagctggagccccccagccaagaagccagccacaccagcagaggatgacgaggatgatgacattgacctgtttggcagtgacaattgaggaggaggacaaggaggcggcacagcttgcgggaggagcggcctacggcagtagcgcggagaagaaggccaagaagcctgccacttggtggccaagtcctccattcctgctggatgtcaagcccttgggatgatgagacggacatggctcagctggagggcctgtgtgcgctctatccagcctggacgggctggtcttggggggcttccaagctggtgcccactggggctaccggtatccggaagctacagattcagtgtgtggtggaggacgacaaggtggggaccagacttgctggaggagggagatcaccaagtttgaggagccacgtgcagagtgtcgatatcgcagctttcaacaagatctgaagcctgagtgtgtgtacgtgcgcgcgtgcgtgaaggccctgccacgattaaagactgagaccgtgaaaaaaaaaaaaaaaaatcccgggatcaatttggggggcggaacacagcggtcactgaatggccctggcactagggtgataccgggcacccaacttactggttacacggggggagaaactgcgggcccccaaatgggacggatttaatccgaagcagggctacggcatagacagtgcgcgaaacgagccaccacggcgcgccgcacacagaccggcccaccaacagcaacacaaaccgagaaacaacgcgccatcacagaccgagccgaagcaacagcgacccacaagcatcagccccagcacacgtgcccgcccgagcgccaacacagcaagaccaccaaccgcccgccacggccagacagcacacacgcac

SEQ ID NO: 21244 - DNA, 547 bp, Homo sapiens
  misc_feature 1, 431, 432, 433, 434, 435, 436, 437, 438, 439, 440, 441,442, 443, 444, 445, 446, 447, 448, 449, 450, 451, 452, 453,454, 455: n = A,T,C or G
nagtcaccccgcgtccgcaaaaaccacaagtctggtagcaccagcgtgcggcgtactctaaactcttggtcgtctctgacttttaaacatctatggaaagttctaaaacgtgtgtcctggcgtgtagtttggttggcacttggtgaggagggaagaattagtaaagcactgaactctatagtgatccttcagtggacttgattccgtgtaaacttcccacaacctgctttatgcataggtaccaggagcacggggatgagcctaaaacttgaagcttccaaactcactgctcgctttaacgcagctccctgaaacgttttggaatcggatggtctcaggttgaactttgcagctttcctcagctgtaaaatgcggatgacagtgcatgagggtgttccgaggatcaaatgaaataaagcatggtaaacatnnnnnnnnnnnnnnnnnnnnnnnnngtcccaggaacaacaggtggcctaaatacatgaaaagcagtgtaagctagtgacactaaagccagtcttgtattactgtatttttgacagaa

SEQ ID NO: 21245 - DNA, 536 bp, Homo sapiens
  misc_feature 1, 2, 3, 4, 5, 6, 7, 8, 9, 10, 11, 12, 13, 14, 15: n = A,T,C or G
nnnnnnnnnnnnnnnggaaatctttttatttggatagggcttttatgttttgtttttgttccgcataaaggccttttttgctttgacttgaaataaagttcttgacagagccatatggcttggttaattaagtaacctaaagtatgcattaggattgtgaaatgtctcgtgagtatgccaatcctgagggtggaaccaaatagcctttgatgaaaagggcagtggattctgaaggctctacttcaggtgctgctataatgcctcatctaatcaggactaaattgtgtaggaaactgcagtgggaagaatatgctttctgctcaggctaagagggtcactgatctgtccttagaaattcagagtaacatgagcaaaacctcagctaaaacccatttaagtggcatggattgtgcatgatctttgataagaattccctcatgtaccaaacattcaacgtgctctgtttccacaagtttctgattttcaacttaggagagaagaacagcatttaataactgcatcccttgcacccgcgt

SEQ ID NO: 21246 - DNA, 1775 bp, Homo sapiens
  misc_feature 1774, 1775: n = A,T,C or G
gcgtccggtgaaatgcagaatctgagagaacgcgagaagatgagatcattacagggtggaaagttctgcagcagccttttctggtaatccctttctgcagaacctgatgtttatgggctctaaaacgcagcttagctttagaagcaacagaaagcatgaaatagggtgtccattttaaatgtgttcctgcaacttttttcattaaaactttgagggcccaattttaatttgtggaatattcccgttaatgatgagatctaattaagacatccattaaaagcccgttaaagttaatttaacgtaaaaattccaatagaactgtattggattttctccattaaattgacgttatggatttttaacggatgtcttaattgtacgttattattaacgggaatactgtattacacagattaaaatcaggtcctaagtcaacttggaagagctaagagcatgttttaatattaaaagtcttgcatacctagtgcacagtttggagacgcaaggatagatctgtttactctagttgaacattttctatacaattgaaagcaacctataatagataaatccatcattgcatttaaacaatgaatttccttattctcaaaggacaaatacgtctggattatgtggtaaattgctactcagctatggtgaaatatttatactattctaggcacaacactaggaactaggtgattctgaaacaaaaggaatattttctgttgttgctttaattaccaaggttatttttttttaatctcaacactgacaaaatgaaaccaaatatctcttcctcaccatttctcaaggaggctgcctgttggaattgttttggaaattttgacatgatccctaaattcaacattgggattaaaaaaaaaaaaaaacttcttatttacctcctagggaaagtgttgcccttatgccacatataatagcaaattgctttttttatggcatgcataacctagatgggaaaaaatatggcgcttcggggaaggagggaaaaagtaaatgaagttccaggaatgtcattctgaagtaatgaggcatggacagaaaatatacccctcacatcatcggattgagatggcagtcgaaatagcttcattgaagtgtcagcactcatccatcaatcaatcacccacaaggaaaaatagcaacagtacaacggggtggcttttatgggatttactcatgggcatagggaatagcggctcaaatgtagttctgacatgaaaagcaaggtgctgatattattttttatgatgggaggatcataaagtgaattgagaacagtgaggtctgtctttgcttaacctattcaaccagaaatgaatggagctcgactggaaaggaacagtcttcagatgggttaagattgaagggtggactggactctactgagcaccgtccttcaacaaggaaattctattaaaggaaaatcaatgcattagtattggggttcttgtagctgttaaaaattgtctgctccaatccagggttattaggccaaagttacataattcagatctcactgcaaccatccaaaagtggattctcgagcccttgctccaatggggggaggagatcaatacaattcccaattccatggaaattgtttcccttctaaggaagaaaaaataaatcatctgcttcaacataacaaaaacacaccctccctctcccctaccactctctcccctccctccaaaaaaaaaacctcaggggggggcccggacccaaattcgcctttagggagccgtann

SEQ ID NO: 21247 - DNA, 506 bp, Homo sapiens
  misc_feature 1, 2, 3, 4, 5, 6, 505, 506: n = A,T,C or G
nnnnnncccgctcgcaggtacaaaacacttattgagctttcatggccactgtaaggggctcgcacaatagcctctttgctacccagagaattaatctgattcccctttcctcagcccacgcctacctccaacttcaattttacaggagtagtttcccaagagtccccaccccctccatttgcagaattaacgaagtggaaggactggagagttcactgtggaaaaacgtgtggagtaatctgcttgagacaactgtgttgtagacaaattcatgctgaagtgtggtctcatgtctatgtggctctccatgaacttttttttttgcgtattttggcaatacggtcttggtctgttgctcacgctagagtgtagtgggacaatcatagcgcactgcaaacttgaactcctgggttcaagcaatactcctacctcagcctcccaaagctctgggattacaagtgtgagccacagtgcccagccgggaaatgaaaattaaagctacaann

SEQ ID NO: 21248 - DNA, 361 bp, Homo sapiens
cccagcctcgaaatgcagaacgacgccggcgagttcgtggacctgtacatcctcggccgggagtccccactgtctctctacaatgaggagctggtgagcatgaacgtgcagggtgattatgagccaactgatgccaccgggttcatcaacatcaattccctcaggctgaaggaatatcatcgtctccagagcaaggtcactgccaaatagacccgtgtactttgctgaaaattctttttcccagggtctataaaacattaatttgtttttatattttactattttttgtgtttttttgtttttaaatcaataagtaatctaggactagcattatgtttgctagacctggcatttgctcggt

SEQ ID NO: 21249 - DNA, 1741 bp, Homo sapiens
  misc_feature 1733, 1734, 1735, 1736, 1737, 1738, 1739, 1740, 1741: n = A,T,C or G
ccggtaggtgagcaccagtctccatgatcaaaaatgccccagtttcctttgaaaaagccactagttctgtgaattgtccttttccctcctgcccctaacagtcctacccctctagcctacattagcatatttctcatgtaatgtattttgctggtaagctcatccattagctgcgtccttcagctattcctttagattggaggaagtggatatgaagatggattgattcagctcaccttccatgattgcttttgagggaaaagctacagtggccacatttcagatgttcacttttgcaatttgtggagggtggagagaggtagacttttgttgtgtgttttataaagtactctcagtaaggagtgtttgagttgaagagtcatctgattcgaggccactcatgttctttgtaacttaaactttgaccaagaaattcttcacttctcacttcttcacttcttcccaatatacagtaagtacgtgagccagtcatccatacactaaggcctagttgagaaaaacctttgattcaggatggctgggttactaaccttgaaatgtaagagatctggttttgaatgtaaaagttgcaacacacaaacggaagtcttaaaaactttttgctctggtcagttacaggtggatccccaataatctgtttttggttttctgatggaaataatagaattaggggaaatcaaatctggttggtaggtgtctacagtattagaagagggtataagggcactgtttaacactaagttctaatacttccagaaactgtgcattccagatctacatactaaatgctcttatcattttgaaatgggctcttgattaatagacccatattttttagtggcttctatgttgtatatttgtctaaaatgaaagctcttttgcgttctaaaactacaatatatgtcatcttattttccctgagtatccaagtatagtgcagattctatgtaaaactactaaatgacactggaatatgtttagtagattagggggaaaaactataaaggtttatacaatgtttgtagttacatttaggatggacttatcccttggagaagagtgaagtttgttttttcgccatgtgatgaagaccactgtgattttttaaaaaagtagataatacttaaaatggcgtaataattctgcacttgaatttgtactgttaacagcacatttggaagattttaaaactttttatgtcttataaatagcattcacttattatttggatatttaagggttccattaagttaacactgtatttggacaaagtgtgaccaaattagccagtctgttttcttccatgtttaattagaagtgagaggtagaagtacttcaaattcaacaggccagcaagcaatcggcttaaaattccctttcttaaatgttgtgctcttatgttctcggctttttaatgactttatttttacagtacttgttcagtcacttgagatgaaatgcttggggtagctttttccatccctcaaaacttaatgttttactacgtccatagggttggaacagtctatgccaatccatgagactgctcagagttcggaatttgtctgttcattgccaagaagctatggtcgtggacgcgaatatcaggttctgggcacaaatggttttcccatactatactgtatcacctgtatattggtgaggcactcacgctgttgtcacgggaaacaacagcgcggccaacttatgcnnnnnnnnn

SEQ ID NO: 21250 - DNA, 685 bp, Homo sapiens
acgcgtccgagcggagaacgctggtgggcctgttgtggagtacgctttggactgagaagcatcgaggctataggacgcagctgttgccatgacggcccagggggcctggtggctaaccgaggccggcgcttcaagtgggccattgagctaagcgggcctggaggaggcagcaggggtcgaagtgaccggggcagtggccagggagactcgctctacccagtcggttacttggacaagcaagtgcctgataccagcgtgcaagagacagaccagaagtttcttcagggtttggtctatctcattgggaacctgatgggtttggcattggctgtttacaagtgccagtccatgggactgttacctacacatgcatcggattggttagccttcattgagccccctgagagaatggagttcagtggtggaggactgcttttgtgaacatgagaaagcagcgcctggtccctatgtatttgggtcttatttacatccttctttaagcccagtggctcctcagcatactcttaaactaatcacttatgttaaaaagaaccaaaagactcttttctccatggtggggtgacaggtcctagaaggacaatgtgcatattacgacaaacacaaagaaactataccataacccaaggctgaaaataatgtagaaaactttatttttgtttccagt

SEQ ID NO: 21251 - DNA, 1201 bp, Homo sapiens
  misc_feature 1201: n = A,T,C or G
ggaagccggtgggtgccgctgtattgtttacagtctgcagaaagtgttggaacggaatcattttatttacaggcagttctgcttttttttttttttaatgaaggaagaaaaccccaaaccatgtgtttttgttgttgttggttggttgttttccccctagccattgcagcagtggcagaaacatcagttttagtccagtgctagagcagagccttttcctcaaatgacatcttaggcagaactccagtgtataaaactaatattaatggggctgctctgacttacatgagggcctggggccctcttctctgctgacacttaacagttgaaatttcctgtactgaagcagatatacctgccgtggccatcttcatttgaagggttgagtttcttaagagtagccttagatcctttctttagtcctaatttatttaatgtttatatacagttttaacaattccgactgctttccaaatttaaaactggcttagaaaatgtacagtagaagggatgatgggtacggtaacctgggaggtggaggatggagagttgatatcaccagagttgggaagaaggcaggaaaaacaagtagaagaaataaaaaactataattatgaatgtttttagttcagtgttctagggcctatttgataccataaattacttttaataatgaattggaataattagacaaagattaaataacgttctgagcttcctgccaaggaaagtaggtaaatgtgtaattgattctggagaaatttttgttcaagatatcataactatcttaaataactgatgccctgaaggttttgaattttagaagttttgatgtatttttaaagcgataccacaaataattgaaagttgaattagtaataatactgttttccaaaggttaattaaaatatttataaagcttacaggatctccagtacttaattgagaaaatgagttatatgtgatttatgcatacatgctttcagcagttaagaagtatagtcggggggggcattcggaatccgacatggagaaccggcggaaaacgggtcgattgaacagcgccaatgggaacggcttttaaaaaaaagggggctaatttcggggagaggacgttgaaggcacagaggtaaggaagggaagaggagacgtttgaacttggtgtgacataatttttggtgttaagtttatgtgtatgaan

SEQ ID NO: 21252 - DNA, 767 bp, Homo sapiens
  misc_feature 1, 2, 3, 767: n = A,T,C or G
nnncaaatgtagacaacttttgattgcctaactctcagtgaaacttaaccatcatagaggtattctccctattataacaaagttagattccaaaagcttgtaagtaagctgtgtataacttggacatatgttttcctatagcaccatttctgcatgtaagactgtgtttcgaacctcagcttggagcttggacaatcaagaagaggtgtctttgctggcctcagctatgagaatcctatctaggtaccgccatctctagctatctgtagcaccaaccctctgctactactgctgccttctcccgtgggatgaatgtggtgaattgtgcattcatatttcaggaatgattaacattcaaggttggagatattccagaatcacaatttgattttataagatgctttgcagaaatatcttagataatctaaggattcctaatggcttatacaaaagaactaaagtgagtgtgactatccagcttcttctatttctccctactctttcacttcttttgttcccttcatgattctgctgcatgccaggaatggactcacatgacttctcaaactcctagccaatgtaaacatagtgaaacataataaagtggtaaaaagctatctggacctagatttgagtctaagccctgtcttttcttgtgaacatttgaacaaattccctcacctctctgagttacaatgtccttatgtatgaaatggggtgataactaataaagagctattgtgagagttaaatgaaatgatacatgn

SEQ ID NO: 21253 - DNA, 919 bp, Homo sapiens
  misc_feature 544: n = A,T,C or G
gctcgggaagcgcgccattgtgttggtacccgggaattcggccattatggccggggacatttgcttctgacacaactgtgttcactagcaacctcaaacagacaccatggtgcacctgactcctgaggagaagtctgccgttactgccctgtggggccaaggtgaacgtggatgaaagttggtggtgaggcccctgggcaggctgctgggtggtctacccttgggacccagaggttctttgagtccctttggggatctgtcccactcctgatgctgttatggggcaacccctaaggtgaaaggcctcatggccaagaaagctgcctcgggtgccctttagtgatggcctggctgcacctggacaacctcaaggggcacctttgcccacactgaagtgagctgcactgtgacaagctgcacgtggatcctgagaacttcaggctcctgggcaacgtgctggtctgtgtgctggcccatcactttggcaaagaattcaccccaccagtgcaggctgcctatcagaaagtggtggctggtgtggctnaatgccctggcccacaagtatcctgagaacttcaggctcctgggcaacgtgctggtctgtgtgctggcccatcactttggcaaagaattcaccccaccagtgcaggctgcctatcagaaagtggtggctggtgtggctaatgccctggcccacaagtatcactaagctcgctttcttgctgtccaatttctattaaaggttcctttgttccctaagtccaactactaaactgggggatattatgaagggccttgagcatctggattctgcctaataaaaaacatttattttcattgcaaaaaaaaaaaaaaaaaaaaaaaaaaaaaaaaaaaaaaaaaaaaaaaaaaaaaaaaaaaaaaaaaaaaaaaaaaaaaa

SEQ ID NO: 21254 - DNA, 2338 bp, Homo sapiens
  misc_feature 894, 895, 896, 897, 898, 899, 900, 901, 902, 903, 904, 905,906, 907, 908, 909, 910, 911, 912, 913, 914, 915, 916, 2325: n = A,T,C or G
gtcatcaataatatccttgtgtctcaaaatctccatggtgaatgtcttttgaacttgaagctgagcagaagtctggtcttgctcaagcctgatgtcacccagagacatcaattttttttctgtttcagtaatccaggataactcagcatcagctgcttggtcaaactgctgtgatcgcagaatggctgcatcgatctcctccaccttctgagtgatggtgtcgctcactaatcggtagcgctcattgtcctcagctaccattttctcaagtccttctcttgccctccatggtaccagttccagcaaagcactgctcacttcattaagggagtccagtaaggctttgttgttcttagcttcctttttcagttcctttggtctcatttgtgcttgacttgcttcttctcctttcagaacctgagtttcatatgaaagtaattccacctccactttgtccagccaggtacacagctcttcgtgtgtggagtgcagccgccttgcaagctgcagcgcctgattccagagtcttggccacatcagtgctcagtttagtaatgtctttgtaccttgctttaatggcttccaatttatcttgaattattaaaacttcatcacctgtggtttgtttaagtagttctaaaccatttagtaaagcctgatctacattttgtttcctgagtaagatgtcctcttgcagaacccgaagttcagactgctgcttccatagcccctcagtgctgtaatcctggactgagagcttgctcagtttgtcatgcacttcattcagccagttcatcagttcaacttcatcttccccaaaaatcttagcattacataaggcctgctggaggagctcagacctgctgtgacttttctcttgaatctcaatgtacnnnnnnnnnnnnnnnnnnnnnnnacgcgggggaagcggctcgaggctggaagaggatcctgggcgccgccagtctttagcaccagttggtgtaggagttgagacctacttcacagtagttctgtggacaatcacaatgggaatccaaggagggtctgtcctgttcgggctgctgctcgtcctggctgtcttctgccattcaggtcatagcctgcagtgctacaactgtcctaacccaactgctgactgcaaaacagccgtcaattgttcatctgattttgatgcgtgtctcattaccaaagctgggttacaagtgtataacaagtgttggaagtttgagcattgcaatttcaacgacgtcacaacccgcttgagggaaaatgagctaacgtactactgctgcaagaaggacctgtgtaactttaacgaacagcttgaaaatggtgggacatccttatcagagaaaacagttcttctgctggtgactccatttctggcagcagcctggagccttcatccctaagtcaacaccaggagagcttctcccaaactccccgttcctgcgtagtccgctttctcttgctgccacattctaaaggcttgatattttccaaatggatcctgttgggaaagaataaaattagcttgagcaacctggctaagatagaggggctctgggagactttgaagaccagtcctgtttgcagggaagccccacttgaaggaagaagtctaagagtgaagtaggtgtgacttgaactagattgcatgcttcctcctttgctcttgggaagaccagctttgcagtgacagcttgagtgggttctctgcagccctcagattatttttcctctggctccttggatgtagtcagttagcatcattagtacatctttggagggtggggcaggagtatatgagcatcctctctcacatggaacgctttcataaacttcagggatcccgtgttgccatggaggcatgcccaaatgttccatatgtgggtgtcagtcagggacaacaagatccttaatgcagagctagaggacttctggcagggaagtggggaagtgttccagatagcagggctttaaaacttagagaggtacgactggctgagaatcgactatgtccgctgtctctagacagtatatgtgctctgtgatcatcactggaccagtgtcatagcatacatcaatggtgtgataaagctatgtactagtctgtgtcttatagggacggcacgatatcttggcaatgcatcacacagttacagagtgcacactctactacatgtgactggcagtactgagtgcactcatttgaatgattacggctagagaggcagtacaggtacgtgtgtatatagtatgaatgcagtagggagaccatctgtggtaaaaagtctagacttccagaggtcatcattaatnacacagaactgca

SEQ ID NO: 21255 - DNA, 6657 bp, Homo sapiens
  misc_feature 1: n = A,T,C or G
ncctaggcggcggccgcggcggcggaggcagcagcggcggcggcagtggcggcggcgaaggtggcggcggctcggccagtactcccggcccccgccatttcggactgggagcgagcgcggcgcaggcactaggccagcgtggtggcaaggctgcagccttaggggcgccggttaccgttgatccatgactgaatataaacttgtggtagttggagctgttggcgtgggcaagagtgccttgacgatacagctaattcagaatcattttgtggacgaatatgatccaacaatagaggattcctacaggaagcaagtagtaattgatggagaaacctgtctcttggatattctcgacacagcaggtcaagaggagtacagtgcaatgagggaccagtacatgaggactggggagggctttctttgtgtatttgccataaataatactaaatcatttgaagatattcaccattatagagaacaaattaaaagagttaaggactctgaagatgtacctatggtcctagtaggaaataaatgtgatttgccttctagaacagtagacacaaaacaggctcaggacttagcaagaagttatggaattccttttattgaaacatcagcaaagacaagacagggtgttgatgatgccttctatacattagttcgagaaattcgaaaacataaagaaaagatgagcaaagatggtaaaaagaagaaaaagaagtcaaagacaaagtgtgtaattatgtaactcgaaactgtacattaattaacggtccgcgtacggcccgggcgatatccagcacagtggactaaattattagcatttgttttagcattacctaatttttttcctgctccatgcagactgttagcttttaccttaaatgcttattttaaaatgacagtggaagtttttttttcctcgaagtgccagtattcccagagttttggtttttgaactagcaatgcctgtgaaaaagaaactgaatacctaagatttctgtcttggggtttttggtgcatgcagttgattacttcttatttttcttaccaattgtgaatgttggtgtgaaacaaattaatgaagcttttgaatcatccctattctgtgttttatctagtcacataaatggattaattactaatttcagttgagaccttctaattggtttttactgaaacattgagggaacacaaatttatgggcttcctgatgatgattcttctaggcatcatgtcctatagtttgtcatccctgatgaatgtaaagttacactgttcacaaaggttttgtctcctttccactgctattagtcatggtcactctccccaaaatattatattttttctataaaaagaaaaaaatggaaaaaaattacaaggcaatggaaactattataaggccatttccttttcacattagataaattactataaagactcctaatagcttttcctgttaaggcagacccagtatgaaatggggattattatagcaaccattttggggctatatttacatgctactaaatttttataataattgaaaagattttaacaagtataaaaaattctcataggaattaaatgtagtctccctgtgtcagactgctctttcatagtataactttaaatcttttcttcaacttgagtctttgaagatagttttaattctgcttgtgacattaaaagattatttgggccagttatagcttattaggtgttgaagagaccaaggttgcaaggccaggccctgtgtgaacctttgagctttcatagagagtttcacagcatggactgtgtccccacggtcatccagtgttgtcatgcattggttagtcaaaatggggagggactagggcagtttggatagctcaacaagatacaatctcactctgtggtggtcctgctgacaaatcaagagcattgcttttgtttcttaagaaaacaaactcttttttaaaaattacttttaaatattaactcaaaagttgagattttggggtggtggtgtgccaagacattaattttttttttaaacaatgaagtgaaaaagttttacaatctctaggtttggctagttctcttaacactggttaaattaacattgcataaacacttttcaagtctgatccatatttaataatgctttaaaataaaaataaaaacaatccttttgataaatttaaaatgttacttattttaaaataaatgaagtgagatggcatggtgaggtgaaagtatcactggactaggaagaaggtgacttaggttctagataggtgtcttttaggactctgattttgaggacatcacttactatccatttcttcatgttaaaagaagtcatctcaaactcttagttttttttttttacaactatgtgatttatattccatttacataaggatacacttatttgtcaagctcagcacaatctgtaaatttttaacctatgttacaccatcttcagtgccagtcttgggcaaaattgtgcaagaggtgaagtttatatttgaatatccattctcgttttaggactcttcttccatattagtgtcatcttgcctccctaccttccacatgccccatgacttgatgcagttttaatacttgtaattcccctaaccataagatttactgctgctgtggatatctccatgaagttttcccactgagtcacatcagaaatgccctacatcttatttcctcagggctcaagagaatctgacagataccataaagggatttgacctaatcactaattttcaggtggtggctgatgctttgaacatctctttgctgcccaatccattagcgacagtaggatttttcaaacctggtatgaatagacagaaccctatccagtggaaggagaatttaataaagatagtgctgaaagaattccttaggtaatctataactaggactactcctggtaacagtaatacattccattgttttagtaaccagaaatcttcatgcaatgaaaaatactttaattcatgaagcttacttttttttttttggtgtcagagtctcgctcttgtcacccaggctggaatgcagtggcgccatctcagctcactgcaacctccatctcccaggttcaagcgattctcgtgcctcggcctcctgagtagctgggattacaggcgtgtgccactacactcaactaatttttgtatttttaggagagacggggtttcaccctgttggccaggctggtctcgaactcctgacctcaagtgattcacccaccttggcctcataaacctgttttgcagaactcatttattcagcaaatatttattgagtgcctaccagatgccagtcaccgcacaaggcactgggtatatggtatccccaaacaagagacataatcccggtccttaggtagtgctagtgtggtctgtaatatcttactaaggcctttggtatacgacccagagataacacgatgcgtattttagttttgcaaagaaggggtttggtctctgtgccagctctataattgttttgctacgattccactgaaactcttcgatcaagctactttatgtaaatcacttcattgttttaaaggaataaacttgattatattgtttttttatttggcataactgtgattcttttgggacaattactgtacacattaaggtgtatgtcagatattcatattgacccaaatgtgtaatattccagttttctctgcataagtaattaaaatatacttaaaaattaatagttttatctgggtacaaataaacaggtgcctgaactagttcacagacaaggaaacttctatgtaaaaatcactatgatttctgaattgctatgtgaaactacagatctttggaacactgtttaggtagggtgttaagacttacacagtacctcgtttctacacagagaaagaaatggccatacttcaggaactgcagtgcttatgaggggatatttaggcctcttgaatttttgatgtagatgggcatttttttaaggtagtggttaattacctttatgtgaactttgaatggtttaacaaaagatttgtttttgtagagattttaaagggggagaattctagaaataaatgttacctaattattacagccttaaagacaaaaatccttgttgaagttttttaaaaaaaagctaaattacatagacttaggcattaacatgtttgtggaagaatatagcagacgtatattgtatcatttgagtgaatgttcccaagtaggcattctaggctctatttaactgagtcacactgcataggaatttagaacctaacttttataggttatcaaaactgttgtcaccattgcacaattttgtcctaatatatacatagaaactttgtggggcatgttaagttacagtttgcacaagttcatctcatttgtattccattgattttttttttcttctaaacattttttcttcaaacagtatataactttttttaggggatttttttttagacagcaaaaactatctgacgatttccatttgtcaaaaagtaatggtttcttgataattgtgtagtaatgttttttagaacccagcagttaccttaaagctgaatttatatttagtaacttctgtgttaatactggatagcatgaattctgcattgagaacctgaatagctgtcataaaatgaaactttctttctaaagaaagatactcacatgagttcttgaagaatagtcataactagattaagatctgtgttttagtttaatagtttgaagtgcctgtttgggataatgataggtaatttagatgaatttaggggaaaaaagttatctgcagaaatgttgagggcccatctctccccccacacccccacagagctaactgggttacagtgttttatccgaaagtttccaattccactgtcttgtgttttcatgttgaaaatacttttgcatttttcctttgagtgccaatttcttactagtactatttcttaatgtaacatgtttacctggaatgtattttaactatttttgtatagtgtaaactgaaacatgcacattttgtacattgtgctttcttttgtgggacatatgcagtgtgatccagttgttttccatcatttggttgcgctgacctaggaatgttggtcatatcaaacattaaaaatgaccactcttttaattgaaattaacttttaaatgtttataggagtatgtgctgtgaagtgatctaaaatttgtaatatttttgtcatgaactgtactactcctaattattgtaatgtaataaaaatagttacagtgactatgattgtatttattcatgcaaatttgaactgtttgccccgaaatggatatggatactttataagccatagacactatagtataccagtgaatcttttatgcagcttgttagaagtatccttttattttctaaaaggtgctgtggatattatgtaaaggcgtgtttgcttaaacaattttccatatttagaagtagatgcaaaacaaatctgcctttatgacaaaaaaataggataacattatttatttatttccttttatcaaagaaggtaattgatacacaacaggtgacttggttttaggcccaaaggtagcagcagcaacattaataatggaaataattgaatagttagttatgtatgttaatgccagtcaccagcaggctatttcaaggtcagaagtaatgactccatacatattatttatttctataactacatttaaatcattaccaggaactgtttgttttgtagtgaaccttgagtatgtgctgttaatataccaaattgggtgaaaaaatagggtcctttcaaagtaagagaagaagtgtgtaagaaattatttgcttataaatgttcggtaaatggcattctctgtcagtaaatggagaaataagctaaaataattggctaagtcctattaagttagaggattaagtgtattatattttcattcaaaattgggtgctcattaatttatgatcggtagtatagctaaattgctatgtttgtatcaaaattgagcataaagttgctgatactttctccgtatgaacagaagttgaaacctatttagttcagtagggcagctcagggattttttacacaacatgtatatcttcccattttaagttagaattattttacaacatctggtatacataaacagctggcactgatagctaaattaaagtagtaatgatcaattagttttgttggtatctgaataatagcgttgtttcatagctctgtatttcctaaggaagtacaaagcttctagctctttcattacaaattcgccctgtgcaataagttctttgatcttctctggattcttcacatctttgtttttaaggaaaatgttcttcaaacgctttttaaaatagtctgctccttttggatagtctcgtccaagatacagcagatttttataaagttttagtacttctcctcttaaagaattggccattttcatttatcatgtaaattatccacttttatgcataacatactttccggcacgccggagccgcaaaagcctcgaccgctacgactcctctgtccgtctactgcgaagcggggtggcgttgggggaggtgggcaacctgtcagtaaagggggcggggccggacgcgtgg

SEQ ID NO: 21256 - DNA, 2410 bp, Homo sapiens
agggagtcacccacgcgtccgctacgtgctgacgctaattgtatatgagcgcgagcggcgggctcttgggtcttttttagcgccatctgctcgcggcgccgcctcctgctcctcccgctgctgctgccgctgccgccctgagtcactgcctgcgcagctccggccgcctggctccccatactagtcgccgatatttggagttcttacaacatggcagacattgacaacaaagaacagtctgaacttgatcaagatttggatgatgttgaagaagtagaagaagaggaaactggtgaagaaacaaaactcaaagcacgtcagctaactgttcagatgatgcaaaatcctcagattcttgcagcccttcaagaaagacttgatggtctggtagaaacaccaacaggatacattgaaagcctgcctagggtagttaaaagacgagtgaatgctctcaaaaacctgcaagttaaatgtgcacagatagaagccaaattctatgaggaagttcatgatcttgaaaggaagtatgctgttctctatcagcctctatttgataagcgatttgaaattattaatgcaatttatgaacctacggaagaagaatgtgaatggaaaccagatgaagaagatgagatttcggaggaattgaaagaaaaggccaagattgaagatgagaaaaaagatgaagaaaaagaagaccccaaagggaattcctgaattttggttaactgtttttaagaatgtttgacttgcctcagtgatatgggttcagggaacacgatgaacctattcttgaagcacttgaaagcatattaagtgacagttctcaagatgctggggcagcctatgaagttttggcttagcaatttcacttttgaaccccaatgaatattttacaaatgaagtgcttgacaaagacatacaggatgaggtcagaaccagatgattctgatcccttttcttttgatggaccagaaattatgggttgtacagggtgccagatagattggaaaaaaggaaagaatgtcactttgaaaactattaagaagaagcagaaacacaagggacgtgggacagttcgtactgtgactaaaacagtttccaatgactctttctttaacttttttgcccctcctgaagttcctgagagtggagatctggatgatgatgctgaagctatccttgctgcagacttcgaaattggtcactttttacgtgagcgtataatcccaagatcagtgttatattttactggagaagctattgaagatgatgatgatgattatgatgaagaaggtgaagaagcggatgaggaaggggaagaagaaggagatgaggaaaatgatccagactatgacccaaagaaggatcaaaacccagcagagtgcaagcagcagtgaagcaggatgtatgtggccttgaggataacctgcactgtaatagcctaaacacaactcttatttacttacagccttatgtttttgtattttcttggtagactaggtaatttttttttaaaggacaggaaactgatattttaaagaccaatttgttctacctagcattttaactagtttttctgccagctatgttgaatgcacaaattctgtcacgcatgttcattcattgctacataatttggttcttctggaatatttttatgtagctcttggagtacagctatgaaaattaacaactgttaaaggaaatacctttttttttttttgtaatttttcccttgaagaaccaaagtatttttccccgcgggtggtggaataggggtaaagtcccgctggggattacgctggtggcctttcattcactttgttcacagaattgctgtggacttatactaagacaatttattgggttttaacacaaaaaatttgggcagggacacctatttggttaagaattctccagtatgaccacacccaataactgtaattagagtgtagtgggataatggtgtttaacggctgaccattagtttaacttgtaaaggtacacctgactcagtcatagtatacgggtacccacagtgaggtgaataaaacggggattttcacgaagttagcctgaattttaactgtatttttaaattttaacgctccattaactaagcatcttcttcttgggggaaggggtctaccttcttgtttcccctggaaaggcatgatttaacatcatttgagaagccttattttcacgcttatgtaaatttaacctccattaattaagcattctttctggggggcagggtctaccttctgttccctggcaaggttgcatttcgctcatttggccacgctatttccgttattgtgccgtaggcctgtttggtgtggccgcaattgtttttcactctatttgcgggcctcgaagccggttgggcagttttgcgtgacca

SEQ ID NO: 21257 - DNA, 473 bp, Homo sapiens
acattgaaacaacacctcttacgataaaaggaaaaagtgtgaaaatatgtgttccaggaaagaaaaaagcacagaacaaagaggtgaagaaaaagactttagagtcaaagaaagtatctgcatctgccttaaaaagagatgcagatgcttcaaaagctgttgaaattgttacttcaacttctgctgccaaaactggacaagccaaggcatctgtagccaaagtaaacaaatctacggggaaatcagcaagttctgtaaaatctgtggtaacggtagctgttaaaggtaataaagcttcaatcaaaacaggtaagactattggggaggagagattttattggttattctttatttatggtttaaattcgtataataatttttagcatctaatacttgaagagtttagtagatatttccttgatatttaaaacctgacccattttgttggaattttatctttggcagataggcag

SEQ ID NO: 21258 - DNA, 500 bp, Homo sapiens
  misc_feature 1, 2, 3, 4, 5, 6, 7, 8, 9, 10, 11, 12, 492, 493, 494, 495,496, 497, 498, 499, 500: n = A,T,C or G
nnnnnnnnnnnngtttttttttttttggaaaaataagcataattaaaaactgttagatttggaactttctatttcataattaacacatatttaacaaatatttataaagcctataaatctacaaaaaaagataaatagtgtgctgtgtaatgtttggttatatgtctgtttggattttatagccttactaatatatactataaaacattaaaaaattcagaatacaaagctgtcttccagagaaagctttgtttagatacactaaaaaaaaaaatcaagtaacttataaataataatgtgctttacaaataacttcaatgtaatagatgacaattgtatattttagccaaatccattattctgcttatacaattcatcttctaatttttaccagtggaaagaaactttggagacaggtgaaaatgaatttagcagacatattcctaaaaactggagagttttattttttattaaaccttttttatctagaannnnnnnnn

SEQ ID NO: 21259 - DNA, 543 bp, Homo sapiens
accaggccaacgggctcggtttctatggttttctggggagacggctgagggaaggtcggcttccggcgtcgcgctgcaaacgtctcgctgaggtcatcctttacggcaggcgtccgcgtcgctagctagtcgttctgaagcggcggccagagaagagtcaagggcacgagcatcgggtagccatgcctttcttggacatccagaaaaggttcggccttaacatagatcgatggttgacaatccagagtggtgaacagccctacaagatggctggtcgatgccatgcttttgaaaaagaatggatagaatgtgcacatggaatcggttatactcgggcagagaaagagtgcaagatagaatatgatgatttcgtagagtgtttgcttcggcagaaaacgatgagacgtgcaggtacatatttgtatattgctacatgacaaaaatctaggaagaatatgattcacatgaaaattctttggaaggacatgacagacttttaacagtcctgtatagtgaaaggagaatagaacgactacttttact

SEQ ID NO: 21260 - DNA, 1181 bp, Homo sapiens
acgatctcagctcactgcaacctctgtctcccggtcaagtgattctcctgcgttagcctgccaagtagctaggattacaggcacctgccatcacgcctggctaatttttgtatttttgtagagacggggtttcaccatgttggccaggctggtcttgaactcctgacctcaggtgatctgcccacctcggcctcccaaagtgctgggattacaggcatgagcccccacgcccagcccacacttttaattaatggagaattgaggctactaaacacatacttcaaggtatgaaaggaaatttgaaccactgttaagaattattctggagaataaaaggatctgaaggtggcatcaagagaatcacccatctccatatatgggagctactctagaaagaaatgcaaaaggtatatttcagtaatcttttcccaacttctctgttcccctgacaatactgagatcaacagaagcattggaaggtttcttttagataatagtgagagatacaggcagattgctagccaaatacagctctgggttactgtgataacacaggttccttcgaatgtatttattttcccaaattaaaaataagcagggatggaagtagttattatgcatttttcaaattctcctttcaacagtctatataaatgttgcagaatgctagactaggatgaaaagtaggagtcatgagaactgcagaagcctgagatcctaaaggaagtgtaccatctgacttggcaatgtaagacacacacgttagtgtggggcacaaacgtggaatattaggagagagctggttccagcaccaaatccagagtcactcggggaaggaggtatggtggcaacactttatgcttaatattcaattctgctccagtagaacatggtacctccgccgtcacaagttcaaaaattatctttgattcattttgttccccattcctctaatatgtcaccaattctgctgatacattctttgtaatctctccatctattttaatctgttattcacctgagctacacaaacattcatctgcacaaggagtattccacgtgctgaaaagacagaggattaagccctccttgtggaggcattcacagtctggttttaatacacaaaccaacaattataatacacagggataaaaaaagtagaggcacttattgcatacctg

SEQ ID NO: 21261 - DNA, 2299 bp, Homo sapiens
  misc_feature 2288: n = A,T,C or G
cgacccacgcgtccgggcggcagccatcaggtaggctgcgttgaggatctttgctcttccatccgcctttgatcgtcttcctcttcagccatccaggtccggggaccctgcgtcctcggagataggtctccctcctgtgcggccagagtttggtcaggatgcgggacagcaaaggggtggagaggcggcccccggggcgggttgagcgaagatgtgatggcggcgcgaattcgagctgggcccggatcctggaggaggcgtggggctgacgaatggggcgcccgggacaaggcagcctaaagtgaggctgctggttgggtggggtagatgcattttcctcgagagttaatcctcggtggccgcagcagtaccttgtcctgtgatgtcagcggcatctcctttcaggtcctccttggggacgccgcctgccgcagccacccgcccccttggtgctcagttctggttctgttaattcgccccaccaaaacgtgccgagcaccgctctgtgctggggttgcggaagtgactgaacgcggctccgtgggcgcagtggtgggggttgggctagctgtccccggcagttggtgcagagccattttcattcccggcggtttccttgtttttgttggggaactaagatggacggatacagtcgtcttattgtacttaaagcggatgatatttaatacacagtttgatttcacaggtaagccaagatgggtgcatacaagtacatccaggagctatggagaaagaagcagtctgatgtcatgcgctttcttctgagggtccgctgctggcagtaccgccagctctctgctctccacagggctccccgccccacccgggcctgataaagcgcgccgactgggctacaaggccaagcaaggttacgttatatataggattcgtgttcgccgtggtggccgaaaacgcccagttcctaagggtgcaacttacggcaagcctgtccatcatggtgttaaccagctaaagtttgctcgaagccttcagtccgttggcagaggagcgagctggacgccactgtggcggctctgagagtcctgaattcttactgggttggtgaagattccacatacaaattttttgaggttatcctcattgatccattccataaagctatcagaagaaatcctgacacccagtggatcaccaaaccagtccacaagcacagggagatgcgtgggctgacatctgcaggccgaaagagcccgtggccttggaaagggccacaagttccaccacactattggtggctctcgccgggcagcttggagaaggcgcaatactctccagctccaccgttaccgctaatataagtaaagtttgtaaaattcatacttaataaacaatttaggacagtcatgtctgcttacaggtgttatttgtctgttaaaactagtctgcagatgtttcttgaatgctttgtcaaattaagaaagttaaagtgcaataatgtttgaagacaataagtggtggtgtatcttgtttctaataagataaacttttttgtctttgctttatcttattagggagttgtatgtcagtgtataaaacatactgtgtggtataacaggcttaataaattctttaaaaggagagaactgaaactagccctgtagatttgtctggtgcatgtgatgaaacctgcagctttatcggagtgatggcaatgctctgctggtttattttcaagtggctgcgtttttttttagtttggcaggtgtagactttttaagttgggctttagaaaatctgggttagcctgaagaaaattgcctcagcctccacagtaccattttaaattcacataaaaggtgaaagctcctggttcagtgccatggcttcatggcattcagtgattagtggtaatggtaaacactggtgtgttttgaagttgaatgtgcgataaaattattagccttaagattggtaagctagcaatgaatgctagggtgggaagctggtgagccagtggccattagataaatacctttcaagtgtgagcttagacgtcaaccctaaaatacttaaccgtaatgctaattgtgatcattatgaatcccttcagtcacattagggggaaagtagttggctataagtaccgtcaatccttaagtccagtcaagtccttaaaaacatcttggggttacccactctgtccactcccataggctacagaaaaagtcacaagccgcatggtttccaaccatatgtggttttctgcagttaatttctcctgttcctgggccaaacaaccctaaaanatcccttacca

SEQ ID NO: 21262 - DNA, 482 bp, Homo sapiens
  misc_feature 479, 480, 481, 482: n = A,T,C or G
acacataagttcattcttggctttttaaattttatggaaagactaaatacatttgtgtctattaatcaaaatatgaatttagaaggaaataattttgtgtaaaaaattgtatgtggtaaaattttacctaatttaaaattgttgttccataatttttttaaaaagaaaaattacagaaataagacttggggggtgggggttgaaaagtggtgaaagaactaaacaagtagaagaggatttctaaagcactggtctcatgaaaaaagtttcatgtgtgactgggtccactgagattgaaaagaaattgtttatacgatattctaaaaattaaatgttgctgtcagggatgacatgatacaggaccagagtctgtgtaaacaacaaagttttcttaaagtattgatacacgcttttaaaaattgcaagaggttttaagtttaattcaaaaatctgtttaacagccattttgtacctgcccnnnn

SEQ ID NO: 21263 - DNA, 935 bp, Homo sapiens
  misc_feature 1, 2, 3, 4, 5, 6, 7, 935: n = A,T,C or G
nnnnnnngcttggttcctcatggaggagcctagattgtttttctctttttgagagcacaggacctgaccagaccttgtacaggttcatttctctcctttttcttcaattccattagattggtctttctgttcccccaatcagcctctcctagtttatacaaatccttctttctgtatatccatatccctccttcccaaggctcaggtgcatttttttttctggtgcacttggccttattttggttagtaatttaaagccttctctttccctcaatacattgtaccccttagatggctcttgaaaattatcccctgtgccttctgtgttacacctgcatcttagttaaataaagtgtagattcttaacctttttttgtgcgatggatccctttagctgtctggtgaagcctatggatcccttctcagaataacatttttaaacctataaataaaatgcacagaactaagtgcacttacatttgagaatgattatcaagctattaaaaaccaaatttgtgatacagtaatacatagttctttagtaggtcattaaatatcaaaagctactggtggtggtttcattgctgtaatttcaaagtagtgatgagtgttacaaatgatattttgcaatacctgtaacagctagatgtaacatggtataaaattatctgtgatctcttttggtaacaaagtcacagatacatctactgctgttgttattatctaaagttagttgaaaaaagtaattttgtgttcacatctcatttaatggacccactgaatctttgggttaaagtaattgaactagaaatgtaaatagttatactttcttactttaataaaaatataacttattaaaagcttaaggctgaatacagtggctcttgcctataatctgagcactttgggagtccgaggtaagaggatcacttgan

SEQ ID NO: 21264 - DNA, 586 bp, Homo sapiens
  misc_feature 1, 2, 3, 4, 5, 6, 7, 8, 9, 10, 11, 12, 13, 14, 15, 16, 17,18, 19, 20, 21, 22, 23, 24, 25, 26: n = A,T,C or G
nnnnnnnnnnnnnnnnnnnnnnnnnnaaggattctttgcagaaaacttaaaactttattaagagaatattatcagtcaaatttccagattaagaataacgttcttggtttcagtcttcatttgtcttgcttgaaacctatggttgcgcatcacctgcttccagcactttagtgagatcaaaagtgggcataataccctccctgacatcaggaccatctccaggctcatcctctatcttaagcagagccagttcctgttgaaaagcttccatgtcaggcccttgaaaagcaggcactgcttgattttcaatctccccactaggtgcaataccctgattatcagttggtggttcctcttcttgacgtttttcctcagtgggctcctggacaatcacagatccaaccggctgggaagactcttggtcatttcctctttctgaggattgggatcttgctcttacaagctcactcatatttcccacggctgagtcttggtcagtgagaaagaatcaagatggcggaaagaatgaagacactctctctccttgcagacctctgtgcggacacccccgcgtcagcccccgcgt

SEQ ID NO: 21265 - DNA, 2505 bp, Homo sapiens
  misc_feature 1, 2, 859, 2504, 2505: n = A,T,C or G
nnatcggagtcgacccacgcgtccgctagatatagaaaaacttactgcattttgcccagtatctaatttacactaatacatttatgctgaaacctgtaccttaaaacatttttaaataggtatattgagatcttcagaagtagcaggagtgaaatcaaaggattttatgatccaccaagaagattgctgggacagcgaccgggaccatatgatagaccaataggaggaagagggggttattatggagctgggcgtggaagtatgtatgacagaatgcgacgaggaggtgatggatatgatggtggtatgtgtatctaatgaacaaaggttctgttgtcattttcttaatgttcctgacactttgtcaagaaatacagaaatggcagtaatttcagtacctattaggttttaaaacctgttcatgaaaatacggattcccatggctagctgtgggacttgactgatgcacatattggcacctagaaaacttacacagaaattaaaaataagatgttggcatattttgacctttttttgcctaaggatgaaatttaatttacatgtctgaacttaattaactttctgagattttaaatttccatcacgttgactgcttttttcataggttttaagttgggaattgcaaacttgcaatcaagttacacagactgttaccacaaaatgtttttgtaaactaaattatacaatttatctctggaaagtgtgtagtcatgtgtttctccttaaattacacaggttatggaggttttgatgactatggtggctataataattacggctatgggaatgatggctttgatgacagaatgagagatggaagaggtaaaataaatattanagacatttttattcataggtaaattttagtatttgctttgcaagctcttagtggtaatataggaaacttgtatagagttaattcagacaaatttcagtgcattcctatatagagctttataccttgtatagtatgtatgtatacttccctacttgtatctgtaatagtttataatcttggcaaattgtgttttccaggtatgggaggacatggctatggtggagctggtgatgcaagttcaggttttcatggtggtcatttcgtacatatgagagggttgccttttcgtgcaactgaaaatgacattgctaatttcttctcaccactaaatccaatacgagttcatattgatattggagctgatggcagagccacaggagaagcagatgtagagtttgtgacacatgaagatgcagtagctgccatgtctaaagataaaaataacatgcgtaagtggtgtctttggcacacaatcttatttcctaaacgtgaatttataaaataagaggctctaagatctgtaggtaacgcttggcagttgttgggatttaaaaccatttgacctctataatggctttctgtgggctttatatatcgctgtactagtaattaataagcatactttgtttaatattacttaattgatcttttttacaaagcttgtattgatgaattttatccatcattcctttctcccctgttactctttctttttttcttaaagaacatcgatatattgaactcttcttgaattctactcctggaggcggctctggcatgggaggttctggaatgggaggctacggaagagatggaatgggtatgtaaagtttttaaaatatgcagggttagctgcttatcgatgagtctcaattttttttcttttttctttttaaagataatcagggaggctatggatcagttggaagaatgggaatggggaacaattacagtggaggatatggtactcctgatggtttgggtggttatggtaagtatctctagttcagtttgtgttagtccgcatatgtagtgcaaactttaaagtgcaggtattacttttattattttatgcagatatctcctgctgagtgattcttaatatctttttcttaaggccgtggtggtggaggcagtggaggttactatgggcaaggcggcatgagtggaggtggatggcgtgggatgtactgaaagcaaaaacaccaacatacaagtcttgacaacagcatctggtctactagactttcttacagatttaatttcttttgtattttaagaactttataatgactgaaggaatgtgttttcaaaatattatttggtaaagcaacagattgtgatgggaaaatgttttctgtaggtttatttgttgcatactttgacttaaaaataaatttttatattcaaaccactcctaaagatgtgctgccttcataagatttgggttgatgtattttactattagttctacaagaagtagtgtggtgtaattttagaggataatggttcacctctgcgtaaactgcaagtcttaagcagacatctggaatagagcttgacaaataattagtgtaacttttttctttagttcctcctggacaacactgtaaatataaagcctaaagatggtggcttcaggagnn

SEQ ID NO: 21266 - DNA, 1074 bp, Homo sapiens
  misc_feature 1053, 1054, 1055, 1056, 1057, 1058, 1059, 1060, 1061, 1062,1063, 1064, 1065, 1066, 1067, 1068, 1069, 1070, 1071, 1072,1073, 1074: n = A,T,C or G
agggagtcgaccacgcgtccgaacaccttttgtctgatacattctgtggatcatattccttttttatatataattttaccttttattttagatttgagtggtacaggtacaggtttgtttcatgggtatatcatgtgacactgaggtttggaatgcagatgatcccatcacccaggtactgagcatagcaccccacaggtagtgtttcagccctggcccctccatctctccaccctctagtattccctagtatctactgttcccaactttgtgtgcatgtatagattatgtttcttagagttctctaattaacgcgggcttgggaaggtagtgtgaatgatgtaaaggtgtgccaaattggttctgcaaaattaaccttttttgaataaaatattcaattttctgaagcgagcaggctactttctcaagcaaaatttcatttgaatcctccacccccagcctgcagagagagagggagggagggagacctcttaagagttttatttgttctcttgcagtcttatgacttacttcttaatgaaaacccttattgttttctaagagaaaaaaaaagagaatgaatgcagtgttcgaaatgggattatgtagaatttttaggagcataaagagaaattgaagaattatgaaaacaaaggccagaaaagcaaacagtgttcttcctctacgtagcagccagatggcgttttaggcaaatacaccacaaactgcacagccaggtccccatctcaaagggctttccacggagcaaaagcagtttcgatcgtattgtcatcaccaccatcaactttttttttccactcacatgatgtatgccaatatcattattctcgttatttgtataaccgtcatcatcatcaatgtctcgtgaatttttgcgtgttatttttaacatagcatgtaaacagcacctccccacaaaaaaaactagctcaggataaacatctctaagagtatttcataggagcttatagtttgaccaacaaaaaaatgctttcttttcccaaaataaagttctgtggtttgtcttaggcnnnnnnnnnnnnnnnnnnnnnn

SEQ ID NO: 21267 - DNA, 1454 bp, Homo sapiens
  misc_feature 1, 2, 3, 4, 5, 6, 7, 8, 9, 10, 11, 12, 13, 14, 1368, 1422,1428, 1434, 1451, 1452, 1453, 1454: n = A,T,C or G
nnnnnnnnnnnnnnatcatactaaaaaccaaaacactacattttgttataagcagcaatttcagagagaatgaatttggaaagagaaagaaaatgtgacctgagcaatattagttcataggaaagataaaagtaacctaatcagtcacatttggacaattttttaataaacgaatgcagttagtacattctctataattgtccacgtaaaattaaatgcttaataccttttgaagaataaattattagttcccataactagacagttggaattacagcaaaacagtcatccacagaagctctattgtccagcgtttagaaatgtgaatacaaagcaaaccctaacttggcaattacatatatatatttatttataagcatttagctaaaatttatttagtgaataattgaaacatacataatttgccaatataatgtaagcttggatttccatattctaaaacttttgtttttctaaatatttcaaagaaacttatgtctataatttaatatattcaagtatagttcccttttctcttatgtattagcaaccaaactgaattttaggtgatcaagcataacattttattggaaagtatatggatgggaatccacctacactgtaagactaaaccccaggaacagtgcatcccatgagcataatgtatgttgtgaataatcactatcaatgcccactatattccccacataaaaaggcaaatagcccactattgatttattctgctaatttcaacaatcattgatcttgaggtacatgccaaaaatgcctgaataagctttgaaatgtaaaacaaaaatgttttaaagaagtttaattgcagttggccaatatatacttaatatggcttgcattttttttttttttttgaaataacattgtgacttaaaggatttctaggtcctaaaatctggaaaagggatctggaaaaatttggactccatgagtagtttggattcaatctctctgtgcttttttttttctttataacaggaatgggatggggggtggggggaataaaacttcttatgctatataggtcatgtactgtgagaaacaagaatacaaaactatgggtttaaaaacaacatatacagaaataatcgccaatctctgtctacctccacatcattttgtcatagaagttcattgtgattaaaaagtttaaaagtttttaagagaaaaggtagattgagaagtagaaaggaagtaggaaggaaattgtgtcaaaaaaagaaacagtttattagatactctgaccctgggacacactgttcctttccccaaaatattttccgtgataggaactgaatttaaaattatcaccttggtagaattgcctggaagatncagcaactaaaacctggattaatgcccactttcttaaaaaatgcccattaactnttaacnctggcngaaaaatggtaattaannnn

SEQ ID NO: 21268 - DNA, 4210 bp, Homo sapiens
  misc_feature 1, 4208, 4209, 4210: n = A,T,C or G
nacgcgtccggcggcgcgagcgtccaggcgctgggctctagctgaggccggcgcttagcggcccactgtccgcagcatgagcggggccggcgtacgccgcacgacggcggggctggggctgtgagggccgcggttccggactcgagttgccgcgtcgggctgggcgcgccgtcgggtcccatggagctggaggggcagtggtggcgaggacagctggccgccgatattcaccaagcgcttcgctacaaggagctgaagttgccctcctataaaggccagtcccctcagttaagcctcagacgggattttgctgacttgattgccattgtgagcgatcgcttcacactctgcccttctgcccgccatcttgctgtctatttactggacctgtttatggaccgctatgacatctctatccagcagctgcatttagttgcgctttcctgcctgcttctagcaagtaaatttgaagaaaaagaagacagtgtgcctaagctggagcagctcaacagcctgggttgtatgactaatatgaatctagtattaacaaaacaaaatttgctacatatggaactattattattagaaacctttcagtggaacctctgccttccaacagccgcccatttcattgagtattatctctctgaagcagtacacgaaacagatcttcatgacggctggccaatgatttgcttggaaaagactaaactctacatggccaaatatgcagattacttcctggaagtatctttgcaagctgctgcatgtgtggcttcttcgaggattatacttcgtctttctccaacgtggcctacaagactacatcgtcttactgcctactcttgggatttcttagtgcagtgtattgaacgactgttgatcgctcatgataatgatgtgaaagaagcaaacaaacagagagggcaagcaggacctcagtcagcgcaactaagtgtattccagacagcctcccagccatcacggccagttcactttcagcaacctcagtatctccatcagacacatcagacctcactgcagtatcgccatcctacgtcagaacaaccaagctgtcagcagattgtatcgaccacacacacctcatcttacacactacagacatgtcctgctggcttccaaactagtgttcagggccttgggcacatgcagactggtgttgggatgtcactggcaataccagtagaagttaagccctgtctgagtgtttcttacaaccggagttatcagataaatgaacattacccttgtattactccatgttttgaaaggtgattatttgtgaagctgataaccgacccagactgctttgtgacatgaagctatgggtaagcgttttgtaaacttctgttcaaaaggaaagggatctaaatgacatcagaactcttcaggtaccagcaccaggaagactgaatatcctttttaatgcaccatgaatcctgggagactaagcaaattaacagtatgtcaaattctgttacaacaaatccctgtatgacaaaaatgttcaagtcctggctgatggtccaaatatttcaaaaatattcagtacaacagaaaatttggacagacttcaatttgccattttgagatttgacctgtggtagcatctgggcctaatgttggcttctaagtcaaagactaaatgtttatctcatctatggacttgccaaacagtcttttatgaaggaaagttacagtattaatttttgaaaaggttttttttattctgcaattttttatttttgttctacacatgaatttttgactaagtttaaactcatgaattgttatgctataccaatctgcagtaaaaaaaatttttttagatgattctatataacttcgtctcacaaatagtgtaggtatctgggtttatatactaaaattaagggtggagaagatcttattttttaaatcatggtcataatttttctttttttccctaagtgatcaacatcaaatttttagaattaaaatacatttaactcagggaatttgtactacttggaaacacttaactgtaatgcaacatgccttgggaatgttatagtgtgaactacctttataacataggttaaaatacgcttgctagggtgtgttttcaaatgagaacataatatagctcagaatgaagtggtagttcctgtgattcataatacatatgtaggttttgcatatctcagtgcaatccatgatttatactcagaatcgacattcttaaaaagttatttcaagggatggcataactgtaagaggtcagtgctagaataaagtcctgtaggtttattttggaagggactgtggccagggtagttctcaggttgtgctagagcagcactttgttatgtggaagacaggttttttaagcaacctttgaatccagctctagtcagtctaagcaggcaaaggtaactgatgactaaatttcagtagctactttcattggattgaccctacaactgccctgggacatttcactgtaccagtattaactgcaaacagcaataattgtcattacagcaagggcagtttgggggtaaagcattttggaggaataaccttaaaaagttaaaaagtcattgtaataactgataaactgtatacattgtgctcctttctgggggaagaaagatttggtggagggaagctttctggtttaaaaattagtaaggtgtgtctttttgttttttttaagatagcacttgaatagaagggaaaactgcatggcagatacgtgactgccacaatatgcatcgaagacaaacttactataaagatgttgtgggtatgcagcaggagtctcagtaatcaagccaatggcctttgtcaggaagggaaggggctcaacacagtgatggactgatccagatggctcccggggatgaatgtgggtgggtagcttctgtcagtatcaatgcttagagaaatatcctttccttaaaaagaaaataacttttatatttagagtacatagggcatgatgtggatttattagtctggtagataaaatgaaaaaccactcaggtaagaacactcactcatggcagtttttaagcatgaaaattgttttctgaaagtatcatcacttttcctttttaaagaaggctgctaattggattttggtagttcttacctcaagaaaacttgaattatttgggggaaagtaggctcaaaagagaatatatctttcacattcacattcagaacccagcaacctggagtccaattttcagtattttaactacctcaataatgctatgaatgtaagatattgggatagagatcccaacttgaaacaacagccagtgcctgtggtaacttaatgtcttgtcaaatacttttattgattggtttatatgccattcttgttatagaagaatatgccttttaaaaaagcttattaataacactttcccaatttatattttaaaaagctaaagaacactggattaataatcttttgggagggtagaataaaataattgattactattgctgcatacccggggtgggatggggtggttggagaaccagaactatttttaaaacattaggtttcaatataaatacaactcacaactgctagctttggggggtgggggaacattgtttgggttttgttttgtttaatttattgattagtctttaaagtaggcttttttttttttttgagaatactggaccatcattaaatgtgtactgtgaagagattaatatgtatgaagggctttaccaaagtccactaaataaacactactcaagtacagactgcaaaccaaaatgtatctgtgttacgacattaattgcaaatagcaagtatggtgctaaagtctacaccaatggaattagatgagtgctatgcacttaattttaaaataaaactagttttcagtaaaacccccccccaaaaaaaaaaaaacaaaacaaaaaaaaaaaaaaaaaaaaaaaaaacaaacaacaaaaacaacaaaaacacaacacaccaacacaaaaaccacacagaacaaaacaacacaaaacacaaaaactacaataacacccaaacaatcatgacgggcgcggcgccttgtcccctactttgtccttcttccaacggcggcagcacacaaagttgactatgcacgacacacgctgtatcttgatctgaggccaagatggcgtgcgaccgcactccaaggccaagnnn

SEQ ID NO: 21269 - DNA, 2265 bp, Homo sapiens
gtcgacccacgcgtccggctgagtcgaggtggaccctttgaacgcagtcgccctacagccgctgattccccccgcatcgcctcccgtggaagcccaggcccgcttcgcagctttctccctttgtctcataaccatgtccaccaacgagaatgctaatacaccagctgcccgtcttcacagattcaagaacaagggaaaagacagtacagaaatgaggcgtcgcagaatagaggtcaatgtggagctgaggaaagctaagaaggatgaccagatgctgaagaggagaaatgtaagctcatttcctgatgatgctacttctccgctgcaggaaaaccgcaacaaccagggcactgtaaattggtctgttgatgacattgtcaaaggcataaatagcagcaatgtggaaaatcagctccaagctactcaagctgccaggaaactactttccagagagaaacagccccccatagacaacataatccgggctggtttgattccgaaatttgtgtccttcttgggcagaactgattgtagtcccattcagtttgaatctgcttgggcactcactaacattgcttctgggacatcagaacaaaccaaggctgtggtagatggaggtgccatcccagcattcatttctctgttggcatctccccatgctcacatcagtgaacaagctgtctgggctctaggaaacattgcaggtgatggctcagtgttccgagacttggttattaagtacggtgcagttgacccactgttggctctccttgcagttcctgatatgtcatctttagcatgtggctacttacgtaatcttacctggacactttctaatctttgccgcaacaagaatcctgcacccccgatagatgctgttgagcagattcttcctaccttagttcggctcctgcatcatgatgatccagaagtgttagcagatacctgctgggctatttcctaccttactgatggtccaaatgaacgaattggcatggtggtgaaaacaggagttgtgccccaacttgtgaagcttctaggagcttctgaattgccaattgtgactcctgccctaagagccatagggaatattgtcactggtacagatgaacagactcaggttgtgattgatgcaggagcactcgccgtctttcccagcctgctcaccaaccccaaaactaacattcagaaggaagctacgtggacaatgtcaaacatcacagccggccgccaggaccagatacagcaagttgtgaatcatggattagtcccattccttgtcagtgttctctctaaggcagattttaagacacaaaaggaagctgtgtgggccgtgaccaactataccagtggtggaacagttgaacagattgtgtaccttgttcactgtggcataatagaaccgttgatgaacctcttaactgcaaaagataccaagattattctggttatcctggatgccatttcaaatatctttcaggctgctgagaaactaggtgaaactgagaaacttagtataatgattgaagaatgtggaggcttagacaaaattgaagctctacaaaaccatgaaaatgagtctgtgtataaggcttcgttaagcttaattgagaagtatttctctgtagaggaagaggaagatcaaaacgttgtaccagaaactacctctgaaggctacactttccaagttcaggatggggctcctgggacctttaacttttagatcatgtagctgagacataaatttgttgtgtactacgtttggtattttgtcttattgtttctctactaagaactctttcttaaatgtggtttgttactgtagcactttttacactgaaactatacttgaacagttccaactgtacatacatactgtatgaagcttgtcctctgactaggtttctaatttctatgtggaatttcctatcttgcagcatcctgtaaataaacattcaagtccacccttttcttgacttcaccatgcctatgtgttgctttctaatttggggcctttaatgttgctagtgaaaggtaacctgtccaaactgatgggattaaccagaggtagtcctggctgcagtttttgcagaagaatgaataacattttctggaaaccctcagccagtgtctccttaagtctccttggccaggagatgggctaaataccgtaaatttaatcataaatctctgctggagctacaaatggaattctttcctcccaaattcaaggcgaatggggttccaaggtaatcacggtgcaca

SEQ ID NO: 21270 - DNA, 384 bp, Homo sapiens
  misc_feature 1, 2, 3, 4, 379, 380, 381, 382, 383, 384: n = A,T,C or G
nnnnactaaatagtctgtcgtattaattagactgggtagtcctaactcaagaaagcatttggcaattaaaagatggaggactcagggtctgaccgttttccttggccttcatttggctttctctctcttttctcccctccttcttcccaggcctggctggctggtgcctgggacaccatttggggctctgagagggttgtggctgccagcccccagtcgccaatgcctgggtcaggcacttcgtatcccctgtcctgttcaccatttctcctttctcattgttctcataatatgtcctgcttaaaactcctaggttctaaaggacgcccctgcattgcttgcctttcctttgctagacaccagagagaggctaaaaagnnnnnn

SEQ ID NO: 21271 - DNA, 1059 bp, Homo sapiens
  misc_feature 1, 2, 3, 4, 5, 6, 1054, 1055, 1056, 1057, 1058, 1059: n = A,T,C or G
nnnnnnacgcgtccgccttcccgtatctttcatcaatcattgtacagtttgtttacacacgtgcaatttgtttgtgcttctaatatttataaaggaatcccacgcgtcagcccacgcgtccgaagaagcgactagggacccaagtttaaaaattcctccccccacccaatgcgagacgtggccagatcccatccaacacacggtttaattttcatggggctctgggatcaaaagaacagaaacagcaacaacaaaagcccagccgctgtctgattttaagctggcaaagtgggaaaaataaagtgttgagtaaacagaccaagttggaaacttttcagcattacctaagaagcaaaggctcaattttggctgcttcattcttatctcttctgccacagttctaacgtgcctgatctactgagaccaaggatgaccaatgactcagaagggaaaatgggatttaaacacccaaagatcatggggaatttcagaggtcatgccctccctggaaccttcttttttattattggtctttggtggtgtacaaagagtattctgaagtatatctgcaaaaagcaaaagcgaacctgctatcttggttccaaaacattattctatcgattggaaattttggagggaattacaatagttggcatggctttaactggcatggctggggagcagtttattcctggagggccccatctgatgttatatgactataaacaaggtcactggaatcaactcctggggctgggcatcatttcaccatgtattcttcttgggctgtgggtgtggcgatatcttatgtttcaccattaagttcacttcctgtgtcttacccagctatgtgtcaatgcctattggggaggccttatcttctagacacactctggccggaacgcgggccctctgggccccgggttggcgctctcaaggccgggcgccacagctgtggacagctctgcctcgcgccccccccggcggccccggtggcgcccccggcggggggcgacatccccggctggccccggctctctccccacaagatccnnnnnn

SEQ ID NO: 21272 - DNA, 1911 bp, Homo sapiens
  misc_feature 1911: n = A,T,C or G
cgtccgcagcaactaagctgtacaaggtttttttttttttttttttcttcctttttttctttttttttttctttttcccctttctttttctttctttctttctttttctttctttctttctctttctctctctcttttttctttttctttaaggtggggaaagagacaaccaagagacaggaagctgatctgcaaggattcggagttgtgctaaaaggactttgattttttttccccctttacgaacgctggcaattgacatcactacagacagcctggttagagaacaaactgcctcatcccaagtggaccccggcagctgggggaagccaggcaagatctgggaaggctgtgtgtgggtgttttttctacagatctcactcctcgcccttttttttttttcctttggtgtgtgttttttgttttgttttgttttttaaaaaaattcttgctgtgttggaactagcgagtggtggagtctctgaagcctcatcagtcaccgggactgtcaggaatagtggtttaagaggaagctcggcctggggcactataccctgtcatccagttccctgcctcggagataaagattccagctacatgggcaaacgcctggatcagccacaaatgtacccccagtacacttactactatcctcattatctccaaaccaagcagtcctatgcaccagctccccaccccatggctcctcccagccccagcacaaacagcagcagcaacaacagcagcaacaacagcagcggggaacagttgagtaaaaccaacctgtacattcgaggcctcccaccaggcaccactgaccaggacctaatcaagctgtgccaaccgtatggaaaaattgtatctacaaaggcaattcttgacaaaaacacaaatcagtgcaaaggttatggttttgtagattttgacagtcctgcagccgcacagaaagcggtagcatctctcaaggcaaatggcgtgcaggcacagatggctaagcaacaagagcaagacccaacaaacctatacatctcaaatctccccatttctatggatgagcaggagcttgagaatatgctgaaaccctttggacatgtcatttccacaagaatactaagagacgctaatggagtcagcagaggtgttggctttgccagaatggagtctactgaaaaatgtgaagtggtaattcaacattttaatggaaaatatctgaaaacaccaccaggcatcccagcccccagtgagcctttgctgtgcaaattcgctgatggaggacaaaagaagcgacagaatcaaagcaaatatacccagaatgggaggccttggcccagggaaggagaggctggcatggctttgacctatgaccccacagctgccatacagaatggattttattcttcaccgtacagtattgcaaccaaccgcatgattccacagacatctatcacgccattcattgctgcttcccctgtctccacataccaggtccagagtacttcatggatgcctcatccgccatacgttatgcaaccaacaggtgctgtgattacaccaaccatggaccatcccatgtcaatgcagccagccaacatgatgggcccactgacacagcagatgaatcacctttcgttgggcacaacaggaacgtatatgactgctgctgctcctatgcaagggacctacattcctcagtacacgcctgtgcctccgacagctgtttctattgaaggtgttgttgctgatacctctccccagacagtggcaccttcatcccaggacaccagtggtcagcagcaacagatagcagtggacacatccaacgaacatgcacctgcatattcttaccaacagtctaagtaagtctgggctgtgctaagctcttttcctcaagatcagccatcttgacatcan

SEQ ID NO: 21273 - DNA, 543 bp, Homo sapiens
  misc_feature 535, 536, 537, 538, 539, 540, 541, 542, 543: n = A,T,C or G
ccacgcgtccgggaatattgaattatagagttggacaggatagtcttatttattgttgcatagcacattgcaccagaatttaaggacttaagacaacaaacattatcttacagtttctgtgggttagaaatctgggtgcagcttagctgggtgcctgtggctcataaaagaggtggtagtcaagctgtcagttggggttgcagtcacatctggaagctctactggtggaagatctgtttctgaactcattcatgtggctcttgcagggttcagtttcctggggctcttggactgaagaaatcaattgttgctggctgttggccagaggcttttctcagttctttgccatatgggcctctccaaagggcaccacagtttggcatctgcctccctctgagcaaatgagtgagagaaggtgacacctaagaatttttataacctaatcttggaagtggtatctcattatttctgctatattctatttgttagaggctgcctaccacaaggactttagcttactttttaaagaatgaannnnnnnnn

SEQ ID NO: 21274 - DNA, 6077 bp, Homo sapiens
tttttttttttttttgcatttgaaaagctaagaacagcctttattggagaaagtaggataaagacatttccatatatgttcatgggaatttaccattcaaatttaccattcaaactgggggagtagagatcagtcacttttgccatcttatctgtttaaaactctttcaagaaaagaaaagaaaggaggagtctctttcaagaaaagaaaaaaaggaatactgtgtaagaaccacagaaaaaaagctaagtaggagcagatgtgggtgctctttccttaacagtcagcatagaatgtagagactgacattttctttaagaacagattattataactaagcaagaaaaagtatgtgtacataagttggtcacagtgacacttgtagaaaatataagtagctgtaaatgggaaaatgtcaaaaatgttccatccaaggaatgttagaaggtcccttctttgccttgctcatctgaaaagttccaattcaccctacaagccttagccccaaggctgggaagccactggcctctactaccaagaagcatccagtgtctcttttgtgcagcctggcacccctcctgtggcttcatgataacatctatcactctttagggatcatttacacttctgctgtctcttctccctaagacggagaaaattgtcacttgttcttttttgtattcttggcgtccagcaaagggaacagacatctatccatttaattaagctctgctaagatgctttgagttaaattgtgtatgtttgtgtgctggaaaaatatgtaaaaatcagtgagacacttctacaaaggcagagtagacatccttctgctaaatgcatataaaaatcctggatattatattaaaacacagcaagactctgaatagtagacagaaaataggctaggaacattggggcccaagtaacaacactgtgatgagttccctacattttcttttcagctcatatatttccaacttggagctgaaaaagtcagcaacctggaaatgtcaataaatgcaggggaaaaaaaagccctaagagagtcctgctctctcctgccaaaggaccagaaaagggtagccaagcaagggtaaaaaaggctgtactccaaccaaacaccatggaaaaacaccatggccccacccataccagcaaatgctgagtggggagtccagacttacactctcaccaagctgtaaagaggtgccccaactccctgacttttgtattcttggtatccagcaaagggaacaggcatctatccatttaattaagctctgctaagatgctttgagttaaattgtgtatgtttgtgtgctggaagaatacaactccagagtggtgtcggagaaggctgtgtaggctactgggaatttcattcccacctggtgtaatgaagctcttcctggtcactctgtcccatagcattagtggagattcccagggtgcagcaaaaggtgccgctgcacattccagccagggaagaatcaataaagacctaatgggaaactgaattctcaccttgcccagtagtaatgaggggaccctgttactcagtataaagggaggctgactggggaacctggactcctagccacacctggtaataatgaagcagtgctcccaattcccctgctgtggtggtatctgagaaagttggctaaagcagaaggtttaaataagacccatagtctcataacataatacctaaaaatatccaggtttcaataaaaaatcattccacacaccaagaaacaggaaaatgtttccgaatggaaaaaagaccatcagtagatgcaaacaatgaggtgacagatgttggaattatctgataaggattttacagcagccatcataaaaattcttcaacaagcaagtataaatgcacttgaaacaaatgaaaacgtagaaagtctcagcaaagagacagaaattctcagcaaatagaagatataaagaaaaactgaatggaaattttagaaataaaacatacaataactaaaatataaaaatcaggaataaatgggctcaacagcagaacagattagacagaataaagaatcagtgagcttcgagacagaagaataaaattacctaatctgaacaacagagagaagcaggctgaaaaaaatatcatatacagagcttcaggaaactgcaggactgaaaaaaaaaaaaaaaaaagcaacttcctaaattattaaataattttgagttgtaaattgtattttccaaaagtctttgcagctggcccttaggccgttgaagaatggtcacacgaaggacatataaaaatctttggtgtactgatattatacctcaattggaccgatgtagcctaaaagttaatgcagtctttgaaggttcacaggtagggacaaaaagctacagtcaaggtagtaaagaaatcaagttcattgtgtcatttatcatgtccaccaagaagatgtgaggtgattggtggcatgttctcttcaatctgtggaacttcaaaatgaaccactcaacagagaatggctctgctgctggtagggtaagtcttgtgcacagaaagaaacattctaagcatctcaataaaaaatggcaccttgcatgcactgactggtgctctgaagttttgccaagataaggtacaattttaaccgtctatagggccacatttgaagccattttaaacctatgttaattaccagtgagcaggataggaatatttttcttttttaaatacaaatacaaagtaagattttataataggtaagtatattcaaagatcgtccctcaaagttgaactcatttgaaccattaaatctaaagaaatccaatcaaaaaattaaaaagaaaacacataagattaataatttggattttgaggggatatacagcaaagattgaaacaaggtctcagaagtattttggcttctgttaattttttttttgattacaatgaaaagaaatgaaactccaagttaaaagatatccagaaccactttaaaattctcataaagatagtcacataacatgggctaccccaaccctactataagtctactgtttgcccaatgccatcaaggtttattaccaatagtaagaaagattcaaatatctggtatccagacaatgttcacagctacttctcctttaagagaagcagaaaggcagttttaggtgtggtctgtctttattcccccgaacttgatcaatgtatacaatgcttacacattcaaatatgtgcaagattcaacaggaacactctccactgctgtgctgagtacgcaagtttccctgagatgtccgcatcaccgagggctccgttctaactctggtcgacagtttctgaacaatgcaatagtgtagctagaggactatataaaatataaggttctctcaaaaagattcatggtgtttggggataaaaaacatatcagtcttcttggctaaaggttggcaaatgtgttttcaactttaaaatgtctgaaactggctcttttctttgttgatagaagctgagtccagtgatgtgctcaacatctgtgatccgtgctctgtgtaacattaacaattcttcaacccatgaggagtcatgcttcccatgcacacagctctcgctgttatcagtcctgtgaggcaaaatgaaagctaaggtgtctaggttttcacagtgcaaaggcgtctgagatgtatctttacagcttgttagcacaataaagaagtgagttggaatcaaaatttcttggttacggatgactcttcttttttgcctcagattctctaaggaatcacaacgtccatcataatcaaagtcaaacacaggaccactgacgacattgacaccatttctttcttcagcatactttcgcagtagggtgtcatgaaagtagcgccatataacttgaaaactctggtacattggcactatatttgtagtaagcaaagcttcagaatatattccacttgaatttttatttagttgtggtggggagaggaacccgtaactcactttggtgttatttttataaaatgaacatttatggacaggactaagaggaattctaaagtcctggtacagacagttggagaagtcttccgtagagaaactgtcatttctgtccacggtataggatgtccaaaggggcattaagatgtcttggctgtatccactcataaactggtgctgggaaagaagacagatggtgttttccttctggagaactctaggtcttccatagggtaaagtttcatgcttaataatcttctcttctgccacagtcagattgaactgtgtttgaaaatcctcaatcggcaaaatcgaagggttacatgagcagccaaggttatctctggggtttcttgtgaaggggcactgtaccagggggtgcacttctttgggatgctttggcgtataaacaggattctttagaaggtggttaagacttccatgagttccgttattaggagccggtgtcaaattcagtaaatcacacattaagttatagacttcaatgttttcaaaggtgtcagcctcaatgccatgcttgaatccaggtccatagccaacaaagagggcttgcatatttgaaaatacattgtcagagccatgaaatccacttccacaatatttcctttctgagggattcaatgcaagttgccactgagggtccaaatagaatgtcaagggctcaattctatcactcttagcaaagtgcaaacgcttaggtaagaaatgtttcaggtaaggtttgaagtgctggtttggttcccggcaagaaagatttcgggcaatgccttcatagttaaatgaatagtatttatctgggacatcagagggtctcaatcgagctgcaggtccatagataactttaatatttttaacatcccccaaatatttattcagatatatgtatttcttacaactgccttgttccatgccatgatctgaaataaggatgaggttcaggcatctgtgcaagttcagctctttcagaccatccatcagcataccaaccataccatcaaccctctgcaaggctttgatgacttcactgctgactggtccatatgaatgacctgaagaatctggttcttctaaatacagagtgtaaaagtgtggtctttcatctttaggaagctgtagccactgaagaacagctaaaatcctttcttcaaatggtactgaaccattatacattttatagatgtctgggaaaattccgttaatttccacatctgatcctggccagaaaaatgtgccagacttgaggccttgatacttagctgtgacccaaattggttctcctttgtaccactcaggattaaatttctctttacttttaagtgaaaaggaagcattcattttgggatcatacattttattgtcgattatgccatgagattctggatacaatccggtgacaatgctgtagtgattggggaaagtttttgttggatataccggtctcatgtttttagtatatgttccacatttttttagtttgctaataacaggaagaagtccaccccaagtgtgtaaatattctgccctgaatccatccaaagaaaataagagggtaggaggcgtttcaaaccctgctggggcactgtggctcattaatgctctcacatgggttcttctacccaacttttctcaccttgacacacagaactgtagttgatgcaggcagtcgcccctggtccttgcagtcatctgaacagggcacagaggcttctggtcaaccttttctcaccacacctgaatttgttgcaagtccatatatgttctggttctaatgcacgtctcctggtaatctaaacagcagtttccaagctcaacacaggcagcatcacagcgacagttcccaaatgttctctcgaaacagcgacctttgcaacttttaacttctttggcacagcttggtttcaacccaaatatacaaccaagtattgttgttaacacacatactgacaataccagcgagagtactttataggtgttggggtccttggcagtgcgggcgcgcgccgccttctccagcggctcctcccccacgtccataggggccagcaaggacgcggccgca

SEQ ID NO: 21275 - DNA, 1405 bp, Homo sapiens
  misc_feature 1, 2, 3, 4, 16, 20, 24, 26, 27, 35, 1357, 1400, 1401, 1402,1403, 1404, 1405: n = A,T,C or G
nnnncctcgatccccngttngaangnncatcgaanttctattgtctcgggacgcgcgccattgtgttggtacccgggaattcggccattatggccgggggcccaaagaaactataattttgtaccaacagacctctgctggcatctgcgattgcatttttcctgttttaacaacggctgtgctagacgaagtggtgaagcccaaagacttatttttgagctcgctgtaagactgagaaatcacgtagtccttcctgaaaccactaagaggaaaaatgatctaaagtgggcaactaggctgggcacagtggctgacacctgtgatcccagcactttgggaggcggagtctgtgacactgcatacagatgtaggtgatattaaaattgaagtcttctgtgagaggacaccccatgtgagaatttcttggctctttgtgccagtaattactacaatggctgtatatttcataggaatatcaagggtttcatggttcaaacaggagatccaacaggaactggaagaggaggcaacagtatttggggcaagaagtttgaggatgaatacagtgaatatcttaagataaagaaactagcaagagtccattgtatgtgagaagagattgtgggcattttggttttgttgcctgcctgatcatttcattccagcacactattccttaatataaatcacaatgttagaggtgttgaatctatggttaataatggcccgaacaccaatggatctcaggtcttcatcacctatggcaaacagccacatttggacatgaaatacaccgtatttggaaaggtaatagatggtctggaaactctagatgagttggagaagttgccagtaaatgagaagacataccgacctcttaatgatgtacaatcccacctggcattgcatcgtggggaggaacttcggtagttatgtgacacatgaaaccaaacacttcatctacttctacctgggccaagtggccattcttctgttcaaatctggttaaaagcatggactgtgccacacacccagtgatccatccaaaaacaaggactgcagcctaaattccaaataccagagactgaaattttcagccttgctaagggaacatctcgatgtttgaacctttgttgtgttttgtacctctagactgagacactcacaaagggaccccagttcagcaagggtcagaggaaggtctggagggagaagagagtaaagggccctgggtgggcaggaggctgaggagggagcctggggagagcaccagggcggggcatcaggccagtgcctggaaggtgtggccaaaggggtctctagctgctgctctgctgctcctgctcatggatgagtntggcgatggggccggtgatgccgcctatcaaggtccagtaccnnnnnn

SEQ ID NO: 21276 - DNA, 1675 bp, Homo sapiens
  misc_feature 1, 2, 3: n = A,T,C or G
nnnagagcgtgtatggttgtggtgggttgatcgtttgctggaggtttgtgtagtttttgatatatgacttcggctccgtgtttgtggtgtcgttctgcgtggttgtttgttcatttggacgtgggttgctctttgcttttacttctgacctttttgtttctttcctggtaagggtaatgctttgtagcctttccaaccaccgtttttgttgtataagataaggatatgttaatatattctggatgcgtagtttaggcactatgagtattcctagttgtgctcagattgctgatcatcgcaaatcacacattagcactgcctccgaaccttatcatgtaactctatattcctcaactcactgaagaatttagatggatcactattttaaatgtcatgtatttggcaaaattaaaattactcagagacaggccctaggtattatgaaaaccttaattatcaggatagcaaatggagacaggttttgcaatgtctctatgtaccttctctatgaagtgcaaagtggtgaacttgtgtgactcttgttctcttcatgcagtaagaactatggcagagtatcactatacccaacattcaatatcatttatacctacttttagcctccaacagatcaaggaaatgtcaagtcataaaggtgaagagaaaaatttgattttttaaattcctccatctaaagaaccaaataaataaactacaatgaacatccaccctcattagttacaaagtaacgttggaaaaaagccaagagcttcacacaactcataggcattatttagatacaaactttaaatctgctgtaataaaataaatgctaaatacatactgtgaatatatataaatattacacacacatacacacacacacactctctcactcttccctatacatgccatcaaatgggaactattagatgtaatgaggcaaattaaattaaaaacattgtcttaatgagaaaatttttaaaggttatatctacaaattaaatttctactttaaataacatttgaagtaaaagcaaaaatatacttgctttcttctaaaagaaggctcttttcttgtatttcaattacaacctttaaatttttagagctggactaacagtaagtcacacaagcatacaagtaatacagacctacatttgtgacacattgtttaaaaaaagtaatgtttcattttaagtgcagtaattaagtttataatccttaccaagtgatttttacaaaatgtttattctctgaaatccaacgcattcaaaggatgttaacacttaaaacgtttatcatttccaccaactgcattatcttagtaaaccaaaataagcacttttatcatagatgtagtcaatgattaatatgtttttttaaaggacctaaacttcccccaaatttcagcacaggtagttttattgttatgtttcacctagtaggcaatttttaaaaatagtgtgtagaaatgaatagtttcaaactgagtaaatatagtagtataccatgtcataaaacaatcaaatcaaaagcaactgccaagctaataataagtcaaagaaatagtaattctggcttgtactcagccgctaaatccaaggttgaaaagaaaaagaaggagaaggttctcgcaactgttacaaaaccagttggtggtgacaagaacggcggt

SEQ ID NO: 21277 - DNA, 1926 bp, Homo sapiens
  misc_feature 1926: n = A,T,C or G
gcgtggcctcccgctgccgctgccgctccaggagacagcattacagagcatcagttaggtgcagagactgggcagtgcacccgtgtgcaaagacaggagacacgaatcttccctgaaggagtgacagtctagggaggaaggcagactgcaggttcccatgcaggaatgaaagacatggaagggaagaggggggccagctccctgagtcctgtgtccaccagctgctgctaaatacctctgagaaactctgcttctatctaaggggacctacttctctcgggaatctcaatacttggaacaagaacctcctagacggaccctttggcataatgaattggaccaactgtaggttccaggactagagagccagcaatgcctccatgaacaatctcacccaattactctgctcaggaaacgaggtaactgatggacagccgaggcagccccttaggcggcttaggcctcccctgtggagcatccctgaggcggactccggccagcccgagtgacgcgatccaaagagcactcccgggtaggaaattgccccggtggaatgcctcaccagagcagcgtgtagcagttccctgtggaggattaacacagtggctgaacaccgggaagaaactggcacttggagtccggacatctgaaacttgggatcatagacggtatttcctatgtaaacgaacagtcgggcgagtcctcagtgggagtttcccagatggtgaagaggaagaagaagaaagcccaagcacaagaaaatagagatgagactcttgccaaacagaccttgaaagacaaaactggcactgattcaaattcaacagaatcctctgaaacttccacagcagttaatgaactgaagaggcttgatcgtagttctggataggtggctccactcctgaccactgtcaacatccccttatatgttccaaagttgaaaattccactgttaccaattctgaatgttctgtgaacactttagatgagtattaagctgttttctccctttatgacacacatagttgatactgtctggtaaaaggaggctcttgagccattcctatttaattaaaacagaactagttgtagtgtaggaaaaagccactgataaaacaggttatattcttaagcctctctttattgagaacccctagaattgcaggataaacttgatcgaagtaaaatccaaatcttacactaagttctgtgagatttaagagcaataatcaacagttctaagcctaataaagagagctcttaatcagctcagtggtggttaaaaccagctatcttttaaagaagagaaaaaacaaaacacagcaatgccctgtctcttcagaaaattgttttaaaaagttagccaggcatagttagtggcccacgcctgtagtccgagctgtttgggaggttgaggtgggaagattggttgagcccaagattttgaggctgcagtaagccataattgtaccactgcactccagcctgagcgacagagaacaagaccctgtctcaaaaataaagtgggggaaggggtgcaaaattacactgtgagaagccaagaagtttcaaagttctatttatttttctaagtcatttttaatcattatttgttgtttcagtgtttgaatttaacattatgtttttaaagatggagtggattctaaagatgagttgggttcaagatatccaacatatcttttatattgggcttatgtcacttaggtgaagttgagctcctttttctttttaatctccatggaacaatttgtataatttcttgatttaaattgctaaactgagctcttcattcaaaatactaaacaataatttctctttggggggaaaattaaggaaggctttctatacatagaaataaagatgcctaggccgggtgcagtggctcatgcctgtaatcccaatacn

SEQ ID NO: 21278 - DNA, 300 bp, Homo sapiens
  misc_feature 298, 299, 300: n = A,T,C or G
accagggcaagtcagacatcatgtcagcacccttttctcttgtctttcttgcacatattcagagacaaatagtttggatatgggcactttagcaagctaaacctggaattctgccacctgtaatacaggccaagcaatgaaatctgataggtggagtcaaaggggtccacttttggaggttcctgtgtcacttctccccctcccagatgtctcctcatcctgagtgtcatcaccaagttcttgggcctgtacttaacgcccttccttcaaagatctgctgttctaggccgggcacagnnn

SEQ ID NO: 21279 - DNA, 1265 bp, Homo sapiens
  misc_feature 1264, 1265: n = A,T,C or G
gcggaattctcgagatctagggcaaaagttaactgatgcatacctaatgtggttgtagttgatgttgcaaatacaaacagcattcttgaactataatcaattggacgagacaggaggagatactgcactcttcgtagggcttcatcttcttgaagttcaaataattctgatggtttttcaccaggttttgttgaagggcatagccatttttccaacaacatgtcccagactttttccaaattaatttcattgacttcggctatttctttagctgctgcatgaatatcaggataatctgtgccagatctcgagaattccttgagtgatgctaggcggctcgtgaagtctgacaataagatgtgctggctttccgatcactcttaaatattcctcaagtgttttgtcagatactttgcatgggctatgacctgcagctttgggagactggtgtgtattgaatgcttcttttagcatatttcaggttggactagcgatgcagcttcttcagactcttcatatgaaacgctgctccacaacacaacatgccggccaaggcacaggtgagttgcaagcatgcgactctgcaaagcggcggcatcccaaactcctggccaaagcccttgagatggttcctttactgacgagcacaaaagatttggtcatcagtcttagtggaatactacataagttggatccttatgactatgaaatgattgaagttgtcttgaaagttatagaacgagctgatgaaaagataaccaattttaatatttatcaggcattgagtattctgaaacatttgaagtcatacagaagaatttctcctcccgtggatctagaatatcagtatatgttggaacatgtcataactttgccatcagctgcccaaactagactgccttttcacctgatattctttggcacagcacagaacttctggaaaattctctctacagaactcagtgaagaatctttcccaacattgctcttaatttcgaaattaatgaagttctctctggacactctgtacgtgtctacagcaaaacacgttttcgtaacaaggaaataactaagatcacgcagaccatcgatcctgcttactctctatagtaacccaagtgggctgtactttgcatcagctgcagattctgaggtcttaattgttattcttataagcatctagaagaacgttaattccgatgcatgtcatctataggcaccttgctacttatgatcgtcctatccaatatgctgagtcacgacnn

SEQ ID NO: 21280 - DNA, 548 bp, Homo sapiens
  misc_feature 530, 531, 532, 533, 534, 535, 536, 537, 538, 539, 540, 541,542, 543, 544, 545, 546, 547, 548: n = A,T,C or G
acatgacttagatctcaatatagttgtttaaaacaaaaaaatccatgtgtatggagatggggagtggctggaaaaagcttaacctcccaattaggcaaaagacaaacaggatagggagggggactaggggcttgtgagtggcaatagctgcagcagcagccctggcaggacagcctgtgggttacagaccgccctcctgtcaatgaagtcaagtcctctgcttcctgaaaaccgcctcttttttctaacaatgttctttcccccaaactaggaagacaggctgatggtaaacacaaagttctctgaaccaaagccttatatgtatgtttctgaggaggttctttataacctagttgcaagcaatctgaacacagcccagcgaatttccagcttttgaaactcagatttccttttgcgacccaggttctgctgagaaagttatctttggctcctctctctctcacaccccacatcccatctgttcggaagtcctgttggcatttcgatctatcaaaataaaagttgcacgnnnnnnnnnnnnnnnnnnn

SEQ ID NO: 21281 - DNA, 3278 bp, Homo sapiens
  misc_feature 1, 2, 3, 4, 3275, 3276, 3277, 3278: n = A,T,C or G
nnnnccgcggcgggtgtccggtgtccggtgtccggtgtctggagccgctggctaggttcagtgaacagcattttggacaggacatttggtgccaggtctgagtagccagtttgctgaattattgtcccagtcagccaggattgtgagctgtttgggaagtttcgtggaaacgcccaagtgccagcacaggtggagggacacctggaggccagtttcaggaacttttgccacaagtataaaagacttcagaagtgcaaagatgctgaaacagatactgtcggagatgtacatagatcctgatctactggcagagctcagcgaagaacagaaacagatcctgttcttcaagatgagagaggaacagatccgacgatggaaagaaagagaagcagctatggaaagaaaggagtccctgccagtgaaacccagaccaaagaaagagaatggcaaatcggttcattggaaacttggagctgataaggaagtctgggtatgggtgatgggcgaacaccatctagataaaccctatgatgtgctctgtaatgaaattattgctgagagggcccggctgaaagcagaacaggaggcagaagagcccagaaaaactcactctgaagaattcaccaatagcttgaaaacaaaatcacagtaccatgatctgcaggctccggataaccagcagactaaagacatctggaagaaagtggcagaaaaggaggaactggagcaaggatcgaggccagcaccaaccctggaagaagagaaaatccgatcactctccagttcttcaagaaatattcaacaaatgttggcagattcaatcaatcgtatgaaggcatatgcatttcaccagaagaaagaatctatgaagaaaaaacaagatgaagaaataaatcaaatagaagaagagagaacgaagcagatttgtaagagctggaaagaagactcggaatggcaggcatctctgcgaaaatccaaagcagctgatgagaagagacgctccttggctaaacaagcacgagaagactacaagaggttatccctcggggcccagaaaggaagaggcggtgagaggctgcaaagccccttgcgtgttccgcagaaaccagaaagacctccccttccacccgagcctcagttcctaaactcaggggcatatcctcaaaaacctcttagaaatcagggagtggtgaggacactgtccagctctgcccaagaggacatcatccggtggtttaaagaggagcagctaccacttcgagcgggctaccagaaaacctcagacaccatagccccctggttccatggaattctcacactcaagaaagcaaatgaacttcttctgagcacaggcatgcccggcagttttctcatccgagtcagtgaaaggatcaaaggctatgccctgtcctatctgtcggaggacggctgtaaacatttcctcatcgatgcctctgcagacgcctacagcttcctgggcgtggaccagctacagcatgccaccttggcggatttggtggaatatcacaaggaggaacccatcacttccctggggaaggagctccttctctatccccgtggtcagcaggaccagctgcctgactacctggagctgtttgagtgacagcctccatcagggtcatcctacagcctccaagcgggctttcccctggacaaatgccactgcaacatttatgtgtgaagccaaaatcaccctgcagcagagccaatactgatcaactgaaagtaaagtatccatggagtcctcattgacacctcttttctgcacaaatactggaattcaatgtcaagagaaaatgacctctgctcaaaagggagaagagtctcaatttcagcaagtacctgtcatgaagggtatgaccttaatgatgtacataaaataaaacaaatgaagaaatggaaaacttttagaaattaaggtgtacttgaaaacgaatatctatcatatgacccctgcactccctctgtatcatctcaggaggtttcaggggcctgttgacatgaagtttcgaagtttcatgttggctttggaatggtagcaaaagcctttcctggctgagatgatgcttaaaacacacctcacttattgtacatgttggaaccaggacatgagagacatagaaaaacagaagtcatgaatgtaaattgaatgagaggcttaacatgcatgaaaatacagatggacctgcaggaaagtgagcaaacatcgctgagtttgttttcttgttcgggagaatggggccggggctggcctggcctcccctggatatactctatagtgcaccaaaaggataaagcatctgtacatgtatttttttattttttatcagaagtgcttagacaagaacagaataagcaggctgtttggatgctacttgtggttgaattgtgttccccaaaatatatggtgaagtcttaacccccatccccgtgaatgggaccttgtttggaaatagggtctttgcagatatagtcaagatgaggtcacattggattagggtgggccccaaatccaatgactggcatccttaggagaagagagagttttggtaatagacacaaatgcagtgggaagaagaccaggggacaagaggcaagttggagtgatgcagccggaagggaagggacaccaaggatctccggccaccagcagaagccagcagagaggcatgggacaggttccccacaagccttagaaggaagcatggccctgacttcagaattccagactccagaactggaagaataaatgtctgttgttttaagctgcttagttcatgctgagttcatgctgacttgttactatagccccagaaagctaatacagtcgtttatgtaattacataacctgacacacaagatcgacccattcactgctgcccagtccaccattttcataatgaagtagaaatgggaggtaagaaaaacattccagccagttctgtttagccctgggacacatatttgtcccgtcaggaatcttatgccctcctggaacccccgcccacctcagtccagtcccagtcaggcgaacggcctctggacagggactgaggtggctctgagccactggagatcatttttcttggaggatggagattggctagtacctctggcctaactgtgtaggtcaatactcttttacattgccttctaataaaagcagaatgatacagagtaaaaaaaataattatgaatattagaaacaaaaatttcctaactttggaatattatagggaagaagaaaaaaatannnn

SEQ ID NO: 21282 - DNA, 1631 bp, Homo sapiens
  misc_feature 1, 1605, 1606, 1607, 1608, 1609, 1610, 1611, 1612, 1613,1614, 1615, 1616, 1617, 1618, 1619, 1620, 1621, 1622, 1623,1624, 1625, 1626, 1627, 1628, 1629, 1630, 1631: n = A,T,C or G
ncatctctgtcaattgaaagatgtcaatctctttcatttttcctaatcactaataacatctactaaaaacaaaatgtctgtgtaaataatttatttgaataaaattaaagttgttgagtgagctcggcttttgaggagtgggaaaggaggggtgcatagattagtggaagatgagaagctagtggggctcaagtccagcaggagcaggagtttggagccgggacttcctagcctctcagggtttttttttaacttccttacctgaaatgatttgtgctatataacttgtcctggctaaactttcttaatctcaactgtttcatttaatcaataacaactactgcgccaccttcataatatcaattttcagcatttcatttactgaatatcatttcctttccttccagactattctactgtgtcaaattcaatattcctttgactcaataggatctccaatccagtgaccccattatttgtttgtttattaggacaagaaaaacaaactttcccagaaactccccagtagactgctcctcatatctcgttggctagaactgagttgcgtgcccattcctaaaacaaaactggcaagaaagatagttaccaagattggttcagaccaaatcaggattttttcctgaggagaggataaagtgagcttcctgggaggcaaatatttacacattccaaagattccaaagaaaaaaagagaataaatactgggtcgttaactaatagtaagtggtacggtattacaggtaaaatttatccttttagccctagcaacaagtgacaccttctgaagccattattcatttgtcaggaatagggcaagtatcaggaaaagaaacaccgaaataaactctgtttccatttattgccttccagcactggttctaccaaatatttgttggatgactttaggtaaagcatctagcccctctgtcttgattgccacacccacaatatgagataaatattattctgcatacttcctgggagagctgggaagataaaatcagatcattataccacataaagcaaagcaataacacttccatattttagcttcccacactgcctatctgtcctattttcatttattcatttatacttttcaacaaacagttgctagtagtttgcttaatgtaagatatgggatgaatattttcatgatggcccctgcatctaagttatcatttagcagtacctgccttatctcttgtacagaatcagattagacagcataggaagaatgaaaaggtgaggtgggataataaggaatgttgtttgtggaaacataatggttgcttcaatttgagtgtaaactgtcctttttactgaagcaattgcaaccaagtgtgtgagttcacaggtgcctacattgcttttttggcttaggtattgtttgggttttaatacagacaaatcaactcaatcaaagaaaccaactcaaagaaagatgggtctacatacaacaaaactgaacaaaatctgcaagaagagtgattcatacatgggctattgaggcaacatgagatggacattaatcgactaagtgaaaaacagatttcttgaagaattaataaagaacttttggannnnnnnnnnnnnnnnnnnnnnnnnnn

SEQ ID NO: 21283 - DNA, 676 bp, Homo sapiens
acacccagtggctcatatttaacttcccccagcttcccaattcaaactggggggaaaaaaactaaatcattgggagttacttgccaacttggaagttgatatttctttactttttccccgcgtactctccttctagtgaaggattgtcacagagtttcactggatgaaactatgacccagtattcttactgtattttacatatgcctgtaaattatttgcaaaaaagaagaagaagaggaagaaagaaaagaaagaaaagaaagaaagaaagaaagaaagaaagaaagaaagaaagaaagaaagaaaaagaaagaaagaataaaaaaaaatgataacatggcaaccaccaaactcccttaaaaacaaacattggtgacatggccaattaagtatcagtgagcctcctatctgggacttatctgttcctattgtttcaaaaccatttcatgtacactactgaggtaagtttataacttgaaatgtgaactttttttttacatttatatagtttgttcttaacactaaaaaaaaagttttagagttctgttttcaaacattgctagtggtttagttaactttagctgctttatatttgaaaagcttttatttagatcttgctccatttacagtacattcttaggatgtatgtagtaaataaagctttctttaaagcaa

SEQ ID NO: 21284 - DNA, 5283 bp, Homo sapiens
  misc_feature 1, 2, 3, 4, 5281, 5282, 5283: n = A,T,C or G
nnnngtgggcagtgtggtttatgcaggccatgaaaccaaagcaatgctgaacaacagtgggccacggtataagcgcagcaaattagaaagaagagcaaacacagatgtcctctggtgtgtcatgcttctggtcataatgtgcttaactggcgcaataggtcatggaatctggctgagcaggtatgaaaagatgcattttttcaatgttcccgagcctgatggacatatcatatcaccactgttggcaggattttatatgttttggaccatgatcattttgttacaggtcttgattcctatttctctctatgtttccatcgaaattgtgaagcttggacaaatatatttcattcaaagtgatgtggatttctacaatgaaaaaatggattctattgttcagtgccgagccctgaacatcgccgaggatctgggacagattcagtacctcttttccgataagacaggaaccctcactgagaataagatggtttttcgaagatgtagtgtggcaggatttgattactgccatgaagaaaatgccaggaggttggagtcctatcaggaagctgtctcggaagatgaagaatttatagacacagtcagtggttccctcagcaatatggcaaaaccgagagcccccagctgcaggacagttcataatgggcctttgggaaataagccctcaaatcatcttgctgggagctcttttactctaggaagtggagaaggagccagtgaagtgcctcattccagacaggctgctttcagtagccccattgaaacagacgtggtaccagacaccaggcttttagacaaatttagtcagattacacctcggctctttatgccactagatgagaccatccaaaatccaccaatggaaactttgtacattatcgactttttcattgcattggcaatttgcaacacagtagtggtttctgctcctaaccaaccccgacaaaagatcagacacccttcactgggggggttgcccattaagtctttggaagagattaaaagtcttttccagagatggtctgtccgaagatcaagttctccatcgcttaacagtgggaaagagccatcttctggagttccaaacgcctttgtgagcagactccctctctttagtcgaatgaaaccagcttcacctgtggaggaagaggtctcccaggtgtgtgagagcccccagtgctccagtagctcagcttgctgcacagaaacagagaaacaacacggtgatgcaggcctcctgaatggcaaggcagagtccctccctggacagccattggcctgcaacctgtgttatgaggccgagagcccagacgaagcggccttagtgtatgccgccagggcttaccaatgcactttacggtctcggacaccagagcaggtcatggtggactttgctgctttgggaccattaacatttcaactcctacacatcctgccctttgactcagtaagaaaaagaatgtctgttgtggtccgacaccctctttccaatcaagttgtggtgtatacgaaaggcgctgattctgtgatcatggagttactgtcggtggcttccccagatggagcaagtctggagaaacaacagatgatagtaagggagaaaacccagaagcacttggatgactatgccaaacaaggccttcgtactttatgtatagcaaagaaggtcatgagtgacactgaatatgcagagtggctgaggaatcattttttagctgaaaccagcattgacaacagggaagaattactacttgaatctgccatgaggttggagaacaaacttacattacttggtgctactggcattgaagaccgtctgcaggagggagtccctgaatctatagaagctcttcacaaagcgggcatcaagatctggatgctgacaggggacaagcaggagacagctgtcaacatagcttatgcatgcaaactactggagccagatgacaagctttttatcctcaatacccaaagtaaagatgcctgtgggatgctgatgagcacaattttgaaagaacttcagaagaaaactcaagccctgccagagcaagtgtcattaagtgaagatttacttcagcctcctgtcccccgggactcagggttacgagctggactcattatcactgggaagaccctggagtttgccctgcaagaaagtctgcaaaagcagttcctggaactgacatcttggtgtcaagctgtggtctgctgccgagccacaccgctgcagaaaagtgaagtggtgaaattggtccgcagccatctccaggtgatgacccttgctattggtgatggtgccaatgatgttagcatgatacaagtggcagacattgggataggggtctcaggtcaagaaggcatgcaggctgtgatggccagtgactttgccgtttctcagttcaaacatctcagcaagctccttcttgtccatggacactggtgttatacacggctttccaacatgattctctattttttctataagaatgtggcctatgtgaacctccttttctggtaccagttcttttgtggattttcaggaacatccatgactgattactgggttttgatcttcttcaacctcctcttcacatctgcccctcctgtcatttatggtgttttggagaaagatgtgtctgcagagaccctcatgcaactgcctgaactttacagaagtggtcagaaatcagaggcatacttaccccataccttctggatcaccttattggatgctttttatcaaagcctggtctgcttctttgtgccttattttacctaccagggctcagatactgacatctttgcatttggaaaccccctgaacacagccgctctgttcatcgttctcctccatctggtcattgaaagcaagagtttgacttggattcacttgctggtcatcattggtagcatcttgtcttattttttatttgccatagtttttggagccatgtgtgtaacttgcaacccaccatccaacccttactggattatgcaggagcacatgctggatccagtattctacttagtttgtatcctcacgacgtccattgctcttctgcccaggtttgtatacagagttcttcagggatccctgtttccatctccaattctgagagctaagcactttgacagactaactccagaggagaggactaaagctctcaagaagtggagaggggctggaaagatgaatcaagtgacatcaaagtatgctaaccaatcagctggcaagtcaggaagaagacccatgcctggcccttctgctgtatttgcaatgaagtcagcaacttcctgtgctattgagcaaggaaacttatctctgtgtgaaactgctttagatcaaggctactctgaaactaaggcctttgagatggctggaccctccaaaggtaaagaaagctagataccctccttggagttgcaagtattctttcaaggttggaagagggattttgaagaggtatctctccaagcaagaatgacttgtttttccataagggacatgagcattttactaggcttggaagagctgacatgatgagcattattgtatgtttgtatatacatttgtgatagagggctagagtttgacctagagagagtttaaggaagtgaaatatttaattcagaaccaaatgcttttgtaaaactttttggattttgtaaaagcattttcattctcttagaaattcaagtattttcaaggggagtcatttgagatatatttattttactaggagatcttatattctagggaaatgctttaaatggtcaggctccaatcggaatttttttaagaaaaaagtagtttttaatacattggttaggactcagaggaaatacggaaaaaacattgtagatggttaatttacagataaaatcccaagagccttttaaacaacaaggtacctaaaatagggtataattatactgcttaaaatacagttagtgcctattaatagctttttatttcctatgggaagatgcttttggtcttctggctgaagatgtaggcatacctctcactcatttcaatgttttcctgaggtggagccttcattggaaaggggaaagagggattctagggtttcatcagggaccaggaatgcattcctctgtcaggttccaatcaagagaagaccttttatgagatctgcctctgtatagatgttgtcagttaggaaactgaagccataggtcaggcagacatcagctcagcctgtggcccattgggtgatttcctgtattttaaaactgacagtagcctgatcaaagtgatacaatcaatttcaaaacaatcttccagagaccacttgaaggttcatagtttttacaataccctgagacttttcaggtgttggagcctctaaaatatgagatataaacagaaactaatacaagttgttctctggaggtttctatgaggttcttagaaaaatttggttttaaaatcatttgaggacaggaatgtctatagcaagtttactcctattgcgaatcatgtatgctggctttagttgtaacaaacgattttattctaagtaaggccaggtgctactataaaatcatatattcctgttgaagttcttttgaagtcctatctctatttattatatttgaaagttgtcagccaccagtcatccagaatttccttcctgaatctccatgctcatatgcaatgtctacatcaaggtcttcttaatgactattattctcagggtttagttttctaccttctgcctactattttggtctgacatttttgtagccttctgttattattggaaatagtctcttacataagctgatttcgagaactttcaaaatctcacatagctaatggaagttgctttctgctttcttatgactgtttttataaataaactgtttcataaataatgtatactggaaaattgtcatcactcttgtaaacatttgccaaatccaactgtaattagtaccagaacttagaaggaaagtcacaaagcatgccttttaccagaatattgctttgccttttcttatatggaaaatcactgatgtcatatcatttattatcctcacagcagctggcattcattccctgaaatcgtcgtctcctgataaacaataatttagagatatgttcacttgtaaataaaaaggttagaatctaaggacaaagaatgatccaaaaatactaaggaaaaagaacaattttcaattttcagaaatgaattatctgtacatatgaatagaggaaaatactgagtgctaatgnnn

SEQ ID NO: 21285 - DNA, 3259 bp, Homo sapiens
  misc_feature 1, 3257, 3258, 3259: n = A,T,C or G
ncgaaccggatccttgggcgggcagtcatcacacctggggatgtcatgcaggcaagatggcggaaggggaggacgtgggatggtggcggagctggctgcagcagagctaccaagcagtcaaagagaagtcctctgaagccttggagtttatgaagcgggacctgacggagtttacccaggtggtgcagcatgacacggcctgtaccatcgcagccacggccagcgtggtcaaggagaagctggctacggaaggctcctcaggagcaacagagaagatgaagaaagggttatctgacttcctaggggtgatctcagacacctttgccccttcgccagacaaaaccatcgactgcgatgtcatcaccctgatgggcacaccgtctggcacagctgagccctatgatggcaccaaggctcgcctctatagcctgcagtcggacccagcaacctactgtaatgaaccagatgggcccccggaattgtttgacgcctggctttcccagttctgcttggaggagaagaagggggagatctcagagctccttgtaggcagcccctccatccgggccctctacaccaagatggttccagcagctgtttcccattcagaattctggcatcggtatttctataaagtccatcagttagagcaggagcaggcccggagggacgccctgaagcagcgggcggaacagagcatctctgaagagcccggctgggaggaggaggaagaggagctcatgggcatttcacccatatctccaaaagaggcaaaggttcctgtggccaaaatttctacattccctgaaggagaacctggcccccagagcccctgtgaagagaatctggtgacttcagttgagcccccagcagaggtgactccatcagagagcagtgagagcatctccctcgtgacacagatcgccaacccggccactgcacctgaggcacgagtgctacccaaggacctgtcccaaaagctgctagaggcatccttggaggaacagggcctggctgtggatgtgggtgagactggaccctcaccccctattcactccaagcccctaacgcctgctggccacaccggcggcccagagcccaggcctccagccagagtagagactctgagggaggaggcgcccacagacttacgggtgtttgagctgaactcggatagtgggaagtctacaccctccaacaatggaaagaaaggctcaagcacggacatcagtgaggactgggagaaagactttgacttggacatgactgaagaggaggtgcagatggcactttccaaagtggatgcctccggggagctggaagatgtagagtgggaggactgggagtgagggagccagagggagcagctcccccacccatggcatctctcgcctccctcgctcgtctcagcccagccctggaagactgagaatgttcccccaaatctcctctgccaaccagagctctgggcacagattctggtggctccctgctggccctcttgggcctctgctcacacctgggaaggggctctctaaatcccggccagaaactctgacttgtgccaacaataggatgacccaagggagaggaaacctatcctcctcaccagaagagcctgtgtttttctgctgaacacccactgttcctgaggactcctgctgggaagtcccaagggatagttctagcccttctgcctgtgtagacagaagctaaaccaccagtctctctcggaggaagctgagacaacatactctgtccatacataagcaggcagggagggccatgccacctacccttggctaaacagggacagtgaacacattttggttcctatcccagtgggtaagaggcacttatctctgggaaatttgcctctcttgggactctccccctcccaggcattttccattcctggaaaggctcctttggggttcagaatccagagaccaaaccctgacccacctccttcctttcctccagcccacgctggtctgtccccatgccttcccagggcttcttcatgtcagatgcacccaagtccttagcccagctgtgccacctgcaggagttcgctcttgcgtttcttcccctccccaagaagggagggggctacttcaggcccttctgtgtgttgcctggcaggataccttgtccaaccagctacccacctcaactcccctgtagtttaggacacaaaacagctaccagcggtacagagcggtgatcaaagccgagtacttacaactctggtaagcctagcttctccgcctcagcccttctgcttctggaagggctatcctgggggtgaacttgaaactctcatcaggcttctgcaaaagctcttcttcctgaagacagacccagcctttgtgctctcaccctccactctggtaaagctgcacctctgggggaatgaggggctgcaggaatctctggagagcctggtgcttcacgatgctgctctggtgattcttgtacctaatctggtgtgctcaccaatgagtgaaagggatcgtgggtcagggacaccgagagagtgaggtcacttccacttcaaaccttcagtgagggggtgggatggagagaatgctgaatcttttttttgacgggatggggtttttctctttgtaattatttctttagtttaattaaccttttggttgtttgtgcaatattatatattttaaattataatgcatctccccagagtattttgtagctgggaaaagaaaaaaggaaaaaaagaaaaaaagattctaacagctgttagttttataattaaaaaagaaagaaaaaagaactttgtcctgaaccttttacagacttgccgttaacagcattaaagtgattcacccgaagctgaaaaaagaaaactgcagaaacaacaacaacaaggacaaaaaaacaacaaaccacatacgggagcgtagcacatcactctccgcgggggcccgaaagtcaaaacaccgtcgcaccggaagcgaagaacagacgtgccggaacatgtatgcacaaggaggcacccgccgcggcgagaggaacacaacaggcggccccgcgggcacacaaacaagtcggcgctacgcgaacgacgcagcgaggcagagcaggagaaagaccacatcatgtgaggagcgaaagagaaccaagacacaaaagaggaagcagaaaataaacataaaggcgagcgcggcgacaccgaggtgacggcaacagacacagaagcacaacaacagcggcgcgcgagcacgcannn

SEQ ID NO: 21286 - DNA, 488 bp, Homo sapiens
  misc_feature 1, 2, 3, 4, 163, 164, 165, 166, 167, 168, 169, 170, 171,172, 173, 174, 175, 176, 177, 178, 179, 180, 181, 182, 183,184, 185, 186, 187, 188, 189, 190, 191, 192, 488: n = A,T,C or G
nnnngacaaaattatgaattttggaattctatttcagaaatacagcagtataaatatagaataaatcttatgcaggcacaattattgtagaagtgtttatgatagaaaaatgcaataaagattccatgtgctcattaatagaaaatgggttatagtccccctnnnnnnnnnnnnnnnnnnnnnnnnnnnnnncaattagttgatttgttggtggcattccccttttgggaaagcaatgtaaggttatgtctgtgtatgtcattcacacttaggcaagcatacacaggcacatggctttaagaaccacactgatgccttgataattaaaaagaatacaagcattccatgtacctcggccggtcgaggtactttggcagctatggaactctgaaactccacttggagatgttggcagaccagccacgaacaactaaataccacagtgtcattctgcagaataaagaatccctgacggataaagtcatccn

SEQ ID NO: 21287 - DNA, 482 bp, Homo sapiens
  misc_feature 1, 2, 3, 4, 5, 6, 7, 8, 9, 10, 11, 12, 473, 474, 475, 476,477, 478, 479, 480, 481, 482: n = A,T,C or G
nnnnnnnnnnnnagtagagagaaggtttcaccatgttggccaggctggtctcgaactcctgacctcaggtgatctgcctgcctcggccttccaaagtgctaggattacagatgttttgattccatagtttaattaattctgtgggcaatttatttcggcattccaatttgaacacacaagcccactatgaggcccattctctctctctctcacacacacacacacacacacacacacacacacacacactctgtccctgctctctcgctctcatttgcttgctcatcaaaacatctgctctgtatctcactgaaatatctgtcttctgtttcattcctccaagtaaaatggtaacaacgcgttagaaagagttgcataggccagacatggtggttcacgcctataatcccagcagtttgggaggctgaaattacaagcgtgaagccactgcgtctggcctttacctttacaannnnnnnnnn

SEQ ID NO: 21288 - DNA, 694 bp, Homo sapiens
  misc_feature 1, 2, 3, 4: n = A,T,C or G
nnnnaatttagaaagtttattttgccaaggttgaagacatgcccagtgacatagcctcaagaagtcctgatgacatgtgcccaaggtggtccggccacagcttggttttatacattttagggagacatgagacatctttctctatgtaagaagtacattagttccgtccggaaaggcggagacagctcaaagcaagaccccctattgggggcttcgaagtaacaggtaggtgagagacagatggttgcattcttttgagtttctgataagtctttccaaaggaggcaatcagaatatgcatctgtctctgtgagcaaatggatgacttgaatagaatagaaggcagatttgccctgagcagttcccatcttgaagggacccaagatatttttctttcacattttccccttttcttttttaacatctttggagaaagcatttttacaacagaatgagtctccagtctcaggaaaggtcatctgacctttcctggctaggacggtttattcctagattggtaggtctggaaagttcatttttagcaggttgtgaagtctcatgtcctgtgaagagaaaatatgggggaggaagggatgaaaaaaacaacaaacaaaagaacaatcctgaaaaaattgatataggccacattactctgcagtccataatagtaggcaggtatgaaagtggcttatgt

SEQ ID NO: 21289 - DNA, 2776 bp, Homo sapiens
  misc_feature 1, 2776: n = A,T,C or G
nccgtcgagtctgttatgtgcgcatacacccgcaggcggctttttttccaacagatttgccgtttttacccctccagggttccccatgtttttagtgaggcccccgccaatatttccgtaaatctctttgtctccgcttctaactagccccgtttctgctccaactaaaatgaacacgggagtgaagcttagttttttgaactttattttacaatcagggatgtacttttaattttttacaacattttctccctagagatataatttagatattcctatcttcaaagtaaaaatcaaaataggaaataagcatagaaacagcctattggcagtggttacacctgcatggtatttatgagtctccaaactattggaaatttatttcaaccaaggttctcttaagtcttcattacttgggtgtaactcgagagaaaactaatttatatcaatttacagtttagtggtcatgatcaggggaaagtgatactcttccactgactacaagtcattgcagaggcagtttagaacttttcctttattcctaatatacaggacaaaccttgccgacatctcactacctcgaaaatcaaatttaaatgaagtatccaggagtagcctaaagaatgagtgtaatctggatggattttagtctaaatttatgccttgctcttcagtaaagtatagtaactccagatatatgttccacagatgcaataatttctgttccttgttcggtgcagaatataatttatacttcctgaaatcaactttgtctattcatgaaaatagctgctttttatttgcctttgtctcactttgaatatatatgatccacaggttacagacttttccaataactacatttcaacttgtacttcatcagcaaacatttgagaggatgttatttcataggttaactattttgaattcattgttgatcaagttagtagtagtgggcaattttcttatagaaagcaattccaaacataatgagcagatgcttgccagctctaatcaataagctgtatgccttgtccttctccctgtatctgaggatcatatactactttattgtccatgtcctcatgcaacagacacaagggattactggaaagaaaaagattacaggatcagatttgtccttcccccactccaaaaggccaaaacatttcaacagctatgttttcaagtaagatttatatcctacaatatcctttgaggttttcttactagaatgaaacacattttaggagagttaatgatttcgttggagcggggagaaacaggcaagtcacaggattttcaaaaagtataacaattcaggtaagaatatacattaattaatgttgccctaagttttatcagttaaaatttttttttaatttcaagggaagaggctttaacatgagaaatacaatatatcccagtccattatctacatattcttcattttggccatgaggtcttccaagctttcaccagaatcttccactgttaactcagtgacagaatcttcttgcttttttggaattgtgtatgccactgtaattccttcaggtaagtctggaactggacctgaaaaatttttcagttcctcttctgaaacctcagataccagctcaataccccattcattatcttcatggattatctcttcctcttcttgtataacctcttgtttaggcagtgctgctacctttttcttatattcctcctgctgcttcctgcaatttctgtcatcacactgaggatttggcttcatggacatagtaggaaaaaaatcctgcattgcattgtatccaaggtaaaaactaacagtaccaaaatttaacagaaactttaacacgttttgtactaagatcccagcaaccacacccatagtggtaggaagactggctgcacaaacaccttctcgtttcagagtcttttcatcaatatttgcagcaactacaagtggtggagcacacgcaaaacaagcagattctccaggaattataagctgtatatgccctgaaactgcattttcactgaccccagattccatccatgtttgtccaagttcattacaagctgtatttattgtcattcgagcttcaaaattgtccacacagctaagaactagatcaacaggttttccttcttctaacccaccattacttattctatccatgaaatgttgaaagttttccactgtggttatattatagttgtgtacttcaaaaagaacatcaggattaatgttcctcagagtatgttctgctgcttgaactttacttaatcctgcgttgatgagggttggaagaaaagtctattcatattgggctagttccaccttgtcataatcaaagagtagcaacttaccaagtgccacatcttgtcagcatttcagcaggtcacactacctactccaccacacctactattgctacggcaaaggtacggattttctcatagtcgcttacaattcccattcgtttcaatgccatcaagcggctgtagggattcgaatccaccacctctgagctcatcttctcgatgcggacccggccgccccctccgtcgccgctcctcgggacctgcagactcctctcctgggcaagttcccgctccagctcctggacccgctgctgcaggcgctccacagactccgccatggctgggactccgccgccaacgctcccagccagggccctcgccgccgccttcgccccacgttgctcggctggcccgcgaggggtacgtggggaggcacctcgccgctgccttcctagcccan

SEQ ID NO: 21290 - DNA, 865 bp, Homo sapiens
ccgcgggctggcgggggacccttcaggcccggccccgtttgggcctcggctcctggaaaagcgactcgcgcctctgggaagccgcagccccagactccagtcgcgcttctcgcccggcgccgccggaaagcagcctctccaacgcctgccggaaagcagcccggcccggcattttacgacgttcgcagcgctacccttttccgctccacggtgacctccgtgcggccgggtgcgggcggagtcttcctcgatcccgtggtgctccgcggcgcggccttgctctcttccggtcgcgggacaccgggtgtagagggcggtcgcggcgggcagtggcggcagaatgttggctaccagggtatttagcctagttggcaagcgagcaatttccacctctgtgtgtgtacgagctcatgtagagacggggtttcaccatattagccaggatggtctcgatctcctgacctcgtgatccgcctgcctgggcctcccaaagtgctgggattacaggtgtgagccaccgcgcccagccctgcagaaagtgttgtgaagagcgaagacttttcgctcccagcttatatggatcggcgtgaccaccccttgccggaggtggcccatgtcaagcacctgtctgccagccagaaggcactgaaggagaaggagaaggcctcctggagcagcctctccatggatgagaaagtcgagttgtatcgcattaagttcaaggagagctttgctgagatgaacaggggctcgaacgagtggaagacggttgtgggcggtgccatgttcttcatcggtttcaccgcgctcgttatcatgtggcagaagcactatgtgtacctgcccgggcggccgctcgaaaggg

SEQ ID NO: 21291 - DNA, 1398 bp, Homo sapiens
  misc_feature 1, 2, 1393, 1394, 1395, 1396, 1397, 1398: n = A,T,C or G
nnatcgacgccgcgtctaggatttttggaatggtaattgaatattagcattcatttaaagtcaccaactgcattgacctctaacaagaaagccagcccaggctgggaaaagtggcttacacctgtaatcccaaagtgccaggattacaggtgtgagccaccacacccagtccaaaaagtgattttctaattccatagtttcttctacatttcttaactggaattttgtaaggaagagttatccttattcatttatttacccatttacttgtaggagcatgtatcataaattcttaatctatggggtgtagttagctactgtaaatttgatgcacatatttttccagattcaataagtaggatccccatcaagctatcttctgaatctttaaaaatgtattctccttatttcatgggtatataattattttctgggcaacagtttgttcatggtacatttgtctccagccctagactcagaaaaatgtaatttattttaatggagaatactatttagaagctgcagtctctgtgtagggaggtgttcctaggtaatagtgccctggcttttaggtcttctctatggaggatatggcaaagacatacaaaattatatatacgtatccacacattaataactctatttctatattaaaaacatgaccacaagccaacacttttaattccactgcagcactgctgggttatttcttgctttccaaattcccttgtctgtagctatctttcatcacttgcaaaaatagcacgtgctcaatcctagattaaaatataagctactctcagaattgataactcataccactctttttaaaaatcaactaaccagaattcagtttttattcacagttcttatctttagctcagggcgtaatataaaagcactaggtttaaaacttacttggtcagcagcaatccacttctaggtacatgtccaaaggaactgaagaaagcatctcaatgtgtgaatgcctacctgtgttcatgcagcattattcagaagagccaagaggtggaagcaaagtaaatgtccattgacagatgaattggtaaacaaaatgcattatatacatacaatgcaatatcatttagccttaaaaacaaaattctgccatatgctacaacatggacgtatgctaagtgaataaaccagtccgaaggcaatacacccattccacttattgggtatctacgtcaactcagagaacaagtctgggatcgccagtgtggggcacatcgtgtcatgcttgctggccgcgaggagtttggatgtgtaaaatgctataactctggcccagtggggtctcttttccccgggaagaaaaaaggccggcaaaaagggcgaaaggtgaggacgcggattgccgcctggagannnnnn

SEQ ID NO: 21292 - DNA, 607 bp, Homo sapiens
  misc_feature 1, 2, 3, 4, 5, 6, 7, 8, 9, 10, 11, 12, 13, 14, 15, 16, 17: n = A,T,C or G
nnnnnnnnnnnnnnnnncacattgatatattctttctttcaaattattacatacattgattaagtctttgtttttctcttctagcagaagactctgcatttcactcccagctagatttttttacaacggcatggatttggtcttggatagtactgattgtcttttcttgattgtcagctttcttgtgggcatcatccagttgctgttgaagcaacctattttcactttgtagttgagcacatctgtcctctatagattcctgcttcttcagcgtatttatttactttgctttgttcatttttatacattcgttcaatttctttcttttgacactgtgtttggccaaggtctctttggaaacattctaaagctgacgtcttttctctgagtgtttctcttgcatgatgaaacttaatttttaggctgttaattttactgtcagcattagagagttttttcagaaacaatctgttatcttttaggttagacatatcagaattcattttctcctgtaaatgaacccattcatgtcctgttctctggaaagcaagttctaggttttcttatgctgtctgactttgatcacaatcatgtacctgcccgggcg

SEQ ID NO: 21293 - DNA, 2939 bp, Homo sapiens
atggtagacctatccgctgacattactgcaggccacctactcatgcacctaattggaagcgccaccctagcaatatcaaccattaaccttccctctacacttatcatcttcacaattctaattctactgactatcctagaaatcgctgtcgccttaatccaagcctacgttttcacacttctagttaggtctacctggccaggtagacctaactcgggtaaaaatatacactgacgtattaaatgtgcacatcaaccgtcaataatgaaacatacacgcgccatcacagtcctacacataatttatggtattcagaacatcactttataaactgttgccaaattaccacttaaacactaatatccaaatacagaatttagaaaattattttaaattttaactctaccatccccccgagctctcggctatgaatttagtctgggaagagggctccgtaataggccactgaggtcctctgtcccaccacatcatcctcccccgaaaactagctgcccgactgctctaccagacttgggctagaatttggcttcacggtggcaatgggaccacctgggccctacagtgtggcaaaatcaacttgcccacaaaccccatcccaggtgctgggatgctaacacactgaagctgaaagaccacacttggttttgccacagatcaagctgcatctgactagacagcctgttctctaccctatttcctgcagaagtctttttctttgtaatgcaacaagtgctacacagctcagatccaacgggacacggggaaagaggctgtagtgcacctagccctgctgagggagacccttgccttgccaaagcactttgctcacaaaggcagtttcaaagagtatagcccgaactcattcctggtaaaacaaaaggaaaacatttttgataaatgtacccaaaagtctcaaaagggctacgctggtcttctgaacggaaaccaaatgaggtctccccaggctcatgtcatgagtctcagggaaggtgtgtcctagaccgtggccttgggcctgcccaggccgaggctgccgtcactgcagatcctgcaggttgatagtgcttcctgggaactgggtggcctccggtccagcagggcctccagatgaggggagcacctcctggaggacgtagacgggcaggtccacagtgaggaaggggaggaaggtggctgggccgcgggccgagggcaggacaccttcgccggaggggtcatcctgcaccagctggacctggacgccctgcgccccgcactgcaccccagctgctggagctggtcctggccgtcctccgctgggcaccacgaggctcccacacaaccaactgttctggcttgcatggaaatggggaggactcattttgccttcttttatttttctctgagtagactgtgaggctcctgcattgctccccgctcctctctgctttttttccttggctagttgaatggctcggtaatcagttcttgctgagcccccactttccaaatagaagttgccagtgcctgcactgagctctgtgtcctgggcaccgtgctgctctgctggactgggcaacgtggactggggcagcccatggcttccttcctgctgcccaactgctcctgggcgagaaggcgagtccggctccaccttgattggagccagcagttccgggacactggcattttctcggggggtgctcgaagaggtcggtgtggtgatatgtgctgctaagttactattggaggtcaaagccagtgggtcgtcactcaagttcttcatgggcagagccaccagacagcctaatgctcctgcactcacagtctgcacgtcatccacactgaagctgccctgctgcagaaccgtggctgctgtcccgagaaccagagggctgtccaggcttgggggaatatcactgtgggccaccaggaccaggggttccatcggccctagggagctattattagcagggaggttccctcccagagaggagctcacagaagtgacgtcaatagtcaggattccggagttcagagcctcatccgacccacctgcagaaccactagcattggcaggtgtgtcagagaagagtgcagcaagatccatgttagtgagctcactttggcctgggctgctgagttcactgctgggagtaagagaactcggagcttctagctgaggtaagagatcttggcgccggctgtgctgtctgaccatgtgcgccttcatgctgtgcttggaggtgaagagtctgttgcaggtagaaactgggcaacggcttttcggagcacccacatcctgcacgtgtttcttagagtgaatgtacagactgctacgagcggagaacctcgcgcaacatccttccacaggacactcgaacggctttgtgcctaggtgggttatgctgtggcctttcagatgctctgctctggtgaatgatttcccacagccctcgacagggcaggtaaacctccggtcatcgtcatgtttccttctgtgccttagaagtttggacatgctggtgaaggtccagccacagctgtcagagtcacaaataaatggtctttcacctgtatggctccgcaggtgaattttcagccgacaggctttatcatactgcttgctgcacccaggaaaggagcaggaaaagagctcttgttccctgaagtgggctcggttatgggaaaacagggcactcactgtgataaatgtcttctcacagccgggaaagtcacacttgtaagggcgctcgggctcgaagtggctgcgctggtgggagctgagcttggcgtgcgtggggaagcgctcggcgcacacctcgcacttgaacaggctctcctgctcgtggcccttcatgtgcgccttgaggttatagaccgtagtgaacttcttgccacagccgcccactggacagcccctcgtgccaagcttggcg

SEQ ID NO: 21294 - DNA, 2146 bp, Homo sapiens
cgtccggttttgtatttttagtagagaaggggtttcgccatgttggccaggctggtctgaacttctggcttcaagcgatccacctgccttggcctcccaaagtgctaggattacaggcatgagccaccacgcctggccataaatatgttaaaaggttgatatagaaacagatgaccgtggcatttagagttttggggtgttgagggagtcaggggtaactccagaaaggattgatatctgtgaattgtcctgaagggtaagaaggaatcagcaaaactcccaaattaaaaactttaccaaaaacatttcatcttagtgctaagtctactattttctacaaaatacatatttctaaatttttcatttactattttaaaattcttagcttccctcctcatccctgattaaaaaaaattttttttttgccctttggcttcttacatttttaatgaatgtgtttatgagtactttggactccactgaaaaaaattagaagaggccaagagagtaggatgaagggccttccagacagggggaatagactgttgaaaaaaaaaaaaaaaaaggagagccccgacgttggatacaaaaaagtagtttctgttctcatgtaaatgttcagcatacattgcaaatacaaaactcaagttccaaagataattatattagaaatacagatttggacctaatttctaagatgatgttgatggatgggtagctggataaataaatgagttggaggtagatgtggggagagaaaagactcagcggggacggaaagcacagggaggaaaaatggccaccagagataacagagcagcctatgttaattaatgatcaactgtgtgtggcttttttttttttcctggcccagatggatagctcccagttgatccattgtcgggagcttgtggcacatcacctttctactctgcagtcttccctgcctctgaattccgtttatgtctaccgtcccctcaagcacaccctggtgacctgtgacaaaggagtgttcagattacatccctcctctgtcccaggcccagacttctccaaggacaacagcaagccagaagtgccagtcagaggtacagcagccttttaccatcatctcccagctgcccagtgggtgcaagcagacctcttactaaacgcaaagtagaggaaatggaagtggatgacttctatgatggaatcaaacggctctataatgaagataatgtctcagaaaatgtgggttctgtgtgtggcactgatttatcaagacaagagggacatgcttccccttgtccacctttgcagcctgtttctgtcatgtagtttcaacaagtgctacctttgagtgtaaactaaggtagactactttgggaatgagaacatgcaaaatcaggaaaggctgtagaaggaaatataccttaacaggctgatttggagtgagccagaaaaaaaaaataaaactctcattatttgtgtggctaattataattcagcgttatttaagcacataaagaccaaaaaaaaaaaaaagaaatccaaaagatccaaactttttttaaacttaaaaaatctctttgtagtatgtcagttgcactttttttctgccataatgtaacgtagcttgccccgtcaaaaattcaattaaaattcatggccagcaatcctgttccccctcagcatcctgatttaattttcctgttgcttttgcttgcttctccatttaatagttactgaactttatgcatgttgatctatattgattttcactgcagttgaatgaacaaattatttcagtgtgacagccatgactcaagttccaattagtctgaaaagggtactttggaattgtcccatattaatcagagatggcaaaagaaaaagttctcatattaccaggttgattttgtgtctcatttcaaattttaatttaaaattatggttttcatttttgtttaccttaaagtgatgcttaaaagtggcatgtaattaggacacttaggtttgttgaaagcattttcgacatttgtataactttaaatagatttttctaactgatagttttcactcatttattatcagtaggagagactgtctagatgttggggcaactctatgatttaagtctgtaacatgttataactgaatttag

SEQ ID NO: 21295 - DNA, 1105 bp, Homo sapiens
  misc_feature 1105: n = A,T,C or G
acttttttttttttttttgttttggggaaatgtttagagacctgcaatttatccatccactgatgaagctggttagaagctggcagggaactccaaattattcttgcatacactgtcccccctgcctggacatgagcacagtcaggcaaggtctgcgagtatgccctccaaattaagttttcactttctctctttatgctctaagaagtttaagtgacttgtacataaactgtgtttcacttccagatcagtctgacactctccaacaaaaccaaatacatttcgtatgaggcaacacaattttttttttttttttgagatggagtctcgctctgttgtccaggttggagtgcaacggtgtgatcttggcttactgcaacccccacctcccgggcccaagcaattctccggcctcagcctcccaagtagctccggctaccgcggctaattttttgtcttttcagcagagatgaagcctcgctatgtcggtcaggctggtctcaaactcccggcctcaagtcatccgtccactccagcctcccaaagtgctgggattacaggcgtgagccaccatgcccagcccaaaatatttgatttttaatttttaaaaatcaaaatccatactctaagtagaggtttttcaattagaaccatttccaaattaagttttctttttttcttcagggaaatgtttagagtcctgcaatttatccagccactgatgaagctggttagagctggcaggaactccaaattattcttgcatacactgtcccccctgcctggacatgagcacagtcaggcaaggtctacgagtatgccctccacattaagttttcactttctctctttatgctctaagaagtttaggtgacttgtacatatatcactcaaaataccagtaactgtgtaccaaatggagaaaggacacttgacttctttaagaatacacccaaatcaggctacatttttaaaatttaataaatagaagtgggggtgggaaggtgaagaaattactggtttaaaaagcagcttctctgttatggtaaaatggagattcacaggaaaatggagattcacctgggtttctagctaaaatcaacan

SEQ ID NO: 21296 - DNA, 778 bp, Homo sapiens
ggacatagaaaagaaagataaatgcttgattcctgattaaaagaatcttaagagactgattaaccagctataacacatggaaattttctggatcccaattcaaaagtatcagctgttaaaaaaaagtaagataaatgagatcacttataagacagtcaagaaatatgcgcactgattaaatatttgatgatattaagaaaacgatgtttttcttttaaggagtgatatgatattattctaacagtattattacatattaatagtattactataatacttttagataatattataactatgctttaatacccccagagcaaataattttgggatggctataaaatcatggaggtggaagaaaaggtataagtatagagaaacaatattggccagtagtatatgaccgttcattattattatttctacttttgaatgttaaaatttttccataaaagtttttaaaaagataaatatgtagaatatataaagagtctctttaaaaattcagtaagaaaatgacccagagaaaaatggacccaaagataggaaaaggtaatctacataaaaatgtttaacttctcttttgtggttgataagaggcaaatttaaatcaacaaataccaattcatacccatcaaactgacaaaaattgtaaagtttcacagtaacaagtgttgataaaaatatgagacaacaagaactctcatacactactggtgaaaatataaactgatatcagtttgaagaacaattctgcagtatctaaagttaaacatgt

SEQ ID NO: 21297 - DNA, 2242 bp, Homo sapiens
  misc_feature 2242: n = A,T,C or G
atagggagtcgacccacgcgtccgcttttgcatctttacttgtggagctgtggcaagtcctcatatcaaatacagaacatgatcttcctcctgctaatgttgagcctggaattgcagcttcaccagatagcagctttattcacagtgacagtccctaaggaactgtacataatagagcatggcagcaatgtgaccctggaatgcaactttgacactggaagtcatgtgaaccttggagcaataacagccagtttgcaaaaggtggaaaatgatacatccccacaccgtgaaagagccactttgctggaggagcagctgcccctagggaaggcctcgttccacatacctcaagtccaagtgagggacgaaggacagtaccaatgcataatcatctatggggtcgcctgggactacaagtacctgactctgaaagtcaaagcttcctacaggaaaataaacactcacatcctaaaggttccagaaacagatgaggtagagctcacctgccaggctacaggttatcctctggcagaagtatcctggccaaacgtcagcgttcctgccaacaccagccactccaggacccctgaaggcctctaccaggtcaccagtgttctgcgcctaaagccaccccctggcagaaacttcagctgtgtgttctggaatactcacgtgagggaacttactttggccagcattgaccttcaaagtcagatggaacccaggacccatccaacttggctgcttcacattttcatcccctcctgcatcattgctttcattttcatagccacagtgatagccctaagaaaacaactctgtcaaaagctgtattcttcaaaagacacaacaaaaagacctgtcaccacaacaaagagggaagtgaacagtgctatctgaacctgtggtcttgggagccagggtgacctgatatgacatctaaagaagcttctggactctgaacaagaattcggtggcctgcagagcttgccatttgcacttttcaaatgcctttggatgacccagcactttaatctgaaacctgcaacaagactagccaacacctggccatgaaacttgccccttcactgatctggactcacctctggagcctatggctttaagcaagcactactgcactttacagaattaccccactggatcctggacccacagaattccttcaggatccttcttgctgccagactgaaagcaaaaggaattatttcccctcaagttttctaagtgatttccaaaagcagaggtgtgtggaaatttccagtaacagaaacagatgggttgccaatagagttattttttatctatagcttcctctgggtactagaagaggctattgagactatgagctcacagacagggcttcgcacaaactcaaatcataattgacatgttttatggattactggaatcttgatagcataatgaagttgttctaattaacagagagcatttaaatatacactaagtgcacaaattgtggagtaaagtcatcaagctctgtttttgaggtctaagtcacaaagcatttgttttaacctgtaatggcaccatgtttaatggtggttttttttttgaactacatctttcctttaaaaattattggtttctttttatttgtttttaccttagaaatcaattatatacagtcaaaaatatttgatatgctcatacgttgtatctgcagcaatttcagataagtagctaaaatggccaaagccccaaactaagcctccttttctggccctcaatatgactttaaatttgacttttcagtgcctcagtttgcacatctgtaatacagcaatgctaagtagtcaaggcctttgataattggcactatggaaatcctgcaagatcccactacatatgtgtggagcagaagggtaactcggctacagtaacagcttaattttgttaaatttgttctttatactggagccatgaagctcagagcattagctgacccttgaactattcaaatgggcacattagctagtataacagacttacataggtgggcctaaagcaagctccttaactgagcaaaatttggggcttatgagaatgaaagggtgtgaaattgactaacagacaaatcatacatctcagtttctcaattctcatgtaaatcagagaatgcctttaaagaataaaactcaattgttattcttcaaaaaaaaaaaaaaaaaaaaaaaaaaaaaaaaaaaaaaaaaaaaaaaan

SEQ ID NO: 21298 - DNA, 1057 bp, Homo sapiens
gtggcgcatacctgtaatcccagctactcaggaggctgaggcaggagaatcacttgaacttgggagggggaggttgcagtgagccgagattgcgccattgcactccagcctgtgcaacaagagcctgtgcaacaagagcgatactccatctcaaaaaaaaaaaaaagagagtttcacaattgttgcccaggttggtctcgatctctgggatttaagtgaaccacctcccttggcctcccagagtgctagctaagttacaggcgtcaaccaccacactcggccctccttgcaatttattttagtgaagtgatcatgatattaatgacccaggaaacttcgtttctctgctctcaacatagtaggaactttaagactattcttttacaggtacaggtttgcagattccgccagcagcacagcaagctctacagatgagtggctctttggcatttggtgctgtggcagatttgcaaacaagactttcccagcagactgaagcttcagctttagctgcagctgcctctgttcagccacttgcaacacaatgtttccaactctctaacatgtttaaccctcaaacagaagaagaagttggatgggataccgagattaaggatgatgtgattgaagaatgtaataaacatggaggagttattcatatttatgttgacaaaaattcagctcagggcaatgtgtatgtgaagtgcccatcaattgctgcagctattgctgctgtcaatgcattgcatggcaggtggtttgctggtaaaatgataacagcagcatatgtacctcttccaacttaccacaacctgtttcctgattctatgacagcaacacagctactggttccaagtagacgatgaaggaagatatagtcccttatgtatatagctttttttctttcttgagaattcatcttgagttatcttttatttagataaaaataaagaggcaaggatctactgtcatttgtatgcaatttcctgttaccttgaaaaaaaaaaaaaaaaaaaaaaaaaaaaaaaaaaaaaaaaaaaaaaaaaaaaaaaaaaaa

SEQ ID NO: 21299 - DNA, 681 bp, Homo sapiens
  misc_feature 1, 681: n = A,T,C or G
nctggaaatccgtacagataaagcttcaaacaattttgaaaggcctttcaaataattagttacatgattctgtaatttgatattccctgggatttgctctggccttggtttgtctgcacatgcctcctaaaacctttgttaatcatataagaatgatagctaatatttatctgagtacactgcctcatcgatctaatctaatccctatgacgacctacggagatagatactattatctttgttttatagatgaggaagctgaggcctaatgttaagtaatccccctgaggactcagtcctgggaaattaaagagagcaggattagactcaggtctcagatgccatcatcggcggtcttaaccattatcccatattttatattaatcaaaagacttgtaaatcttgggattcgaatcagtggctaggcttgtgtttgtacagttgtaactgatggaaggacagcacatacaatcttacatagattgaaaaaaatttctctcccccccaggaagtgtctttcatttgggactctggaatgaaaactggagggggcatgagtatcaggtggaaactctcacactgttaacaaatagacacctttccttaaaccgtatttgagtttgcagcaaagccattctatataatcataagcctgtcctatttatagcatcaccctgatan

SEQ ID NO: 21300 - DNA, 1889 bp, Homo sapiens
  misc_feature 1, 2, 3, 4, 5, 6, 7, 8, 9, 10, 11, 12, 13, 1889: n = A,T,C or G
nnnnnnnnnnnnngtaaaaatgaagtctcactgtgttgcccaggcaacattgtgaatgtacttaatgccactggactgtacactaaaaatggttaaaatggtaaactttatgttgtatatattttaccacagtgaaagataaataaaaataaattcatttatcgactgccaaagaaaacaaaaacagcataagcataatgatactcacacaatttatttaaacgtaatctccagttataaccatcaagatttaatccatccataaaaattttaataaagctacttacattatcttaacagttataattctttattagaaatcatcttttaaaaactgaaaatctgacattgtcttactccttgatgatttctttttagaaaccatatatataggttgaaatccagtgtgtttttaaaaaatgtatcttacaggaagcatctcaattctccctactatatggtgcctcacaatcggggtcctcagagagactgctgtgaagttacctgggggccagttatcttcgacagttgcagcttccctacaggctctaaaaggaatattatcttctcccatggcccgggcagaaaagagccgtactgcttggactgaccttctccgaagtgccttaacaacaattcttgactgttgggatccagttgatgaaacacaccaagaacttgatgaagtcagtctacttactgctatcacagtgtttattttgtctaccagtccagaagtaactaccatcccatgccttcagaagcgctgtattgataaatttaaagctactcttgagataaaagatcctgtggtacaaatcaagacctaccagctcctacattccatctttcagtatccaaatccagctgtttcctacccatacatttactctttagcatcctgtatcatggaaaaactgcaggaaatagacaagagaaaacctgaaaacactgctgagcttgagatcttccaagaaggcataaaggtcttagaaacactggttactgttgctgaagaacaccatcgcgctcagctggtggcctgtcttttgcccatcctcatttccttccttttggatgaaaattctctgggatcagcaacttccataatgagaaatttacatgactttgctctacaaaatctcatgcaaattggacctcagtattcatctgtttttaaaagtttagtggcttcttctccagccctaaaagcccgccttgaggctgctataaagggcaatcaggaaagtgtcaaagtcaagataccaacatctaaatatactaagagtcctggaaaaaactcaagcatccaattaaagaccagtttcctctgattttttttttggaatagtaagcaccttaatataataaatacttgatcattgcctttggtgacaaaagggacattgtagacacaagtgcccttagaggtctagttgattgttttaccttaaatagctgtgactcttcaaagtaacagcatacttaacatttttgtgtgtgtgcgtggggtttgcgttttgttttgttttgtttttctatttaaaaagacaatggagctaacttgccaggaattttaagaaagtgctaaagaactaaacttactaaacaatccactgctttaaaaatgaaatgaatttcttctaacagtccatacatatgtggtatacttaatactgtgacagatataaatatgactctagtgtaaattatctgcctattttgttcccatgctggttacatcggttggccggcagggcacccgtatccgcattgaagcagggggtacaagcggatgacaccgcaatggacccccttaaaaaacgggtggcactaccaagacgcggagactcgaatgctacctccggacccaaaaagccgcaggcaan

SEQ ID NO: 21301 - DNA, 1259 bp, Homo sapiens
  misc_feature 1258, 1259: n = A,T,C or G
actctttttttttttggtcgagatggggtgtccctgtgttgcccagactggtcttgaactcctggactcaagggatcctcctgtcttgggctcccaaagtgttgggattacaggcgtgagtgaccatgcctagctcacttccaggtttaacagacaaaataaacttactctagtttccatctctatcattttataataaccgtagcccacattgtagtagtttttcagctctttactaagtcccaccaattcatgttttcacccttaaaatctttctcactgatactctctctggacagaaaaaaggtgaaataagcctactataaggaatatatgacatgctaaattttatttttaaacggttcttcaagtcagattaaagtaataatagcaaattatgtgattatccatgtcccagcctctctccaaaaaaatagtaaacaagatgtcttcttcttttcccaaagatacacatacacacatgtacaaatttttttatcagataataatagctaatatttaatgagtacttaccttagtttgtcccctttacaacagctttacatctgtgtgattgatacagttcatattcccattttataactgagaaaactggtgcacagagaggataagcaacttgccaaaggtcacacagttaataagtggaaatgctggggtatgaaccaggtagtctgcccccatagctctgccccccagagctgtactgtctcccatgagggtacttctccatggagcagcctgaggcgatccctttattctgggcttctctcagaaatggattcccacacagtattcaaagcaaatttccccagaggaaatcctattggaagaacttaaaaactcagaatctttttctttgtccagagagttgaggaagcttaagctaaatgatacatgttttttaaaaaaaaatcagattataaatttagtttttggtgattcattaaattctttactattatagttattttctagctgttcatcttttagctaaatttgttccaaagaagcaaaagtttggtttctactaagttctggatccggatgggaaattgcccgtgttgtacactgcccgttactgtgggggagattggacaagcttggggtcacggtctaccccttggaagcggtcatcggttctggtcgaaaagctcgtttggcccaaaacaaaaaacacgacaacaaaagccataaacgacaaaaaaacaaggggtcttccggaacaccttgagcaaann

SEQ ID NO: 21302 - DNA, 864 bp, Homo sapiens
  misc_feature 1, 2, 3, 32, 862, 863, 864: n = A,T,C or G
nnnccgaaagctcctaagtgcttgcaccctanaatcaatccctcttccttcccgctagagctccaaggaccccacgcctgtgtctctgtgacagagctcaaagggccctgggccttccctccctggctcggctgtgcttgggagggttccccagtccagaatccctaaggagcatggggcagctgatccatccctggtgtacaaactgctgactgcagacagatgctgagctacccaaaccaacacctagcctctccctgaagatcctcccaggctgagagagttctgggtgtcctaggaccaaggacactggcagacttccagaagggcccccaaagccctaacctgtccagccagagcatgcgtctcagcagagctgtcttcccaagcctttgatgacaaaccaatttccctcgatgatgtgcttctgagtgctctgctgaggaacaatgggaagtctgcccagcagaagaaaatctctgccaagcccaagcttgagttcctctgtccaaggccagggacctgtgaccatggaagcagagagaagcaaggccacagccgtggccctgggcagtttcccggcaggtggcccggccgagctgtcgctgagactcggggagccattgaccatcgtctctgaggatggagactggtggacggtgctgtctgaagtctcaggcagagagtataacatccccagcgtccacgtggccaaagtctcccatgggtggctgtatgagggcctgagcagggagaaagcagaggaactgctgttgttacctgggaaccctggaggggccttcctcatccgggagagccagaccaggaagaggtcctaaccctctggaggcgctcagcgccnnn

SEQ ID NO: 21303 - DNA, 485 bp, Homo sapiens
  misc_feature 482, 483, 484, 485: n = A,T,C or G
accttttatgtaaattttgcacagaaatttttggcataagtttattttctttcagtttagttcagtgcatgcactaataaaactggttgtttaatttaaaaggaatatataagactttacccatgttattttcttggtttttatttcagatgtagattttgtttttgaggtaaattcgttcttcagggattgaacactattgttagcaagtgcctaaaaaagatgtgaaacagtttacatatgtcaactgtaacagtaggtcccaaaggcaactttaaagttctggaaccaagacggagggcgaatatgggggcaaataaaaacaatagatacctcctaaaactctttttcataagtgttatttaaagccatcaaactgtccaggtgcagtggcttatatctgtaatcccagcacttttggagtctgaggtgggaggattgcttgaggccagaactttgagaccagcctgggcaacatagannnn

SEQ ID NO: 21304 - DNA, 631 bp, Homo sapiens
  misc_feature 631: n = A,T,C or G
acaggcacccacgcccagccaatttttgtatctctagtagagacagggcttcaccatgttggccaggctggtcttgaactcctgacctcaagtgacctgtccgccttggcctcccaaagtgctgggattacaggcgtgagccacggtgcccagccaatatttgctccttttacatttaatataatcatcgacgaagttgagtttaagtctaccattctgtcatctgttctgtttgtcccatctgttcttcattcctctctctttccctgcatttctttggagtaatcagttatttttttactattccattttctcctctattagcttttcgttatatattcttttttcatttagaggttgctctagagattacaaatacacttttgactgattaccacccgcctccagccttttgttctacagttgtcgtatttttgtttccacatattttaaatcccacaagccacaactattattttaaacagtcagaatttgtatttactcacatttatccttaccattgttcatttctttctgcagttctttgcttttatctgttattttcttgcaacacaaagaacttgctttaatattctctagtgccagcatatcagcacggacgcgtggtgan

SEQ ID NO: 21305 - DNA, 2185 bp, Homo sapiens
  misc_feature 2181, 2182, 2183, 2184, 2185: n = A,T,C or G
gcgtccggcaggcgcgcggggcacggagggcggtggcggcgggctcctgcgagaagcaagcggaacttcctgaggaggaatcattatagattctaaaaatatattttcccttctctgtggacttggtataaaacgtagctttttttctgcttggatttattttctaaaaatcaacaccgtaaacccatatcagatacaacaaaattggggtagttaaaaccatgagttgtggaaatgagtttgtggaaacattaaaaaaaattggttatcccaaagctgataatcttaatggagaagactttgactggttgtttgagggcgttgaagatgaatcgtttctgaagtggttttgtgggaatgtgaatgaacagaacgtgttgtctgaaagagaattggaagcttttagcattcttcagaaatcaggcaagcctattctagaaggggcggcattggatgaagctcttaaaacgtgtaaaacttctgatttgaagacacctagactggatgataaagagctggagaaattagaggatgaggttcaaactctactgaaattaaagaacctaaaaattcagcgacgtaataaatgtcaattgatggcttcagtaactagccacaaatctctgaggttaaatgctaaagaagaagaagccactaaaaagctgaagcagagtcaaggaattctaaatgcaatgatcactaagatcagtaatgaacttcaggctcttactgatgaagttacacaattgatgatgttcttcagacattctaatttaggtcaagggacaaatccactggtatttttatcgcaattttccttggaaaaatacctaagtcaggaagagcaaagcacagcagcattaactttgtataccaaaaaacagttctttcagggtatacatgaagtagttgaaagttcaaatgaagacaattttcaacttttagatatacagacaccatctatttgtgataatcaagaaatccttgaggagagacgacttagagatggctagactgcagctcgcatacatttgtgctcaacatcagttaattcacttaaaagcaagtaattcgagcatgaagtcaagtataaaatgggcagaggagagtcttcacagcctaaccagcaaggctgtggacaaagaaaatttggatgctaaaatttctagcttgaccagtgagattatgaaacttgaaaaagaggtcactcaaataaaagacagaagtttacctgctgtggtaagagagaatgcccagttattgaatatgccagtggtaaagggagattttgatctgcagattgctaaacaagattattatacagcaagacaagagttagttttaaatcaattaataaaacaaaaggcatcatttgaacttctacagttatcatatgaaattgaattaagaaagcatcgggacatatatcgtcaacttgaaaatttggttcaagaacttagtcaaagtaacatgatgctctacaagcaattagaaatgttaacagatccatcagtttctcaacagataaatccaaggaattacccttgatactaagggttattctactcataggctttaccaagttttggagggagagaataagaaacagaatatttctttagtacaagatcagttggcagtatctgctcaagaacattctttctttctgtccaaacggaataaggatgtggacatgctttgtgatactttgtatcaaggaggaaatcagcttttgcttagtgatcaggagttaacagagcagtttcataaagttgaatctcaactgaataagctaaatcatctcctcactgatattcttgctgatgtgaagacaaaaagaaaaactttggcaaataataaattacatcaaatggaaagagaattctatgtatattttttaaaagatgaagattatctgaaagatattgtggagaatttagaaactcaatcaaagattaaggctgttagtcttgaagattgaaaattactgaaaactgaatctttattacgtgtcctcttttatttattagaagactgtgtataataaacactactaaatttttaaaaaaaaaaaagtcgacgcggccgcgaatttagtagtagtaggcggccgctctagaggatccaagcttacgtacgcgtgcatgcgacgtcatagctcttctatagtgtcacctaaannnnn

SEQ ID NO: 21306 - DNA, 4200 bp, Homo sapiens
  misc_feature 4194, 4195, 4196, 4197, 4198, 4199, 4200: n = A,T,C or G
tatagggagtcgacccacgcagacccgaaagcggagctcgaaactgactggaaacttcagtggcgcggagactcgccagtttcaaccccggaaacttttctttgcaggaggagaagagaaggggtgcaagcgcccccacttttgctctttttcctcccctcctcctcctctccaattcgcctccccccacttggagcgggcagctgtgaactggccaccccgcgccttcctaagtgctcgccgcggtagccggccgacgcgccagcttccccgggagccgcttgctccgcatccgggcagccgaggggagaggagcccgcgcctcgagtccccgagccgccgcggcttctcgcctttcccggccaccagccccctgccccgggcccgcgtatgaatctcctggaccccttcatgaagatgaccgacgagcaggagaagggcctgtccggcgcccccagccccaccatgtccgaggactccgcgggctcgccctgcccgtcgggctccggctcggacaccgagaacacgcggccccaggagaacacgttccccaagggcgagcccgatctgaagaaggagagcgaggaggacaagttccccgtgtgcatccgcgaggcggtcagccaggtgctcaaaggctacgactggacgctggtgcccatgccggtgcgcgtcaacggctccagcaagaacaagccgcacgtcaagcggcccatgaacgccttcatggtgtgggcgcaggcggcgcgcaggaagctcgcggaccagtacccgcacttgcacaacgccgagctcagcaagacgctgggcaagctctggagacttctgaacgagagcgagaagcggcccttcgtggaggaggcggagcggctgcgcgtgcagcacaagaaggaccacccggattacaagtaccagccgcggcggaggaagtcggtgaagaacgggcaggcggaggcagaggaggccacggagcagacgcacatctcccccaacgccatcttcaaggcgctgcaggccgactcgccacactcctcctccggcatgagcgaggtgcactcccccggcgagcactcggggcaatcccagggcccaccgaccccacccaccacccccaaaaccgacgtgcagccgggcaaggctgacctgaagcgagaggggcgccccttgccagaggggggcagacagccccctatcgacttccgcgacgtggacatcggcgagctgagcagcgacgtcatctccaacatcgagaccttcgatgtcaacgagtttgaccagtacctgccgcccaacggccacccgggggtgccggccacgcacggccaggtcacctacacgggcagctacggcatcagcagcaccgcggccaccccggcgagcgcgggccacgtgtggatgtccaagcagcaggcgccgccgccacccccgcagcagcccccacaggccccgccggccccgcaggcgcccccgcagccgcaggcggcgcccccacagcagccggcggcacccccgcagcagccacaggcgcacacgctgaccacgctgagcagcgagccgggccagtcccagcgaacgcacatcaagacggagcagctgagccccagccactacagcgagcagcagcagcactcgccccaacagatcgcctacagccccttcaacctcccacactacagcccctcctacccgcccatcacccgctcacagtacgactacaccgaccaccagaactccagctcctactacagccacgcggcaggccagggcaccggcctctactccaccttcacctacatgaaccccgctcagcgccccatgtacacccccatcgccgacacctctggggtcccttccatcccgcagacccacagcccccagcactgggaacaacccgtctacacacagctcactcgaccttgaggaggcctcccacgaagggcgaagatggccgagatgatcctaaaaataaccgaagaaagagaggaccaaccagaattccctttggacatttgtgtttttttgtttttttattttgttttgttttttcttcttcttcttcttccttaaagacatttaagctaaaggcaactcgtacccaaatttccaagacacaaacatgacctatccaagcgcattacccacttgtggccaatcagtggccaggccaaccttggctaaatggagcagcgaaatcaacgagaaactggactttttaaaccctcttcagagcaagcgtggaggatgatggagaatcgtgtgatcagtgtgctaaatctctctgcctgtttggactttgtaattatttttttagcagtaattaaagaaaaaagtcctctgtgaggaatattctctattttaaatatttttagtatgtactgtgtatgattcattaccattttgaggggatttatacatatttttagataaaattaaatgctcttatttttccaacagctaaactactcttagttgaacagtgtgccctagcttttcttgcaaccagagtatttttgtacagatttgctttctcttacaaaaagaaaaaaaaaatcctgttgtattaacatttaaaaacagaattgtgttatgtgatcagttttgggggttaactttgcttaattcctcaggctttgcgatttaaggaggagctgccttaaaaaaaaataaaggccttattttgcaattatgggagtaaacaatagtctagagaagcatttggtaagctttatcatatatatattttttaaagaagagaaaaacaccttgagccttaaaacggtgctgctgggaaacatttgcactcttttagtgcatttcctcctgcctttgcttgttcactgcagtcttaagaaagaggtaaaaggcaagcaaaggagatgaaatctgttctgggaatgtttcagcagccaataagtgcccgagcacactgcccccggttgcctgcctgggccccatgtggaaggcagatgcctgctcgctctgtcacctgtgcctctcagaacaccagcagttaaccttcaagacattccacttgctaaaattatttattttgtaaggagaggttttaattaaaacaaaaaaaaattcttttttttttttttttccaattttaccttctttaaaataggttgttggagctttcctcaaagggtatggtcatctgttgttaaattatgttcttaactgtaaccagtttttttttatttatctctttaatctttttttattattaaaagcaagtttctttgtattcctcaccctagatttgtataaatgcctttttgtccatcccttttttctttgttgtttttgttgaaaacaaactggaaacttgtttctttttttgtataaatgagagattgcaaatgtagtgtatcactgagtcatttgcagtgttttctgccacagacctttgggctgccttatattgtgtgtgtgtgtgggtgtgtgtgtgttttgacacaaaaacaatgcaagcatgtgtcatccatatttctctgcatcttctcttggagtgagggaggctacctggaggggatcagcccactgacagaccttaatcttaattactgctgtggctagagagtttgaggattgctttttaaaaaagacagcaaacttttttttttatttaaaaaaagatatattaacagttttagaagtcagtagaataaaatcttaaagcactcataatatggcatccttcaatttctgtataaaagcagatctttttaaaaagatacttctgtaacttaagaaacctggcatttaaatcatattttgtctttaggtaaaagctttggtttgtgttcgtgttttgtttgtttcacttgtttccctcccagccccaaaccttttgttctctccgtgaaacttacctttccctttttctttctcttttttttttttgtatattattgtttacaataaatatacattgcattaaaaaaaaaaaaaaaaagaccgcgggccggggcctggtccccaattcgccctatagtgagtcgtattacaattcactggccgtcgttttacaacgtcgtgactgggaaaaccctggcgttacccaacttaatcgccttgcagcacatccccctttcgccagctggcgtaatagcgaagaggcccgcaccgatcgcccttcccacagttgcgcagcctgaatggcgaatggcaaattgtaagcgttaatannnnnnn

SEQ ID NO: 21307 - DNA, 1490 bp, Homo sapiens
tatagggagtcgacccacgcgtccggtgacatccgccatcttgagagtcaactactgactggactgagttgtgtggtatatgcttctgtttacttctcttctgtcttttttaagtggccaaatagcaaacgcttaaataggaaatctctgggagacttgaataaaagactttgcttggtagaaaatcatgtcacagaaaggctaatagacagcaaagtaaatcagcaagtccctgagcagtaggattaggattcctgtctcctttcagattcaaatgcatctgtttctggggttaacagtggactgttaagaggctgtgcagcttgggttaagtcattcttatctctgggcttcaggagcttagaccagatagtttctacaggctctcttggtgctgatgccttgggattctgtggctgttttctgtaagatctgcaagggggaaacaggattttggcagcaatcctttcattactaaagcttcctttcttttcgggtacagtgaaaagagccaaggctgtgtgaccccctcatcacttagccaggcgtatggtcctggtttctgaggctgccagaaagcatcttagcaatttgtgtttggatggtccatgcctgactattctaggctggaggttcctaaagagtaacaagaggaagagaaacaagaatctctgacacttgttgagaatagagcacagtcccatttgtttgaaaagagacaccaggcagccatgtttatgtgccagaaatgcattccacctcaaggaggacttaatttatggacccgtgtgtgccaggctgagctgggcaagatctttctcaggacaaactctgccatgcagctaaaagcctggaaactaaaggatttcatgtagtaaactatctcccaacccctgtaggcatcagaccacaggatgaggtttcagaaggtcataaggcagaatagttaagcctacagggcttacagtctgacagacctgggttcagttcttgggtcttcatcactagttttgtgacttcgggaagatgactcccggagcctcagtgagcctcagttacttcatatgtaaatgaagtaatactatctacttcacaaggctgttgaaaggattaaatggagaatgggtgtaaaacccttagtgcagtgccgtgcacacaccgtagatgccgaacgtgtgatgttggcactacacaatgtgtaatcccaatcaggcagagctaggcaggcaaatctaatccaggatctttgtaaggggactgagaaccagagactggagaaagccagtgtaaacaccatgagcaaaggagcaagagaaggggcattgtgtaagtaggagatggagcttggacttactaagtggatcagggtagaagaatccagtcaggaccaagggaggagagtccaggaaaatgccatgagcagctctgtagcatgaccttgttgggctgggttaaagtagggtctgccaccagtcatgtgacagaaaggt

SEQ ID NO: 21308 - DNA, 919 bp, Homo sapiens
  misc_feature 1, 2, 3, 4, 5, 6, 7, 909, 910, 911, 912, 913, 914, 915, 916,917, 918, 919: n = A,T,C or G
nnnnnnnagtctcaggcgataagtgggtacgcagggccagtcacaagtgtaaacgcggcttgaatttataaagttttatttttgtatatgtgctaaatcttaggaactgtgaacaatcttcatgtcagtctgttggcttgtaaaaggctaagaagtgcatgacttgggtggtgaaatttccttttaggaatctgaatctctaaataaattttcacacatttgcagttttaaaatgtggtgcaccttgcccccgcttctcttacacctataaatttggagggaaagtgctaaatttctgcaaacgtcaagtaattgttataaatacaatcagcagcaaattctcaatacacttagcacttctgtagtgttttatcacactcaaaaaccttatttgcaaaaactgaacactcacatatatgtaggaccaattctggttgagtcctactatgaaaccaatactgttttttttttcttggtaacacaaaaactggggtgtaggggagtgttttcctttatcggcagtatgtagtaccttcaaactagagaccaaaactgggcacttacaatgaaaaggcaattttcttatccagctataatcctaaataaggcaggatatatccaccaaattacccacaaaattcagcaaagtaaaatagctcatgggaaaacataagctggaaaaatactaataaaaaaactgaattacttcgaagtagtcatctgaatattcacagacttgttttcatttacaaatgtaagtcaaaaaagtctcctcatctttctaaccactacgaggattaaggatttaagttattcactaagttaatcatgaaaaaaatagaaaacattttaattctaaatttgtatacacaacagctaaaagacacaaggctgggaaattatcaccannnnnnnnnnn

SEQ ID NO: 21309 - DNA, 289 bp, Homo sapiens
  misc_feature 1: n = A,T,C or G
naagcacaaagtgatgaatgactgccttcaagtctcaagaaaccacttttccctaacttttagagatatttcagccctttcctgtggcctggtcctatagccaaaatcacagatattcatgagtttctacttgagtgagaaaactgggtgaaggaatagaattttaaatagtaataactgcttgttttttttgtgcaagtacatgacaaggtgcggctcataggcccccccctcttcaaggggtctacatggcaactgtgaggaggggagattcagtgtggtcccgcgt

SEQ ID NO: 21310 - DNA, 863 bp, Homo sapiens
  misc_feature 1, 2, 3, 4, 843, 844, 845, 846, 847, 848, 849, 850, 851,852, 853, 854, 855, 856, 857, 858, 859, 860, 861, 862, 863: n = A,T,C or G
nnnnagccgacccacgcgtccgggcttcaacagcccagatgagattgactttcccaatcctgccaagaagcctaaaagtgcccctggaggacacacggaatgaagtcagcagctggcctgggcagctctgctctctgtgcttgctcacctgtgtgccccagaaagtgtctctgtgacattcctgacttcctctctgtcttttctcctttctttccattcaagaaaaccctctcttagaaacaatagtagccaacatgtgttagcacctaccatgtgctggtgttgactaaggactttatatgcattcggtcctcacaatctacaaggctctccctggagtcagcagacctggcttcagtgttcttgatgagtgagtgacttgggccagtaactcacttcccccttggaagtccagagggcaacacggcctgccctgatcttgggaggcactagaggaatgaagcagctgtgcagccaggacatgtgtgtacacagtgaggggggacacacccgtgccttcccttctcctcgggctgttttcttctctcacgtggccactgtcatcccggaactactgtggcccaactccctccctgaagccctgaacccgaagggtagggattccggagcccctgccacagagactacactacttagagagtcattccaaaagacaaaggggaacctccaaaatgccttccttttcattctgaggagtctgtcccttctgtgcatatttatagtctacacgggagtgtctgatgcaactttgaattatgcaaatgggaaatagtgcacttgtgtacaatctttatattaaaaaatgtgaaataatgcaatcannnnnnnnnnnnnnnnnnnnn

SEQ ID NO: 21311 - DNA, 2136 bp, Homo sapiens
  misc_feature 1, 2, 3, 4, 2134, 2135, 2136: n = A,T,C or G
nnnncgctcttgttgcccaggctggagtgcaatggcatgatcttggctcaccacaacctccgcctcccgggttcatatgattctcctgcctcagcctcccgagtagctgggactacaggcatgcgccaccacgcccggccaattttgcattttcagtagaggcggggtttctccatgttggccaggctggtctccaactcccgacctgaggtgatctgcccacctcagcctcccaaagtgctgggattacaggcatgagccaccatgcctggccaaaaataaagaacttttaagacaaacctgaaaatcccagtaagagccatcttttgactggctttatgttactcttcagataccgtctaaaaggctcaagaccagccagattttaggtagggttttttgctgcaaagtagaagcctactgtctctagaaaagaaacgcagtacttagggatcaaatggggtggcagtggggaggaggaatagtcataaagatcaatggtcattaaaattcattccaaaacaaaactgcatatatactttggagctccacttctttgttttcgtaaataaaagaaactaattgacgagtatgtacaatgtgccaggcaccttacaagacacaaatatgctcttataggctggggaaataagaaaatatgaatgaagcaacccaggtcttgagccaaagaattacctggggtccgttgagtttcaaatctgaaaatttctgtctttcaaggtcagcatcgcccacaaaccggccgttctgaaacacagcccacaagaagacaattcattttgtggccttcttttgctctatcaaatacaaacgatctttttttcaaacaggaaaagggctttcaagaagatatgtgtggcctggagtccttgtgtcagtactcataaaagaaccattcactctttagtcttagcactttcctcaaaattgaaaatcaggcctggaactctggcagacagggtctctggaacataagaacgtaaactccacgagggcagagggttttttgggataagtttagtttagtctagtgccttgaacagtgcctggcacataacaggtgctcaaaaactatttgctgaataaacagcacagacctagataatttcccttacatgcaacctttttggaaagccataaaaatgtaaggaaagttggaagggctaagttggggggtttccaaagagctttatagtctcatgaatcttcatgcagtactaccactggaaactcccattccaggcagctttttaaagaaagaagcaagatggctatcatgtcctaatgtaaaaaacagaaatttaattaaagaaaaaagcaagagatacgagtctccctttccaagtacaaaaacaagcaccccaactcccctcaagaaaacagaaggctcaatatctttaccaacaattattagagccacagaatacattccaaaatgtcatccagaagttgctgtcttaagcagcaggaaataatctaatgacattataccacataaaaatatatttgcctgctcctcttccagtagaatagtgagatccaaccaccttgggagactcttcctccaccccactcccattacatagagtgtaatgctgcagggagaggaagttaaacattactttcaggaagaaggaagggtgtggttttactgctaagcagaagttaaaaataagagagcaaccacatactgaatcctggaattccccatgacctccaaacctgagcagtccagctttcccctttcaatataatttcatccctaactttctattgtagttcctgtaaaaatcctaggaacactgcaagcatgctgcctccctcaaattccttgatcctccaactggaattctgttctctctcaactgcaaggctcctcagtatgagggactttctctatcttaaaaaaaaaaaaaaaaaatcactcagccgggtgcagtagctcacgcgtaatcccagtacttggggaggccgaggcaggtggatcacgaggtcgagagatcgagaccatcctggccaacatggtgaaaccccatttctactaaaactacaaaaatgggctgggtgtgggggcacacgcctgtagtcccagctactcaggaggctgaggcannn

SEQ ID NO: 21312 - DNA, 1929 bp, Homo sapiens
  misc_feature 1, 2, 3, 1928, 1929: n = A,T,C or G
nnncgaattggagctcaccgcggtggcggccgaggtacttctttttttttttttagatagccagtgtgtagactttattacataggcacatattaaaaaaaaaaaacataaactggttttacataaaattaaccacaatagtgcaagaggttacactgaatgagaatggatgatgaatgatggaaaatgtaaggcttggaacagctgaatcattcactggatcttgggttcatccatcctgacgcactgaaatttattacagacattacaagaatggagggtgaggaatggtgcttctctgtcatcgcctggctaaaacactgattttgattaatctcttgaatacggtagttttctccaggttctcttgttaagtagacataaaagttaaatgaatgctggcttaaggtcagaggagttcatatccttctcttccctcacccctatactttagaactctcacacccaacaatttgctgttgggacctgactatacatctgctttcccacaatgctctggtagaataccactggggttgctgatccaaagcacatggaggcgcaacagtgcttaaggcttcagtcatggtgtggggctagacagcatccccaactagaattgagggtttgatctgtggggtaacacgagcaagcaggaagaggatgctggaattccttactctgtccagttggaatcaatccaacacatctgactaccacaaatacaaccagaaaagaaactaaaattacacactcaaacataccatgaaagagatgctattttgtagcttgtacatagtttaaaatttttttaactacaatttgatgttactaagagacaacgaggatacagaggggactgtcccttttctctcatctggttttgccataacttacaaatagtcccaggatgtttactgagtgtcctccttcaattttcacaatattttatacaaaatgacaaatatatatatacctcattgattatcctatcatccccagtacttggagggttagacctacttctgtgtcaggtagcacccaaatcctaacatctattttggagacctgtctgtgcctcttcatgctcacaccattgttctgatagatgatgccagtggaacttccaaagaagcattccacctgatcttcaccaccctctttgatcctctttttaaatctgtgtgtggaaggcaactgcaatatagaggatttggaaggttgtctgtttctgttgtctggggaaatgataaaaaaaaaaaaaaaaaagagagagatgtgaaaaggaaaaagatggaccaggtgatttttccaatcttcaaaatttaaatttcttggttcttataaacataggaagagtcactgaaaggtggcaccaatggatattttgtaaaataacccacaactttagagctggaaaggacttgaagaaacaattaatccaacttcctcacttttttgtctcaggaaactgaagcccaattgggaaaacagcaacttacttaacatagtgattgtctccatggctatgtcctgtaaagattcacagaaaccccaatttccccttaataaatccattatggcatgcctatgagtgactttaaataaacaatcctcaatgtcctcgtgtctagcctttcctccctttagggaagctggctgctaacacagcacctgaccagagtagacatttgataaatatttgttgagttgaattaatcctgccatctatccctttttactatgcaatctttatttttcctggagcttcttacttttaactttaagagatggcttctagttcaagtattttgaggcttggtaccccggccgcgaccacgcccagggtgaattgcggttgtttctcctcacaggaaacaccgtatggccctgattactggccgtcgttttacacacaggaaacagcnn

SEQ ID NO: 21313 - DNA, 484 bp, Homo sapiens
  misc_feature 1, 2, 484: n = A,T,C or G
nncagaaaaagggatgtagaaaaaggttgctgaatggagtaatttcagtgttttgcacaggaatggctcttttttctttttctggtccgtatgacttttgctttaagactattgctcaagctattttgtaagtttggggttctcccacacaagtagattgactaagcattggttaaaaggctaggcacctgagtaccacttacatgttttactttccaagttccaacctaactacttataaacttgcaagtagttatgaattgtgggttacctatagtcaaatagtagggtttttttttttttcagtcaattggaaatgaaagggcaggtattggcaaggcttcgggactaatttaatgccattaggaaagcacaagataatgtaagggctaaaagcctcaaaaaaaaaaaaaaggtgaaatgaggagttgttgctgattggtgcaggaacctgaaagatggcacctgaaaactcaaattacan

SEQ ID NO: 21314 - DNA, 404 bp, Homo sapiens
  misc_feature 400, 401, 402, 403, 404: n = A,T,C or G
acgcgggcaacattcatatttattaaagaaatattttagagtggagctgagaagactttctgtaagaaatctttaaagcagcaaaataagtgattttgccagtaactttcacctgtagaagtcagaataaccaagcacagatcttttttcaaactttctatgatattttgactttgcttccatcctttctattgcttagtctagagattaaggtattacttctaataatagtcatttacattatttatgttgctaatctcttgatgacaagacctctacatgtgtcttgaaataaaatcaaatggctctgtgcttcatatagagactaatttccaagagcaatctcaaaagcattcagcaatggttccctttcctcagcaaagaactaactggctactgnnnnn

SEQ ID NO: 21315 - DNA, 1915 bp, Homo sapiens
  misc_feature 1, 1908, 1909, 1910, 1911, 1912, 1913, 1914, 1915: n = A,T,C or G
nacggagtctccctctattgcccaggctggagtgcaatggcacgatcttggctcgccacaacttctgcctcacaggttcaagcgattctcctgcctcagccacggcaccttgcaaatatcagctccttggaacaggtgaagttccaggtaccaatgccaatcagaggaaggcagtttggttcaggctttggagttagaaacacctgaagttgaatctgggctctgttgcttccttctttcatgggctagagcacgactctttacctctctcttggcctcaatttcctcacctgtaaaatagatgaggaagctgctcacttattattgtctcgttctgaaagcttggaaagctacatcgaagatgagctcttcattcagctttgatttgacctgtacccctggtgggggattgcactggcaacatttgggtctcagcaaaaaaaccaagcacacacatctttccttccatttattgaaaaacatctttgtaagatccattcattgaaaaacataatccatttattgaaaaatatctttgtaagatcacctgctaaatatgaaaatctgacttgaatttgtactctttaaagttgcgtatctgctctagtgggcaggacctagggcttaaaggggaacttcctttctccatttctaagaactgggactctaaaatgagaagctggttgtctgaagtaaccctgcaggtgtggttggggaaggtctgttttcttggatgaaggaactaaactaagcatatcagagcactgtcttaaccagttttatttccctggagatagaattcttttaaaaagagttagggagctggtaataggaagtgcctttcattataactacattttgcagagcttcatatttatatacaagcctcctaggtgatacactgttagcttgcagactttcctatgcttcatttctcctgttgctttcaaagaaggcaggagacacgtttaataacggagtatctggtgataagaattgcttgggcaaaccagctcatctggactctttctcagtcttggaagtgggaagaggaaaacttgtttccttcctgcttcttaaggatattctgagggtacactgatcaataacactaaatttggaatgaaaataccatgtgatgagtttagcctgctgatgcttccagtagatccttgtatagtttcaagatttaagttttccgatttcatataaatttcttaaagtcgaggaccttataagggtgcaatggatgtttgctaaatatgaaaaactgacttgaatttgcactctttaatgttgcgtatctgctctagtgggcaggacctagggcttaaaggggaacttcctttctccaattctaggaactgggactctaaaatgagaagctggttgtctgaagtaaccctgcaggtgtggttggggaaggtctgttttcttggatgaagggattaaactgagcaaatcactagaagtatgccctgtcccctgctcagaacactggggagctcaagagtgggctgcaatgtgcacccctcaggaatagctgtgaattgcaggtctactggctttttgctttttgtcttttgctgcaaggtaccccacgtacttaaccattctcaacagtgtaaatcagtgtcattttagaatgagatactcagcttgcttctaaagtcactgaattactgagtgagtctctcctttagagtcttcggcaaccaaattccagaattgaagagtctactactcagaggcaacaagattaaaaaaagaaaacacaaaaactgttgaggtgaaaaaaaaaaaccaagtgggccgtattacttactgggcgcgctttacaacgtcgtgactgggccctggcgttccccacttccggcttgaggacatcccctttcgccggtggcgtcnnnnnnnn

SEQ ID NO: 21316 - DNA, 568 bp, Homo sapiens
  misc_feature 1, 2, 3, 567, 568: n = A,T,C or G
nnncgaggtactttgggtcttcattttgaaggcttccatacttatataaaacgatgattaaataaacgtgctatgcttctcgcttgttaacctgccttattatagccgtgtcagctgtgacccttttgataggaaggaaagagatcacactatttctgcccttatagttctgatgatgaagatgggatgtctgaagcacctgactcacctatcgatgaggccctgggacaactgataaagagctggccaataaaggtaagaatttttaccaaggcgagttctgaatctctgcctgtagtttctggtcaagaactaaaggtaaaaatttatctttatatcttactctccaaatgcaggtcagcaggagatcattcgtttgaactgttctcttatgtaaatttggatttcagggactcatttgttattgatcctttcccttcaacgaacagctgtcattttcctgttttgtgtcctgagaacccaacttggcttgctgcctgtcaggacacactttggtgtgtgaagggggctaaacaaatgttggaggctcccattaaaagcttacann

SEQ ID NO: 21317 - DNA, 1822 bp, Homo sapiens
  misc_feature 1, 2, 3, 4, 5, 6, 7, 8, 9, 10, 11, 12, 13, 16, 25, 57, 66,68, 69, 70, 71, 84, 85, 92, 98, 102, 117, 123, 128, 135,136, 137, 138, 148, 164, 166, 173, 193, 203, 209, 210, 225,240, 241, 242, 258, 283, 302, 305, 318, 331, 346, 347: n = A,T,C or G
  misc_feature 348, 349, 350, 351, 352, 353, 354, 355, 356, 357, 358, 359,360, 361, 363: n = A,T,C or G
nnnnnnnnnnnnnccnggttttccnaaaaatttttccccgggattttttcccaaaantttttcccncnnnncaaatttccccanncccccanttttangggngcccaaccttttttngggaanggccnacccggnnnngggccctttntcggattttccccccnantttgccnaaaaggggggggttttcccnccaaggccgntttaannttggggtaccccccnggggtttcccccagnnnccggccttttttaaanccgccggcccagtggattttttaancccgcccccctttttgggncgnaatttgggtcccngggccccccctcngggtttttttttttnnnnnnnnnnnnnnnntntcttttaaaatgatgaaaatctttaatttttatttagttatacttgtacggacacgtgtatatacaaatacagatcgtatgggtttgtttgtgtgtgggttttttttttttacattttcttttacgtttatataatgtcagcatttcaaaacagcactcgatgagtaagtgcaaaggaactgcaaagcagggcagtacaagcacaggaccacacggagctggacttcacacccagacgcacacacaatgagtggcttcaatggggtgtcaagagtaagcatggagagcggattttgactcatgggtaacctccgacatgccagcatctattaaactgtacagacaatgggagcaagcccattgtagggagatttgtctcacatcctagcagccctggggccaatgcatgggaaaaactcagtgatgccaaaccagagacagacctgcccattcacagctctgaggggaaataaaacgtgggaggaaggcaagagacacacaaaaaataaacatactaagtaaaaggggggtggtgtaggcaaacgggggtgttggtggaggcggttttcaaaagaaaagtcagtgaccacaactctgagagcaatgaatggaaaggaggagttgaaaactgtttttctaattatttgaaaataatacaaatggctgctgccgttgctaaggcaccggagaaaaacagagtccctgaaaatccacaggtactgtgtgactcttcctttcacaacgacacagagagggaaacagccccatttaagcttcctacactgattggtttgcaaccatttccatgagtgagctgcacatgatattgataaagactcttcctgggaaaaaataaaacagtccatgaaaacaatcacaaacagaaaaccaaaccaaaccaaagtacagaactgtttctaaattccctatccttttcaaaccaacatgctggtggagaagggagggtgggccacagggctccaacatcagaccttgaaaacaccgaggacaaaatatcgatcaaaaaagtcatgttgttccaggtcccaagatgatggagtcataagattgggtgggcaatgaccacacatgagtcctgtatggagcagtgtctcagccacttgtgactctttttttcagccatggtacacattggatgtttcaaagcctcaatgcatgttttgtatcctgaaagtctattgttctcacttacaaaagacataagaatcaaattaatactttattatcaaacactatgtacaacagaggttgctaataatacagaatttaaagaacgcagttttttttttttttttaatgttttactttctctttcctctgccacccaagaaagtacagtacaaaacaatagtctaaactaacacgaactgttacctggtctattaaaggatacacggtatccactaaacagacagatcggacgcgtgggcgactccct

SEQ ID NO: 21318 - DNA, 402 bp, Homo sapiens
  misc_feature 1, 2, 3: n = A,T,C or G
nnncaggtacagaaggagagatgaagagggcgtatccaaaaggaagaggaagaggctgggtgccctgtgccccgagctcagaacttcggggggatgaccggccagtaattaggctgctttggatcacagtgcttgtcaaagctcagctgcacgttagcctccatggcctggatcttggcggcgctgtcccagtacagcatttttcataagttatatagtaaatggtctgcatgatttgtgcttctagtgctctcatttggaaatgaggcaggcttcttctatgaaatgtaaagaaagaaaccactttgtatattttgtaataccacctctgtggccatgcctgccccgcccactctgtatatatgtaagttaaacccgggcaggggctgtggccgtctttgt

SEQ ID NO: 21319 - DNA, 2284 bp, Homo sapiens
  misc_feature 1001: n = A,T,C or G
gggtatcggctattgcctgagtgtgctagagtcctcgaagagtaactgctgaccttattcactggctgtgggccttatggcacagtcagtcaccaggttagagacatgcttcacattcacctacccacaaactagtggatgataaattttggctattcagaagacgtttattataggagtatgtagattttccatagagtgctgttatgtgacttgaattttagtctcggccctgcctctgacattgtcggtggtttatcctggttccaggaaataagactagccttttcctcatgatagtctttggtggtttttaaaacagttgtttaagtcaacagatgtatcatatgcctgacactgctctacaccagtgaataatttacactctaatagggggtggtaactataaagatgataaacatagcatcttaattggagtgtgtatgaaggtggttgttacctcttcctagccacccaggctactttgggaaagttggtatgaagcattaccacttaaagaggaaccagagcttctgcccaactgtcaaccttgacaaattgtggactttggtcagtgaacagacacgggtgaatgctgctaaaaacaagactggggctgctcccatcattgatgtggtgcgatcggtaagttaattggatgtttttctgtacttccataccttcccttacaaaactctggcttaatctaatccacttatataatctgtacttcccagttacctaccagacattgatattcttcctgtggtagaattatcataggtagttccctatccgtagcagtgcctactgtcactgcccaggttgtatcaggtttgcatttcgtgcttgaactatagctggttttcactgagcacagctcttggcccttcatgttctccagataatagaatcctaatatgttccattgatactcagtgccatgcattatctgaagagattttcccccaaaacagatgtattatgtctgtccttgcggnggttctggtccctgtgtcagtcttaactctcatgaatatagaggtagtgttaagaggccagaaccctagggacgctttaaattcacttcccagcctatttaatgtccattgagtagttctggtggtcaggaaggtggttgtcttcttttgcttagcagggggtatttgagcaggaggaggcttatgctttgccgagactagagtcacatcctgacacaactcttgtcctggtgtgctagagtactcgaagagaatctactggtcttgattcactggtgggggcagtcagtgcccccgttagtgcccagatcagaaacatacataccctgcctagggatttagaaagtgggttggcagtctttcctcacgcccatcacgcagttggtacctactacagtgtattgtaaacttttttctctgttcttctagggctactataaagttctgggaaagggaaagctcccaaagcagcctgtcatcgtgaaggccaaattcttcagcagaagagctgaggaatttggccttcacgatgacaggctactttgggaaagttggtatgaagcattaccacttaaagaggaaccagagcttctgcccaactgtcaaccttgacaaattgtggactttggtcagtgaacagacacgggtgaatgcgtccgtcgaagttgcaacttcgacggacgcattcactcaagacagtagaactagtccacagcaagcaaataatgtatcaggtgtagtaaagttctgcctttttgcaaagtaacttttgttgttcagttgcagtcctggtgttagctacccaagctggctggacattgtgtcatctgagtttctttctaattcacttgttcttggttggagtgttgtgtagttagtaaagctcgcaggtgtttctgatacagccaggattgagaaccaccatgtattccctcattcccttttgagatagattgacactagatattgtgcccccccaagggtagatttttacgatgaataacactactcctcacagttgaggaagtagggactgttgtgaaaatcctggcttgtcagaatggcaacgaatacttagcagtgactgaatgccttgagctattcggagagcttgaaaagtattgactgggctgggcgtggtggctcacacctggaatcttagcactttgggaggccgagacaggtggatcacctagaggccaggagttcaagaccaccttggtccaacatggtgaaaccccatctctactaaaaataccggacgcgtgggtcgactccctata

SEQ ID NO: 21320 - DNA, 1195 bp, Homo sapiens
  misc_feature 574, 1185, 1186, 1187, 1188, 1189, 1190, 1191, 1192, 1193,1194, 1195: n = A,T,C or G
actgaatttcagtcctggctctgccacttagccgaatatctgaccttgagcaaggcacttaactttgctggaccttgggtttctcatctttaaaatggagataatttcatcttcttatgatggatctcttcagagaagtaagaataatgaagattttaaatcatcccaatatagtgaagttattcgaagtcattgaccctgaaaaaacactctacctaatcatggaatatgcaagtggaggtgaagtatttgactatttggttgcacatggcaggatgaaggaaaaagaagcaagatctaaatttagacagattgtgtctgcagttcaatactgccatcagaaacggatcgtacatcgagacctcaaggaactgagagagagagtattaagagggaaatacagaattcccttctacatgtctacagactgtgaaaaccttctcaaacgtttcctggtgctaaatccaattaaacgcggcactctagagcaaatcatgaaggacaggtggatcaatgcagggcatgaagaagatgaactcaacccatttgttgaccccagagctagcatcccagnacaaaaaagaatagatatatgggtggaaatgggatattcacaagaagaaattcaagatctctttagtaagatgaaatacgatgaatccccagctaccatattggttattggggagaaaatctccagaggtaagagtatccagaaagagctgaaataccctgtatgtaattattagtttatataaactgttttcttagtttttatcttttgaatatttgtaacatttgatacatcattttttagatttacttgcaaatagcaaatctaaatcctatgactattataagctattttaacttaacccttaatgatggatattggccaggcgtggtggctcatgcctgtaatcccagcactttgggaggccaaggcggacagaatcacttgagaccaggagttcgagaccagactggccaacatagggaaactctgtctctgctaaaacaaacaaacaaacaaaaaattagctgggcgtgttggcgcttgcctgtaatccctgctccttgggaggctgaggcaagagaactgcttgaccctgagaggcagaggttgcggtgagccaggatcacgcccctgcactccagcctgggtgacagagcgagactctgtcnnnnnnnnnnn

SEQ ID NO: 21321 - DNA, 4450 bp, Homo sapiens
  misc_feature 1, 4448, 4449, 4450: n = A,T,C or G
natcgaccgccgtcctaacaaacactaacgatggcggcgccgggaagcgaccggctgctgggcttaaggcgggagtgaccgcttaaccagtgagggaagcactgaagagcgccagtcgacgtgggtgcgacaactcgcggagtcttaggagcaaaacgtctggggcctgcgagccaggacccttctgaagccttaggtgtctatcggcgacgtgtacggtcactgcagctccggagcgcggaaccctcagccaggaggcgcggctggtcggtcccaggtcccggcctccgtaatgagagcccggaaccactctttgtgccgcagcttcgcagattcctataggcaatggaaactgatctcaattcccaggacagaaaggacctggacaagtttattaaattttttgccctcaagactgtccaagtgattgtccaggctcggcttggtgaaaagatttgcactcgttcatcatcttctccaacgggttcagattggttcaacttagcaatcaaagacatcccagaggttacacatgaagcaaagaaggcactggcaggacagctgcctgcagtcgggaggtccatgtgtgtggagatttcacttaagacttctgagggagattccatggagctggaaatatggtgtcttgaaatgaatgaaaagtgtgataaagaaatcaaagtttcctacacggtgtacaacagactgtcattgctgctgaagtcccttcttgctataactagggtgacaccagcctataggctctccaggaaacaagggcatgaatatgtcatattatacaggatatattttggagaagttcagctgagtggcttaggagaaggcttccagacagttcgtgttgggacagtgggcacccctgtgggcaccatcactctttcttgtgcttacagaattaacttggcattcatgtctaccaggcaatttgagaggaccccacctatcatggggattattattgatcactttgtggaccgtccctatcccagctcctctcccatgcacccctgcaattacagaactgctggtgaggacactggagtaatatacccgtctgtagaagactctcaagaagtgtgtaccacctctttttccacctccccaccatcccagctctcaagctctcgcctttcctatcagcctgctgccctgggcgttggatcagctgacctggcttatccagtagtgtttgctgctggcttaaatgctacacaccctcaccagctgatggttcctgggaaggaaggtggggtaccccttgctcccaaccagcctgtccatggtacccaggctgaccaggagagactggcaacctgcaccccttctgacagaacccactgtgctgccacaccctccagtagtgaggatactgaaaccgtatcaaacagcagtgagggacgggcctcccctcacgatgtcttggagaccatctttgtccgaaaagtgggggcttttgtcaacaaacccattaaccaggtgaccctgacgagtttggatataccctttgccatgtttgctcccaagaatttggagctggaggataccgatccaatggtgaatcctccagattccccagagactgaatctcctctccagggcagcctgcactcagatggctccagcgggggcagcagtggcaatacccatgatgactttgttatgatagactttaaaccagctttttctaaagatgacattcttccgatggacctggggaccttctatcgggagtttcagaacccacctcagctgagcagcctctccatagatattggagcacagtccatggctgaagacttggactcattaccagagaagctggctgtgcatgagaagaatgtccgcgagtttgatgcctttgtggaaaccctgcagtaaaagtatccttgagtcccagcagcaccccctttttgtggccccagggcataagcagcctcccatgcatcagctgctcccacccctcatcctgctctgagccaggtggaagggaggctggcttctcccatggggacccagaagtccctactcttggacctcctggagactccgtggcggcagtcaagcccagtgcccagttggagaagactcacgtgctggccttggagatgggaagaaccttcgtacgaaaaagccctcagcagggccatctgtgtgccctgcccatcaccaactgcttcccaagggtgtcatcctgttcctcctgctgccggcctcctgcctgggcctgccttgcagctggccccttccctgcctgctgtcaccatccactgtttgacattccagctggtggccaagagattggtgtggaggcagaaagaggaaggagacagtgccaggaggaagaaggaaggagtcccttagctctcttcattgtcccctttacttcctgctatcttcttctcctcttcttctctctcttgcctctatgcctgtatttctggcaatatgacaggcctgcctacccaagatcagaactccaaaaccactcccacccctgaaggtcgggagggtctgagcagccctggtggctgcctgtgctcaggtcctcagctccatgggaaataaaaatggcaccctgaatctctaggattttgtcacttggagtcacagcaaagttctcttcctcttgtccccccgttgctgctccttggttatagaacatggtaaatatttattactttcagagaaaccagatattttatagaggaaatatgtttgaggtgagttgtttttcacttggagaaggcggagggctcttcctgggacggagacctcctcctccggaggttattgagaatccgggctgctgctttgaggatcttcccaccatacagacagcgagatccaagaagagggctggccgggggcaaagtcacctcccagtgtggctgcactggaactgactaaaggctttaccttggatagttgcgtattcctggtgagagccttacatctcccacagtttctgcagagtgactgactccattctggcagcccaggaagtcctgggtgctaaatgtgatggccacatgtagtggttaggggatgttgtgtgtgtcccccaactgcctgggtacttgttcctgatccctggggctgtcctgtggagcttttcctcctgcttgggcctagctaccatctccctctaatcccaggttctctacactgccctggggtttaccagctggattggcttctggttgagaaatcaaagctgggcgtatgattgacttaacccttcaggtattgttacttgaataagtcaagtgcctagcctcacccacctatgatctgtcctttcccagcctcgctggtagtcctggtcaaggagatctaggtctactccattcctcctggcccacctggggcattcactggcagcagctgtgcttcagtggagcaggtggttctcagctgcttgttagtatactgcatgtgacactgttcccacatacaaggctgacttctgaggattggagcaggctctggcggggaccagagctctgcgtgctgctgctgccaccaagaagtgttagcagaagcagtagcagccaactggccctcctgactttggcccagagcacatgcgtggcttgctgaacccaggctcaggtttatccccaaggccccagctttgagaagggggaaggcccctggtaagttattgatgcccccatatttcagctactgctctctttccaaggccttgcatggaaaggcctagccattgtctgaggcagcaatctttggcatctacaggtggcagcagcctttcaccagggctccatctgtgaagagtctcagccatgactttgagctgagcttgggagaagtaaagcaactgttaaggccagcccttgcccctcagacctgccatgaaaggaatgagccctagactgactcctgcagcacccccgggacaggctgggaccagctgtttgtctccaggtgtcagagtccctcctcctcctccaacctctccaacctactttgtttggaaataccgagctacacttcaaaatgtattcaagggatttccaataaatttttttctgtactttaaaaaaaaaaaaaaaaaagaaaaaaaaaagaaagaaaaaaagaaaaaaaaaaaaaaaaaagaaaaagagaaaaaggacgggcggggcgggggccaagcatagaacacccccacgggaggcgccgacacatgaagcgccacactaatatgtgagaagaggggcgcccctctcgagagaggcgatactaaaaacagaacgacggaggccggctcaaaccaaagggtgtgggaagacaaaacacaagcgggggaataaggagagacccacccgcggggggggagatcgagcggccaccccccgagagtgcgcccgcgggaaaaaaaggcggcgggggaccacccatcagggggaaacaccgcgttatcnnn

SEQ ID NO: 21322 - DNA, 766 bp, Homo sapiens
  misc_feature 753, 754, 755, 756, 757, 758, 759, 760, 761, 762, 763, 764,765, 766: n = A,T,C or G
acaagtatgatagattattttctatttgctgtgggaatttaaatgtaaaataaatacaaaatacatgtgtggtttaatgaacactcaatgaagcacccgcgtacctaaatgaaccaaactatgaggctctgattagtattcaaattggaataatggaacaaaccattgctgttttagataagatgcacaaaaagaatgtggaaaactgcaagaaactactcaaaaaacttggaaagttcagcaatcaaaaagatatagcaaattatgccctaagctgcaatctacgagaagagttggtagctgtctcagagagaaaagacatctgtaatgcaatggggtctaaactgacttgtgaaaagattgtcaaagaacggtatgaaaacatgatgcaacagcagaagttaacaaatatttcaaaacaacaagctgaacagatttcaatactacagactgaagttgaaagattaagaatgaaaacatttcctgctcttgttcaaatgtaaaaacgctggcaggaaaacacaaggccaaatcaatcatttaaaaaatcatttcatttgggtaaaatgatttccttttctttcttactgggaaattgaagtagcatgtcctctgagttgcatgttttagataaaaaattgtttaattttagccttaattgtatacaaatttttgtcctgcatgaataaatgtgtaaaataccatgaattgctgtttttattcaagaataaacaagacttgaagtcagaaagnnnnnnnnnnnnnn

SEQ ID NO: 21323 - DNA, 1092 bp, Homo sapiens
  misc_feature 1091, 1092: n = A,T,C or G
acccagaagagtttgcacttcgagatcaagagaagtatctgtatcgatatcctggtggggagtcataccaggacctggtgcagcggctggagcctgtcatcatggagctggaacgtcagggcaatgtcctcgtcatctcccaccaggctgtcatgcgctgcctcctggcctacttcttggataagggcgcagatgagctaccatacttgagatgccctctccataccatcttcaaacttactcctgtggcctatgggtgcaaagtggaaacaattaaacttaacgtggaggctgtgaacacgcaccgtgacaagccaactgcagcagagaccacactggctgtgcgcagacgcccctccgcagcgtccctcatgttgccttgctaatgatgtggatgttcaggcctcacctctccaaacgactgggatctactgaaaagcttgggatgtcagcttcacagaggctagaacaggaagttaagtgggaactggactttgggggccaccaaaacgaggcctggagaaacgtcaccatatttcctcccctcctgcctaatgggaatatcagttacactgaaaaatttaacttccctgtgcctcaaaacatttagcaacctgaaccagtgactttttgtcatctctgtgctgagtttggtccaagttggtcaatctcattctgtataggcatttaacatcctacctgtgactgtctgcatcctttgctggctcttttttgcccaaagtgcaaatgcacttcttcagatttacttttcaagtgagaaggtaagagctggtctctgccactgttccaggcgagcaggctagagtctaatatacttatgctagcagttaccatttgccacattggaagcaagagacaaatcaccaggtgaatggagggtcttctgagaaattcagtccctaaaacatcttctctgccttggatagaagaacagtgtccagtggcaaccttttcatttagagaagtttttcttgttccagggcccttcagggtcaggatctgactgcaagactccccaaaatgggtacccatctccttaagttcccttctgtagcctctgatacggggann

SEQ ID NO: 21324 - DNA, 3106 bp, Homo sapiens
  misc_feature 1, 12, 2879, 3105, 3106: n = A,T,C or G
nccgcaccgggnagcgcgctcgttcgggatcgagaaggggtttgagatagtgaattcctaagaagaaaataatggattgcatattagttgttctctaagtggactcaacagtgtgcaagcttgttggaaaagccaaaagaagatggcaactccttatgtcccagttcctatgcccataggaaactctgcttccagttttacaacaaacagaaatcaaagaagttcttcttttggcagtgtctcaacaagctcaaattcttctaagggccagttagaagactcaaatatgggtaattttaaacagacaagtgttcctgatcaaatggataatacttcatctgtctgtagcagtcccctcattaggactaaatttacaggtacagcttcttccattgagtattctactagaccaagagacactgaagaacaaaatccggaaacagtgaattgggaagatagaccatctacacctactatactgggttatgaagtgatggaagaaagagctaaatttactgtatataaaatactagtaaagaaaaccccagaagaaagctgggtagttttcagaagatacactgacttctctaggcttaatgacaaattaaaagagatgtttccaggttttcgactagcacttcctccaaaacgctggtttaaagataattacaatgctgactttttagaagacagacaattaggattacaagcgtttcttcaaaatttagtagctcacaaggacattgctaactgccttgcagtgagagaatttctttgtttggatgatccaccgggtccatttgatagcctagaagaaagcagggcattctgtgaaactttagaagagacaaactaccgcttacagaaagaactacttgaaaaacaaaaggagatggaatcactaaagaaactgctcagtgagaagcaacttcatatagacactttagagaacagaatcagaacattgtctttagaacctgaagaatcactggatgtgtcagaaacagaaggtgaacagatcctaaaggtggagtcctctgcacttgaggttgatcaagatgtcctggatgaagaatctagagctgataataaaccatgcttaagttttagtgaacctgaaaatgctgtatcagagatagaagtagcagaagtggcatatgatgctgaagaagactaatgtatcacaagcagttccctccatttagactattcaaaaatttagaagagtggcaaatactattttaaaagaagaaccaagaactgtaaaacatatagaaaagagcaagaatgcacatgtataaagtttacataaagaagtttttttaagttattgagataggaaatatattcactgctgcttttaattgtattttatccaattacatttaatacactaaaaaaaatcttgttggaattctgttatcaaggcccacattcttaaatactgtgcataaattattatggtgttttgcctatatattgctccaaactactgtgtatatatgtatgtgtgttaaatcaccaattatattaatcaaatggaaattaattgcatgttactatctgggtgatatattcttctttatatctctgacatgacatattttcattaatagtttaaatcagtgaccatcataataaagataaaatttagttgagtttttaatgtttacatgtttacatctctaaataaaatttgcttatttgaaatgttaatgctctttagaaaaatgactttctagtaccaaaggaaaactacttgaaagagctgtaatcatatagctaaagtgataagatagccttgattttaaaagctgattcattaatatcaaaatactttaataagtgtcacagttattaatatgttacatttgtttagtttccacgtaatctttatctctacctagatttagtgagtttgcctctttcagaatactacctccttttgttaaggcatattctttcgaaaatatagattctaaataaataggggcttatacaaaaaagaaaataaaaagccatatatactgcaaagttcctaactggcttgactcctgacattgcatttttatttctatttgtgtgaagatgttgttatactgtattatggctgattttctttttaatatatttagccaagtgatgcactttatgataattaaactcttttgtgccaagtttaattggtggatttttttagtaagtagagttaggagaaagaattatgtagtgcctttactatttcactttctacaaaagtctcctagggtctttgagtcagctttatgaaaaaatgtttgtttatttcagctttgtgtacagtcattaaaagtgccttgtttcatttttataggatgaagttatttattttctattttcactgttttgcatattgctgttaataagcattgtaatcatgctggcattttgcaatcccagtcggtatgctttctaaaaactgagggaaacttactggggaaatagaataacaatctccatttttttctttactatctaaaagtttatcggtatcttgatgtatatatatattaaggtgtggctgtttaaaattctaatgacatatatcaacacattcaatggctgttgttaacctttgaagtaaaaaggagatcactttttaccaaataaccaaaaatttttagtctttgtcaaagtgcacaggtatgttctcagaacatttttcacaatgtgtatcagaaatatgtttgctatccttagagacagaaatgaatataacaaattgatctgcttatttattaaaattattattctagactttacaaaaggcttaaaagaacaatcatttaatcaggtaccattctgtgtcttattttacagatcttggcaatctagatatnatagtgttgccgtctgtctaagcgaccagccttttcaactgtttggaatgcgttacgttccagcgtgacaacaactggtctggtaacccatttatttaaaacttgactcataagggtacccctattgtttaaattttccaaaaaaaaggggctaatccgggacaagacacttaagcctagtaaaacggtgctgagaggttctcgttgacacaaatcttgtggctcnn

SEQ ID NO: 21325 - DNA, 520 bp, Homo sapiens
  misc_feature 520: n = A,T,C or G
accatcatctcatttgactcttgaaataaccctctgaggtatgctagaagggcatccttatccctgttttgcagatgagcaaactgaagtgcagaaagtcacacaatgagttgggcgagaaattgagtgttaaaactcctgaatgcttctagtccaatactctccccatgatactaggtatataacaagtgtgggacaatcatggttaaccaagagtatcatctgattatattacagatgcattgtgagaggtttctatgtatcctgagaataattggaaccacactctttggagtctctctcctccttggaatcacggctgcttatattgttggctaccagtttatccaaacggataattactatttctcttttggactgtatggtgcctttttggcatcacacctcatcatccaaagcctgtttgcctttttggagcaccgaaaaatgaaaaaatccctagaaacccccataaagttgaacaaaacagttgccctttgcatcgctgcctatcaagaan

SEQ ID NO: 21326 - DNA, 1033 bp, Homo sapiens
  misc_feature 1, 1033: n = A,T,C or G
ncgtccgccatgtatcctgaacacaaaatggcgacacgtggttagcattcgtcgccaacgagaaattggggtcggcccgaaagctctagaatgcacccctcttcctccccggggccttccacctccgcgagttttatgacttaaaaaagcccacaggctggtctgaaggtcggaggcctaattttaacgcgttttcctccctttaatttgaaacgggaacgcgaatgactgtaaaatgtgggcacaatatttaatctctcgcctttttaaagcttaatagtggataataggggggcagtatcaagggataatttgggtccccacagtaccaaagcatttagaaacctctgtttaatttaaggaatgagataagttactgcttttctagacttcctagcatgggctgttgtgctggagagaacgagagctacgaagagactacagtgcctctgactttttcataggacagttggccgaggaagacaaacataaagatgaagtgcttaattcaaggtcacacaatgtcggggatggacctccagatttccttactgacctgcattatcttgtggatacctgagtgaattccacaccacccattttatagatgaaaccactgagacatggagcaattgactgagtagtcactgccccacccctgcctggagcctcacacatgactcgcctcctctcagtgaccacaggagttggtttgaggggtttaacaaggctaagaaggtgagacgtggtcttgtaacacagtggttaagaatgtgactttggagccagcctgctaggggctgaattctgactcagccatttactaactgtgtgaccttaggctggagtgcaatggcatgatctcggctcatcacaacctctgcttcctgggttcaagcgattctcctgcctcagcctcccgagtacctgggactacaggcactcgccaccatgcccggctgatttttgtatttttaatagagatggtttcactatgttggccaggctggtctcgaactcctgaccttgtgan

SEQ ID NO: 21327 - DNA, 434 bp, Homo sapiens
gtggtcgcggccgaggtacagtaggaaatgtttacttaattatgattaccataataccaaaattagaaattcaaataaatatttaatggatgaatcatataaatcttagttgatgaaatagagtaggaaatgttttgaggtgggaaattaaagaaataaggaaaaataaaattaaaaagagaaagaaataagctttcctgtattaggctgactggtcccagaggcagcaacaggcacagcccagacccaggaaaaggcttggtaaacactatctaagaagctaggacacaaaggaatgtgctctggagactctcccagcactccttcaacacatggagacaaaaaacaaattttcctttgctttatggtattagtttatagattcttgttttctgtaactggtaacttcaagtattctgttttatctaagaagt

SEQ ID NO: 21328 - DNA, 1384 bp, Homo sapiens
  misc_feature 1, 489, 490, 491, 492, 493, 494, 495, 496, 497, 498, 499,500, 501, 502, 503, 504, 505, 506, 507, 508, 509, 510, 511,1383, 1384: n = A,T,C or G
ngtattggtggtgctggcaaaaagaaggtaacatgttttaagaaactatgtagcatagtgtcttaacacctcagtaaagtagcttggcccaccccttgtcagctcacagcacaatctggaggccacattggttcattgatcccagctggtgggcacctttcaagcctatcacaagaagttttaattttactaattggcatagaaccttcaatgcagagcggatcccattccctgtgattctacttattaatatggacactggtttaagaagcagttggatcaatgtggcccgtgttttcctggcacactggaaaggcaactgagatctcaggattgctttcctctccagttggccaagacaagtgattttagcgataagcagctttttaccagctttgctagctgtaaatagttggacattgtaaatcattgaatagaattaaggtgttgggttgttaaattaacaaataatcaagtgttctgtgaacnnnnnnnnnnnnnnnnnnnnnnngcttttcctctctactttcttggatttcttgttcatcagaaatgaagtgtctagcaggtactgagattgtaagcacggtgtggggatgcatcaccttcactgagtttgctttgatgatgctttgcatgttggcctttggacgacagttttatagtatggtcgattataatgccagtgctatttaggctggtgcaaaagtaattgcagtggcaaaaaccacaattacttttgcaccaacctaatatgttttaagatagtatattatgagcaaaggagaaaacgtttaaaatcatgtttattttgtaaactccaaaatgcatgttacatgtgaagtgactcactggaggaaggtgagtactttaccaagtaggcacttgggaaatgctgtgtccacatacttaggaaatggcttcagttaacactgggcttgggaagggctctcttatccaaggagcagtcttctctggagccatgaaaccagcctggcagcactggtaataaactagtctgtgaaatctggcaaagcctctgtcctgtttggatatacgcaaaactgccttttaccatttccattgctttttattacttaatctcccaactttgtgcctggtgtcttttttttttttttaaaatagaaaatttttgaggtaattatgtattcatataaaagtctttggtggatatgctttttcccacaagcacttggttagaatggcccattacctcatttgtttattttttgagacagggtctcttgtcacccaggctggagtacagtggcatgatcatgggttactgtacctcccgggcttgggtgattctcccacctcagcctcccttgtactgcgactaccacgccatgtctcaccagnn

SEQ ID NO: 21329 - DNA, 548 bp, Homo sapiens
  misc_feature 1, 2, 3, 4, 5, 6, 7, 8, 9, 10, 11, 424, 425, 426, 427, 428,429, 430, 431, 432, 433, 434, 435, 436, 437, 438, 439, 440,441, 442, 443, 444, 445, 446, 447, 448, 449, 450, 451, 452,453, 454, 455, 456, 457, 458, 459, 460, 461, 462, 463: n = A,T,C or G
  misc_feature 464, 465, 466, 467, 468, 469, 470, 471, 472, 473, 474, 475,476, 477, 478, 479, 480, 481, 482, 483, 484: n = A,T,C or G
nnnnnnnnnnnctagttccttctcatttgggtagactatgtcaaaggaaaagtctagggtcaaaggctgttgttcagattcttttgcccatggggtgttcccttgacatagcactttccccttttcctagggatgtggcttcatgagagctgagctgtagtgattgttattgttcttctggatctaaccacccagcaggtctatcaggctccgggctggtacgcgggtggggaggagacctttgatgaattcttcctctccttcccacaaaagacagacccagtgagtgaatcaggcaaagtgcttatagtgtgtgttgtgtgagcgtggccttgggaggacatgcgtgtgtcagggatgagttgaggtgatatttttatgtgcagcgacccttggtgtttcccttcctcggtggctctggggnnnnnnnnnnnnnnnnnnnnnnnnnnnnnnnnnnnnnnnnnnnnnnnnnnnnnnnnnnnnncagtggtttctacttcccctgggatgctgacccaggaatagtggacatggtcacagtcctatgt

SEQ ID NO: 21330 - DNA, 1028 bp, Homo sapiens
  misc_feature 1, 2, 3, 4, 5, 6, 7, 8, 9, 10, 11, 12, 13, 14: n = A,T,C or G
nnnnnnnnnnnnnnaaacgagggttctacggcgaaaactccctaacccctggaaatgtttgcttacgcccagatgttgccagagccatagttaccggcccttgcacgtccagtgctaaggaatcacaagtagatttgaggaaagcttcaatagaaggaatagaggtagtggaaactgattcatgaacccttctgagtaataacaaatactttaaaaaaccatatcatgagttctaatataattttcttgtctggaatcagctactttcaggatcacttgttcttttaggcttctgaacttttacactgaagactgtggcgtcatcagaaaaaagatcacaacacttggaatccctgattacctaatcctccagcagttaaggcccaaggaaacagcctctaggataccaattcatcaaaaagtgttccaggttcattctaattcaataaattatgttgagattaagttatacataatagatgttaatactaccattattaatattgttattattttcaaacctcaaagtttatttttgaaatacagattgatttttttccctaaaatgctaaagcttttacatacatacaaaagtatgacctggggtttggaaatttgctttgcagtctgggaggttgtagttaacttaaagaattttaaatgcaattagtactttcagacaatcgatgtcagattgtcatatcttattctttggggtatgaagcaaggtattttacaatgcccaaaaataactttcaaaatagtatttagcaaactgtctggagcctctttccccccaaattagagtatccaacacagatgatacacaagatataacttgaagattactgattttttaaatgcctccccagaatttacatattaaatcgattattttctccttcataatagttaccttttgacacttacacattcaccccaagtacaaattcactaattatcaaggcctaggcactattataattcgggcatataaatcttaaatccggacgcggggtcgactccct

SEQ ID NO: 21331 - DNA, 704 bp, Homo sapiens
  misc_feature 703, 704: n = A,T,C or G
acaaatgtgcatcctcactaaattattgctaagactgaccttttaataaaaaggaaaatcacaaaggaggggaaccgaacaaagatactgctttctcaaaatttggaagaccacatatacatttatatagataaagctccatgaatccatatctatacacacatatctctttagattttttttttaaaacttccgttttcctgttcttagttttattgttttagcacaaaaacaaaagcatgtgtcgaagcatcctgtgtaagccgtgctaactcctccttccattcatcttgcagtgcacagctctgagtcaaggcatcagtccttgctccacactaacaagcagcaccgcatctcctagcaccgatagcccctgctcaaccttgaatagctgtgtcagcaagacggcagccaacaaaagtccctgtgagaccattagcagccctagttccaccctggaaagcaaggacagtggaattataggtaagaagcacactgctcggtaacataatggctcgaatctcatcaaccagagcattcaccaggcacttcctcagagggttttagcatggtctgtgaaggtcagtctgccagcgcctgctctgttctttgcaggcagcactgactccatgtgtagctgagagagtggagcattggcttttacattccttgatgtttactttataacagtcagctcatttgnn

SEQ ID NO: 21332 - DNA, 440 bp, Homo sapiens
  misc_feature 1, 2, 440: n = A,T,C or G
nnatatgggagtcgacccacgccacgcgtccgtggtttcctccctcagcgccattttgtggctgcgagacccgcaaataaaggctatctccggggctgcggcgggaggagtgcgggggggggccggcggcggcgcggcctcggcctgtgtgactggcggcgcccgcgcagcctcgggctgggaagggtacaagatgaccaacgaagaacctcttcctaaaaaggtccgactgagtgaaacagacttcaaagttatggcacgggatgagttaattctgagatggaaacaatatgaagcatatgttcaagctttggagggaaagtacacagaccttaattcaaacgatgtgactggcttaagggaatttgaagaaaaactaaagcagcaacagcaggaatctgcacgcagggagaacatccttgtcatgcggctagcaaccn

SEQ ID NO: 21333 - DNA, 692 bp, Homo sapiens
  misc_feature 1, 692: n = A,T,C or G
ncacccacgcgtccgggatccacactggagaaaaaccttttgaatgcaaagaatgtgagaaagccttctgtgacaactttgctttaactcagcacatgagaactcacactggagagaaaccctttgaatgcaatgaatgtggaaagaccttcagccacagttcatcgttcactcaccatcgaaagattcataccagagtttaaaagatacaggaaggcctattacaagtgtgtttgtctttagtgaactcatagtggtgacatacctttccttttgagtataactattgagggaaatattttggccagagagatgtcttagtatctgataatttatactaactagaaacagaattgtccctgtgaaatctttttatggcaggtaatcacttgtcatccaaagaattatattaaagattcacccagtttagagccttacactgtacctgagaataatcgaggggagagacctggtggttaacatgcatttaggtaaaatgtcaggaacaactttcctcttattaatactataaatccatctcaagcatattttaaaataatgagagatggaggaaacaatctagaagataaaagaaaaagatgtgcataacttgttttcagtttccctgtttatgacagtttgtcatttggcgggttgggggatggagcagggaataagacattgaaaaagtn

SEQ ID NO: 21334 - DNA, 1418 bp, Homo sapiens
gcgtccgctttatatgattgtgcagaaaacttgcctctatttataatgaagataacttaaacagaaatatccattttgtagttatagcttctgttgaaacattgtcactaagttggaccgtttatttacacaagtattgttgagggagtgattttttcttgatatgcgtctgttttcatttattattaatttgaaagataaacagttgtgatccataatggatcatttcttatgtcttttacatagctaataatgttctctgtttatttctcatgaattcccattttgtggctaaagaccagacctttgcactatttcatcaagattattttattgaggtttggcttacatatagtagaggcaatacatagagatacgcaactttgtttttgcagctacaatacactttctcaatctcatatgtttttgtcttgtagagacagagacaagttcagcatgttgcagattgggaatagtgagctatgagaagagatttagagcctagatgagcttaggatagagagtgggctcattggcctaaataaaaagagaagaccagaagtctttgaggtctctgtctctattcatgcgcctcgtggaaaattaccttggtacaatggtagcctctaaatagactgcctcgcaagctattccagaggtcatggaacagaaagccttataaaccaaataaaaattctcaaaatacattggtttattgaaccaatttgcaatacacagtgaggaacaaggagaaagcaatgatagattaacactgttagtgtaacgtgccagtggagtggaaagaccgcaacacctgaatcctgggttttgtaatgtttttatgtcctgactcacattctgtcacatacgctttcccctaatagtcgggttacaaaaaggaccagagtggccgcttgagccagatgactcaatcagatgaaatgtgcctgaggccaacgatgtacacttgctctatagaagggtgtcaggggcaagtacacttcaccacagcaatagcttgcctattagtctgctgagcagtcatgaattttattgtatttcttgggtaaggacaggccagaatgagtgtcaccagtgggtaattgaatcaacttctcacacatactgaaggctttatatgtctcatgcatacttagtgtatcatgaatatttggtatctttgtggcttttcatatttttagtgcttcatgaatatttggtatctcttgctcctttctatctgtggtcacacatacacgctctattaactttgcctaataagtctcctaggttactaacttacttacctaaatgtaacacaatgaattccagctttctcatttgttctataccagaatgggaaatttccccaaatcagaaaatcacatcctaacaaagaagtctgtctaagacagtac

SEQ ID NO: 21335 - DNA, 743 bp, Homo sapiens
  misc_feature 1, 2, 735, 736, 737, 738, 739, 740, 741, 742, 743: n = A,T,C or G
nncaccgcggtggcggccgaggtactgctagccagccaataaaatataaactccatttgtcttagttatatagaactgtgtttccagcttagaaaaagtcaaaccaatgacttgtagaacaatctactctcattttttattcagcctctagaacatggaagctttaaaagtgaattggctaaataggcaagaccttctgaaagttaacatcttaatgattaaaaacagtagcgggcggccgccgaggtacgcacaaccgaagcgtagagtcacacttgcaacaaaaggttacaatattgtaatgggctctgtccggttctgcttgtccagctggaccatctatttcatcctcctcctctgagctgtcatttaattgctcataacagtagagatcagttgtctctggttgcaaatctaacatatattcatgcaatgtaggtgtatctccatgcatgattacagctgggtttctctacgtgttcttgatgatctgcaacaagacatacatcgaccggtccaccgaccccttatattatggaatctttgctttttgtccagatgtctttgcttttcttcaggacacagtggcttttgacagttaatacacctcacgtcgcagtaactgttgcttgcagtacctcggccgccaccgcgggggccaggaacctggcagccgcactggccgcccagaaacgtcagtggtgctgccccattcggcgaaaggttagggagcannnnnnnnn

SEQ ID NO: 21336 - DNA, 1180 bp, Homo sapiens
  misc_feature 1, 2, 3, 4, 1180: n = A,T,C or G
nnnngtagaaattaaacatattcaaggagcaagaaatgaactttcagcagtctaaattttctaaataaccaatagttgccaatctaaaatggcagagaagatgaaatttgataaactgaattttttttaaaaatccatttaccctacaggtttgcatttgtttgctgaaatttacctttttttagttatatatatgtgtgtgtgtgtgtgtaatttctgccaataaattctaaattacaaaggtaagagaaaacctagtacattactaaatatataaagtatatgttctgattatgtatacttgttctagtgtcaagtctttttaagtgggtttttaaaagtttgttattggacttgaatggatttttgagactaggttaattatttttgaggtcttatcctaaaaggcatctaaggtacatgaatggagtatggtgattttataacattttttatcagaatggaaaaagaactgtttaaaagtttgatacttttaaatagttggtttttttgcttactctggtaatgattttctacaaatacataataaattgtttttttgattctatattctgtatgcagttgaatatccattacttattctgctgtgctttaatagaatggaatgtttacaggcccttaaaatattatttttaaaaaaccttctgaagatacataccaaagtttttccaagaagattttataatcaatttaataatgtaaggtttatcagattctataatagtatagttattaaggcaattttatgttagagactattttgtaatgtagtgagtggtacctttataagaaaagtgactgccaatatatttttatagctgatctttataaattctaatgttgagtttttaatgattattttaaatgtttatatagtttagtaaaatttgcatctcaaagtatcatttttatattatgggacgttttcagattggctaatatttgcattgtaaattttgtatgcagtttatctaaaattcaaaaatactgtcagtacaccagcgtttaacatctatattccaatttgtatacagtttaaaattgtactgcaaaactattgtgtgctcttacacagtatgcatcatattgttgtctgtgaaattaaaggacatttgatagtctactgaatgtaaaatataatgcttggtatatgaatgan

SEQ ID NO: 21337 - DNA, 5893 bp, Homo sapiens
  misc_feature 1, 2, 5787, 5843: n = A,T,C or G
nnctcacacacacacacccctcccctgccatccctccccggactccggctccggctccgattgcaatttgcaacctccgctgccgtcgccgcagcagccaccaattcgccagcggttcaggtggctcttgcctcgatgtcctagcctaggggcccccgggccggacttggctgggctcccttcaccctctgcggagtcatgagggcgaacgacgctctgcaggtgctgggcttgcttttcagcctggcccggggctccgaggtgggcaactctcaggcagtgtgtcctgggactctgaatggcctgagtgtgaccggcgatgctgagaaccaataccagacactgtacaagctctacgagaggtgtgaggtggtgatggggaaccttgagattgtgctcacgggacacaatgccgacctctccttcctgcagtggattcgagaagtgacaggctatgtcctcgtggccatgaatgaattctctactctaccattgcccaacctccgcgtggtgcgagggacccaggtctacgatgggaagtttgccatcttcgtcatgttgaactataacaccaactccagccacgctctgcgccagctccgcttgactcagctcaccgagattctgtcagggggtgtttatattgagaagaacgataagctttgtcacatggacacaattgactggagggacatcgtgagggaccgagatgctgagatagtggtgaaggacaatggcagaagctgtcccccctgtcatgaggtttgcaaggggcgatgctggggtcctggatcagaagactgccagacattgaccaagaccatctgtgctcctcagtgtaatggtcactgctttgggcccaaccccaaccagtgctgccatgatgagtgtgccgggggctgctcaggccctcaggacacagactgctttgcctgccggcacttcaatgacagtggagcctgtgtacctcgctgtccacagcctcttgtctacaacaagctaactttccagctggaacccaatccccacaccaagtatcagtatggaggagtttgtgtagccagctgtccccataactttgtggtggatcaaacatcctgtgtcagggcctgtcctcctgacaagatggaagtagataaaaatgggctcaagatgtgtgagccttgtgggggactatgtcccaaagcctgtgagggaacaggctctgggagccgcttccagactgtggactcgagcaacattgatggatttgtgaactgcaccaagatcctgggcaacctggactttctgatcaccggcctcaatggagacccctggcacaagatccctgccctggacccagagaagctcaatgtcttccggacagtacgggagatcacaggttacctgaacatccagtcctggccgccccacatgcacaacttcagtgttttttccaatttgacaaccattggaggcagaagcctctacaaccggggcttctcattgttgatcatgaagaacttgaatgtcacatctctgggcttccgatccctgaaggaaattagtgctgggcgtatctatataagtgccaataggcagctctgctaccaccactctttgaactggaccaaggtgcttcgggggcctacggaagagcgactagacatcaagcataatcggccgcgcagagactgcgtggcagagggcaaagtgtgtgacccactgtgctcctctgggggatgctggggcccaggccctggtcagtgcttgtcctgtcgaaattatagccgaggaggtgtctgtgtgacccactgcaactttctgaatggggagcctcgagaatttgcccatgaggccgaatgcttctcctgccacccggaatgccaacccatggagggcactgccacatgcaatggctcgggctctgatacttgtgctcaatgtgcccattttcgagatgggccccactgtgtgagcagctgcccccatggagtcctaggtgccaagggcccaatctacaagtacccagatgttcagaatgaatgtcggccctgccatgagaactgcacccaggggtgtaaaggaccagagcttcaagactgtttaggacaaacactggtgctgatcggcaaaacccatctgacaatggctttgacagtgatagcaggattggtagtgattttcatgatgctgggcggcacttttctctactggcgtgggcgccggattcagaataaaagggctatgaggcgatacttggaacggggtgagagcatagagcctctggaccccagtgagaaggctaacaaagtcttggccagaatcttcaaagagacagagctaaggaagcttaaagtgcttggctcgggtgtctttggaactgtgcacaaaggagtgtggatccctgagggtgaatcaatcaagattccagtctgcattaaagtcattgaggacaagagtggacggcagagttttcaagctgtgacagatcatatgctggccattggcagcctggaccatgcccacattgtaaggctgctgggactatgcccagggtcatctctgcagcttgtcactcaatatttgcctctgggttctctgctggatcatgtgagacaacaccggggggcactggggccacagctgctgctcaactggggagtacaaattgccaagggaatgtactaccttgaggaacatggtatggtgcatagaaacctggctgcccgaaacgtgctactcaagtcacccagtcaggttcaggtggcagattttggtgtggctgacctgctgcctcctgatgataagcagctgctatacagtgaggccaagactccaattaagtggatggcccttgagagtatccactttgggaaatacacacaccagagtgatgtctggagctatggtgtgacagtttgggagttgatgaccttcggggcagagccctatgcagggctacgattggctgaagtaccagacctgctagagaagggggagcggttggcacagccccagatctgcacaattgatgtctacatggtgatggtcaagtgttggatgattgatgagaacattcgcccaacctttaaagaactagccaatgagttcaccaggatggcccgagacccaccacggtatctggtcataaagagagagagtgggcctggaatagcccctgggccagagccccatggtctgacaaacaagaagctagaggaagtagagctggagccagaactagacctagacctagacttggaagcagaggaggacaacctggcaaccaccacactgggctccgccctcagcctaccagttggaacacttaatcggccacgtgggagccagagccttttaagtccatcatctggatacatgcccatgaaccagggtaatcttggggagtcttgccaggagtctgcagtttctgggagcagtgaacggtgcccccgtccagtctctctacacccaatgccacggggatgcctggcatcagagtcatcagaggggcatgtaacaggctctgaggctgagctccaggagaaagtgtcaatgtgtaggagccggagcaggagccggagcccacggccacgcggagatagcgcctaccattcccagcgccacagtctgctgactcctgttaccccactctccccacccgggttagaggaagaggatgtcaacggttatgtcatgccagatacacacctcaaaggtactccctcctcccgggaaggcaccctttcttcagtgggtctcagttctgtcctgggtactgaagaagaagatgaagatgaggagtatgaatacatgaaccggaggagaaggcacagtccacctcatccccctaggccaagttcccttgaggagctgggttatgagtacatggatgtggggtcagacctcagtgcctctctgggcagcacacagagttgcccactccaccctgtacccatcatgcccactgcaggcacaactccagatgaagactatgaatatatgaatcggcaacgagatggaggtggtcctgggggtgattatgcagccatgggggcctgcccagcatctgagcaagggtatgaagagatgagagcttttcaggggcctggacatcaggccccccatgtccattatgcccgcctaaaaactctacgtagcttagaggctacagactctgcctttgataaccctgattactggcatagcaggcttttccccaaggctaatgcccagagaacgtaactcctgctccctgtggcactcagggagcatttaatggcagctagtgcctttagagggtaccgtcttctccctattccctctctctcccaggtcccagccccttttccccagtcccagacaattccattcaatctttggaggcttttaaacattttgacacaaaattcttatggtatgtagccagctgtgcactttcttctctttcccaaccccaggaaaggttttccttattttgtgtgctttcccagtcccattcctcagcttcttcacaggcactcctggagatatgaaggattactctccatatcccttcctctcaggctcttgactacttggaactaggctcttatgtgtgcctttgtttcccatcagactgtcaagaagaggaaagggaggaaacctagcagaggaaagtgtaattttggtttatgactcttaaccccctagaaagacagaagcttaaaatctgtgaagaaagaggttaggagtagatattgattactatcataattcagcacttaactatgagccaggcatcatactaaacttcacctacattatctcacttagtcctttatcatccttaaaacaattctgtgacatacatattatctcattttacacaaagggaagtcgggcatggtggctcatgcctgtaatctcagcactttgggaggctgaggcagaaggattacctgaggcaaggagtttgagaccagcttagccaacatagtaagacccccatctctttaaaaaaaaaaaaaaaaaaaaaaaaaaaaaaaactttagaactgggtgcagtggctcatgcctgtaatcccagccagcactttgggaggctgagatgggaagatcacttgagcccagaattagagataagcctatggaaacatagcaagacactgtctctacaggggaaaaaaaaaaaagaaactgagccttaaagagatgaaataaattaagcagtagatccaggatgcaaaatcctcccaattcctgtgcatgtgctcttattgtaaggtgccaagaaaaactgatttaagttacagcccttgtttaaggggcactgtttcttgtttttgcactgaatcaagtctaaccccaacagccacatcctcctatacctagacatctcatctcaggaagtggtggtgggggtagtcagaaggaaaaataactggacatctttgtgtaaaccataatccacatgtgccgtaaatgatcttcactccttatccgagggcaaattcacaaggatccccaagatccacttttagaagccattctcatccagcagtgagaagcttccaggtaggacagaaaaaagatccagcttcagctgcacacctctgtccccttggatggggaactaagggaaaacgtctgttgtatcactgaagttttttgttttgtttttatacgtgtctgaataaaaatgccaaagtttttttaaaaaaaaaaaaaaaaaaaaaaaaaacatgttcgccgcctcggcccagtcgactctagacttcgagcaagcttatgcatgcggccgcaattcgagctcacttggccaanttggccctatagtgagtcgtaatacaattcaattgcccgtcgtttttacaacgtcntggcttgggaaaacccttggcgtaacccaaatttaatcgcctttgcagaa

SEQ ID NO: 21338 - DNA, 1049 bp, Homo sapiens
  misc_feature 1047, 1048, 1049: n = A,T,C or G
acatgaaagaattcacactggagagaagccgtatgaatgtgaggactgtgggaaagccttcagtcatcccacgacctttcatagacataaaattacccacaccgcagagaaaccttatgaatgtcaggaatgtggggaagccttccgttatcctgttgcttttcgtagacataaaattacccacactgcagagaaactttgagtgtaaggaatgtgggaaagccttctgttatcacagttcccttcaaagacatgaaaggactcacaacggagaaaagttgtgtggatataaaaaatgtaaagccggctgggtgcggtggctggcgcctgtgatcccagcactttgggaggccaaggcgggcggatcatgaggtcaggagattgagaccatcatggccgacatggtggaaccccatctctactaaaaatgcagaaattagctgggcgtggtggcgtgtgcctgtggtaccagcctcccaaccagctgggattgcaggtgcccgcaccacacccggctaattttcgtattttggaagagatggggtttcgccgtgtggccaggctggtcttgaactcctgacgtcgtgatctgcccaccttgactcccaaagtgctgggactacaggaatgagccaccctgcccggcagaattttctttcaggacatcaggaggatcctctgctggaaagaacaaaatctgattgcagatgttgcctccttggggtggaagagtctcgctcctgttggcaggtggagtgcaggggacagatctcggtcctggaaactctgcatctggggtcaagaattcctctgactcagctccgagtagtggaactatagatgtgcaacattaccagctatttggatttcagtaacaacgttcacacgtgaccagagtgtactttgaccagatccaacgcggccaaggggtaaggatagcacgcccgtaatattatccgcaacaaaagtaagcaggtcaacaactccgcacacataaaacggatccaaagcacagggacacggggggctttctggtcgtggttatannn

SEQ ID NO: 21339 - DNA, 688 bp, Homo sapiens
  misc_feature 684, 685, 686, 687, 688: n = A,T,C or G
tcgagcggccgcccgggcaggtccgggcaggtacgcggggcaggagctacggccggaagatggcggcggccgcagagttgtcgctactggagaagtccctgggactgagtaaggggaataaatacagtgctcagggcgagcgacagattccagttcttcagacaaacaatggtccaagtctaacaggattgactactatagcagctcatctagtcaagcaagccaacaaagaatatttgctggggagtactgcagaagaaaaagcaatcgttcagcagtggttagaatacagggtcactcaagtagatgggcactccagtaaaaatgacatccacacactgttgaaggatcttaattcatatcttgaagataaagtctaccttacagggtataactttacattagcagatatactattgtactatggacttcatcgctttatagtgagtatttgtatagttactggctttttttctgtagtgttgagaatgatttttaaaactttgtcttgaatttaaatcagatttgcatttttggcttatcaaataaaaatgaaaggaattcctttatacaaggtgccttttgtaacaaccctgcacgttgtgcacatgtaccctaaaacttaaagtataataataataaaattaaaaaaaactttgtcttgaatttaaaaaaaaacctcgnnnnn

SEQ ID NO: 21340 - DNA, 1856 bp, Homo sapiens
aatgtgcccaagactagggtggggaaggccccagacagtgagtgaacagaatgccattttgcacccagttgccttaggtggtataactgatataaggacaaatacccagactatggaaaacccactggcaaaaggttaactagaaaagaggagaattaaatgcataaccagtgcagagtaactgcaaggcaccaagaccacatccaaccagcccattttcctcctctccaccactgaatggatctgggagaaagcattagtaacagcactcatcaactgcttccctggaacaaaacatgacaaaacacacggaaggttttttcattatggttctcggtgtactttattctcctgctgtctagctaagcagcccacacaggacagaaatgggtagcactgaggaatgatcagattttttttctatccccaatatttctgccccctccctaagccctgacccaaccctatcttaataatcacgaatggttagtacatcattctgtctctcaaagaacaactgaaatggaaacaaggcattagaggaccaggcctcttcttaatagggcttaggagctggtatgagctctttattcacaatggagcgtctctccttcaaatacctggatttttttttttttgtacactggttcatagatcggcacttgactttgaacctggcaccaaaaggcacaatatctgataccctgtacaagagctattagagatgctgccatatggatgggcaaaactgagccaatcccacttaggaatggaaggcttggacatggaagggaggatataaacgaggagttggagaaaaacgcaagcccagtttttgctagagtggaaatgaaagtgggaatgagggtcttgtttttagtcctctaaggaccaggaagcaattttaaaacttccttggtttttctgaaagcagcatattcaaaatgccagcaaaaactcctaacaactgcaaaaccaaaagaggatcaaagctcaccaacatcccttcttattgctgaaaggctctaaaattcaggatgccctgttcccttgtaaaagggaaaataattaagtctgatttatggtaatcataccacatcacacttctaaaaaaatattcaagtgtgtgaccaggggacgtttgacaccattttattaaccttcaacttcagtggaaaaataaaaccttttccaagtgccattttcatcacaagacttctagttagtgtgtgtgtgtattcacacacacacacttttttttgtttttgttttgttggttgcttttgaagtgcagcaagagaccaataccgcattgtagtcaatcaaataaaagaacagaaggccaagcagtttccaaatggttattttatcagattgtttgaacatttaatttatcctgtttgcaatccaaaatagttacctgaagtttgctgttttgtgtgtatgtgtttacttttattgtatatttatttttctaaactctttggcacaattttctgggggcgttcagactgccacaatacaagtcaggagagggcgttttctttgtgctgccaattctgatcatttaaattttggtttgtttgggttgtgatttttttgtttttgaagtctgcgttatttgtaacaattgtacttatatttttctatatcctctaacgccagagttttctttttctcccccctcccccccacttctacattcacagttgaaccatattattaggaaaggcgccttgatgaaaagatcaggataggagctctgaccattcgtcagtgttttccctagagtaaaaaaaacaaaaaacaaaaccaaaaaaaaaaaacaaaacaaaacctaaagagcgtctttcctc

SEQ ID NO: 21341 - DNA, 2000 bp, Homo sapiens
gacccacgcgtccgggccgggaggaggcagggctggatccctcagccgccgccgctcctcctcctggcaggccggccgcggagtcagctgacgccggcgctccagcctcgcctccccgcgccgcgctctgcgctccccgaaagtggctgcaagccggccgcccactgtcagggttggggggacagagaaagtgatgtgcgccttctaaagcctcgcccagcgccgccgaagcagcttcacctctccaactttctcccaccgactgcttgtcttgaccctgccctccaccctccccagagccacttcgggtgcgcgctcttgggtaaagggggggtcaccggctgtctgggatggcttccaattttaatgacatagtgaagcaagggtacgtgaggatccggagcagacgcctcgggatttatcagcgatgctggttagtattcaagaaagcttcaagcaaaggtccaaaaagactggagaaattttctgatgaacgtgctgcatatttcaggtgttatcataaggttacagaactcaataatgtgaagaacgtagctcgattgccaaaaagcaccaagaaacatgccatagggatttatttcaatgacgatacctccaagacttttgcttgcgaatcagatcttgaggctgatgagtggtgcaaagtactccagatggagtgtgtaggaacacggatcaatgacatcagccttggagagcctgacttactggccactggggttgagagagaacagagtgagagattcaatgtgtatttgatgccatctcctaacttagatgtacatggcgaatgtgccttgcagattacatatgagtatatctgtctttgggacgtccagaatcccagagtcaaactcatctcttggccgctaagcgccctgcggcggtatggacgtgatactacgtggttcacttttgaggcagggaggatgtgtgagactggtgaagggctgtttatctttcagacccgagacggggaggccatctatcagaaagtccactctgctgccttggccatagccgagcagcacgagcgcttgctacagagtgtgaaaaactcgatgctccagatgaagatgagtgagcgggccgcctcgctgagcaccatggtgcccctgcctcgcagcgcctactggcagcacatcacacggcagcacagcacgggacagctctaccgcttgcaagatgtttccagccctctgaagcttcatcgaacagagacttttccagcctacagatctgagcactgacagtaactgccaagaattgttaacacacttgtgatgtgtcagccacagattcacccaggaggtcacagaatgacagcaagggaaatgacgaccaagagaagaagcttaaagtcctggctaattgtgtggtcattggaaaactctgcaatacaataattttctttattttctttttcttttttaaattcttagtgtaattgaaacgtgctctatagatattgactctgtgttccctcttttacagctggacagaaagaagtcaatgtcacgaaatgattttctattgtagatactttgtcccttgcacttctctgaatctgtccttttgtggattcttgtgattttccttccaagtgtttcagttgtatgacagtcagtattgacaataaaatggcttttaattatttgttatttgtttacaccctattcctcagttattattactgtggttctgattaactactggaaattatatttgattatatcaccaattagttaaatcagtgcttcgactcactcttatctgttctgttcaaaactatttgttcaaagaacccgttagtattgtttacagggttacagtttctctcacatgctttcctcacccctttacccccctttttgaaagcctttattttgttcggagtctcttcataaaacatttgaaaataaaagatcattcttcacccataatgagataaaaaaacataataaaagaacatagcttgt

SEQ ID NO: 21342 - DNA, 2176 bp, Homo sapiens
cgcggtcgcgtcgtctcgtgggcgtcttctgccttgggccttgcgctgtgtggtgcgtcgtgcctcggagcatctaggggttgctctcggcttggctcgtctcggtcggtgcggtggcgctctgcggtgtgccgtggctgcgccgtcgcctcgctcggtgcgtctgtccgttcgtccctgctgtgtctcggtgtcgtttgctccggtctgctgccctagtctgtctcccgggctcgcgttcggttctcgtgtcttcgtgtcctttcgcttgttagtctgcgtcgctctgctcgccttttctgcttccttctcgtccccctcttcgtgtgctcgtctgttgtcttcgtcgtcgtccgctgcgcccctttgtttcgatgtgtgggttggctctttgtcggtctgctcgttgggttgggtggtttgtgggcgtcggtgctggtcggttgttgggcggttggtgtgatgcgaggctggcgtcgtctgtgtcgaggctgggtttttctcctgcggacgctgccctgtgttgcttgggcgttgtggttttgctgaggtctgtgtctgggcgtctgtagtctcgttgtgtgttgctttcgctgtttggtcttccgtctttatgaccttgatgtggttgagttgggtcgtcgggtcttgtgtgtgatgtctccggtaccggcttgggtcgcgtctctctcgtggtgtgttgtcctccgcgtgtgctcagtggttgtctctctcggccattccttcggtgttacgttgcgtctgtgtgagcgactgtcgccttggtctttggtggtcggtgctgagatgtggcgcggcccatgggggtggcaaagatctggcggtaggttatggcgggtgcgtctgtggtcgtccctgttggtgttttttgtgggtgtagcgttgtgtctctttgtgtgtggcttgtttttttttttttttttttttttttttttttttttttttttttttttttttttttttttttaagcacatagctacatatttattaaacaggaaaacatatatagagaaatttaccctcaataatcagaaaatatacattcttttcaagtacaactggaagcattcactaaattaactatgtactaggccacaaagatgcaacaatatactccaaaaagttaatatcatgcaaatcatgttctctgacaataatccaatatagaaagaaagcaatgatacaatgttaaaagaatataccagcaaactaaatatctaagaaaaccttcagttaaaaggaaatcatgaaagaagttaaaaaacacaaaattaaataacaatgaaaacagtaccagtcaaaacttatgagaaaagtctaataaagcatttagggaaaaaattatatctttaaatatcttattacagaataaacatcgaaagcaaatcaagcatttaagatgttgcttattttatagcaaacacaaattaacaacgaagaaatgtttaagatgaaagcaggaatcaacgaaacatgtcagagatttaacaaaactaaaagctgattctgggagattaatataataggcagaactggcaaagctaaccaaaagaaaagcagagatgcaaaaaaataaaatggaagaaatgcaaaattgaacaattgccacattatgagaatggcaaaaattaggcaaatgaagtactggcaaggatgtgaggaaatgggtactcaactcagtcctgctggtaggggtgtaaactcacaatcgttctgaaaagtacataagtacttagtgaaatttaccagagaaattcttgcatagttctgtaagtgaataagttaaatgtggtggatacacactgaagaattaaatgtacacagagcaatatgaacaaatctccaaaatatagtagtgagtgaaaactaagtaacagcatggaacattagaggtagcacatcctacataccaagttgtcaaatatacaatccctgtacacctttattttttgagacagtctcactgtcacccaggctagaatgcaggggcacaatcttggctcactgcaacctgtcttctgggttcaagtgattctcatgcctcagccaccaaagcagctgggattacaggtatgtgtgccaccacatccagaaaactttttgttttagtggagacggggtttcaccatgttaccagactagtttcacggacgc

SEQ ID NO: 21343 - DNA, 950 bp, Homo sapiens
  misc_feature 950: n = A,T,C or G
acctttttcagtaatcaatagaccagttagaacacctcagccaaaaatagcagaatataaattatttttgagctctcacagaactttgctgagatacattataacctgggccataaaacaaacctcaaccaattaatacagttgaaaccagagtgtgctctctgaccacagtagaatcaaactattaattagtaatataataatgaaaatctccacactcttaaaaataaacaacatgcttttaaattatccatgattagggaagaagtctcaagagggaaagaaacatagaactgagtgtaaaggaaaatacgacatcaaaatatgtggaatgtggctaaagcagtcctgagacggaaatctgttgcactaaaaactgaaagaaagatgggttcaagtcataacctaaaggtctaaactcaagaaactagataggaaaaaaaggcagaataaatgcaaagtaagaagaaggaaaaacataaaaataagagatcagtgcaattgaaaacaaaaacgatagagaaaattaatgatacagaaatctggttcttacccaaaaattcagcaaaattaataaacctctagtgagactaataaagaaaaagaagacacagttgcatatcaggaataaaaagaattattgatacagattgccaaaatcaaaaacgcaaatactatgaataaatctccatatgtaagtttgacagcttggatgcttgtcgcccaggctggacagtgcagtgatgccaactcagctcactgcaacctccacctcctgggttcaacgtgattctcatgcctcagcctcccgagtggctgggattccacggtgtgccacaccacgcctgatgaattttgtatttgtcgtggagacggggtttcaccctggtcggccagtctggtctcaactcctggccttggtggctggcctctttggcctccccagtgcn

SEQ ID NO: 21344 - DNA, 2016 bp, Homo sapiens
  misc_feature 1, 2, 3, 2007, 2008, 2009, 2010, 2011, 2012, 2013, 2014,2015, 2016: n = A,T,C or G
nnnaatctgaaaaccttaaactaatgaatattatttctgctgctaaaaatatgaaactttctggtctgtagttgaaatttgtatgatcctctagacttgggtatacttttcatctggtgccattaaagcatctctaatattgatcctaaatatttgtaagtccatgagcagtgaactttggaataagtttctgtgtagatacccaaagtttaataattatgagagcacctgatttgatagacagaaaatacagttctttagtcaaaacacaagatctgaattttgttcaggtgctagaccatactaaatgtatatatttttaattatagtgatttgtttcatgtttttagattggctaattctgtaattttttccccaaaaacatgtgaagaaaggaaaagtaaattaaattccttagaactgttttaggttaagattctctgtgtctgcccatattctgcagtccttaacttgttttcaactctttacctcactcatgaacttgtttttacccatttgctgccaaacataggtgtgttcccttcaggagaatcagcatatacaggttatgataggctcccaccatttatgcttcttcactgatagggttgcattactttctgcagcagactataatacttcatatagtactgctgtgtctcaactggaaaggtcaggaattttaatgttacgttgtggtctttgaaaactgttaggcctagcaatagataaatctcaaaattaattttaaaatctgtattgacaagaataggtaaaattatgaccaggaatcattgttacccttagttccaagaggtggtttttgaaagagcaagaggaaagaaaaaagaaaagaaggaaagaagaataaagaagagaaacgtgtaagaatggtttgcagattgattggttaaaagtgtttttagcacatccccaaccctgaaaacttcgcattaagagccaagcacaatgttggtagctccaagatattctgactgtgttctcagaatgagggattacccatcactgggtattccttcccaagtagaaactttagattttcactggtaatacacattgccaagttttatgggaaatctgaatatactgtgaaaatgcatatctggttagttgtctgctgcccagatcttatcaataccagtaactaaccagtatttaacataaaatgatacaaataaaggcctttttctatttcagtgagggtacatttttcttgatatatatgtactttaaggatattggatctgtttatggatctgttttaggaaacagatttgcaagggataattgtatatatagtagtatttaggtttatttcaaattcatcttagggatgcctagatgcataatttttaccaggacatattgaaaatattgcaaagagatagccagttatattatcccattcattagaaattaccagtgtaactaaacataaatattccagtttagagtgcttaaacgtagctatctttcttaaggccaggagggtaactttgtggtatctaaagggcttaaatttcagaatgcagaataaattgcctttttaaaaccaagcattttgtacaagcttttattttcagttttttaactaccaaataggtgtgatgtactttagaagtaaacaaagatgttcacccatgataatggatgttaaagctcctgcagttgttcttttcgtgtttaaagggtatattctaatagtggaagcatcaaacatgtcagtgagtttcatctcattcagaaataagagattatatttggccttatttttggcatttaaagtttatattaaatgggtgcagatggggaatattaccaaaatatttttaatggtttcttaattgagttaagaaactttattcaggaatagtcggcgtatggaatggagatttttatacaatgggaaaatattaagtataaggctatatattggttgacatgtgaataaccgaactgtttttcggaaaaaaaatggggggtaannnnnnnnnn

SEQ ID NO: 21345 - DNA, 320 bp, Homo sapiens
  misc_feature 1: n = A,T,C or G
nagttgcaggaccaccatttaaagctaatacgttaatagccttcaccaagctattaggagctcctacacacatcctcagggattgtgtgcacattatgaagtttgacacgattcagctttatttttacttgattataacaatttttaagaactccatgactttgcgttatttcgaatatttaaataaacaacatttcaaattttgcgcggataatttaggccaatacataactagttttgaataaagtcagatgaagcaataattcctcctatgtgtttgaaaggaatgagtgtggttacaaagtcacaggatcccgggt

SEQ ID NO: 21346 - DNA, 2454 bp, Homo sapiens
  misc_feature 2451, 2452, 2453, 2454: n = A,T,C or G
ggtggtcccatgcaattaaaatggagataaattcctatcaactagtgacattatagccatcataacacagtgcattgcttttttatgtttagatatgtttagatacacaaatacttactattgtgttacaactgcctacagtattcagcatagtaacacattgtagaggtttgtagccgaggagcaataggctataccacatagcctcagtctgtacggtgtgtagcagcctgtaccatctcagtgtttgtaagtacactctgcgttgtttcacacaagatcacctaacaaggcaattcttagaacatgtagttaagggacacgtgactatatgtgaaaacaaattgtcaaacttcactttagtatggcaaatgttaaagaacttttctattatcagctgtttgtctgactgaaaaatacatatttttctaattcatggtgatgtaacattagtcctaattgaaaaactagtatttaaacataattatttataaagatgacacatcaaagggcttatttatttttaaattttttatttaaaaggatattcagttttagctatttttacccctcagattgtagataaagaaggcattaaatttatgtttgtctcctttttctgtttaattttaaagatatttaaaatgatataactaaaaatgtttagctggtgtatatgttttgaatacctttttcccctcagtttagtatattgactttgtactgtaaatttttctgcttttcttggataatctcaggattttcatgaggatagggggaactcaactttatttatgagacaaaatttccatacaaagctcaatctcctttatacacccacagacataatattagtttttaaaaagccaatttcttcatagttttttcccattaaattctcaaggaacacttggatctttaagcacggaacataatcatgatgttaaaaacagagaaaataaggctttataaagttaatgattatcatcagtatgaatttaaggtttgttttaatttcaagatttgattttttatacgtgtaattctattatctacccaagcagatctgtagtggttccaattagacttctcaaacagcaaatttatcctgattttatttgaaaagcctcttggattgatagtatagtagctcaggcattggaaactttctgcaaactgttttgggtttgcaggccagatggtctctgtggcagctactcagctctgcaatttcagtgtgaaagaagccatagacagtacttgaatgaaggactgtggctggattggccttttagtttgaccccctacattaggccccaaattttcttaccctgaggtgctgatatctgtatggatgagttatttgtcactaaagttatgagttgtgcctaaaagttaaaactgttgactgtattatgtaatgatcagtatttcagttgggaagatattttagagtctagataattatgtttgtatattgaaaaaatggtggccagtttttaagttccttaatagaagagaattatgtctcagcacatataacagtaatgctaatttattgaaactactgctgttagagcacttcttattcattgtcttttagtgaaatttatggcgtaacactttgtcagagaggaggctatataattcggagcggaaattgtctataagtaggcatttatttcatgattgatatgtcacagaaatcatggtagtaaatcacattgctatttgaataccctgtttttgtaagtttttaaaactcatattctgaaaagatttcattctcttagtgttagcttgggagttagattgccatgattaaactattatttatccttgtgtaatattagtttttaactttaacatctgtttctttttaatctataatgagctagttttatggaaaatggaatttcttactatataaagaatacagagactcattgtattagagaatcaagtcagccagctaaagtatcctactgttaaatccttaaacctaattttggaaaagagaaagttaatcaatgtatttaccttacatgttggaaagaactatgttaggtctgattcatgtgaagaagatgttgcaaaggatttatttcacaaattttaaaggagatatgagtaaaagtttttatcttttcttgactttttctcctgaacacttatgtcttagcaagtggtcaacatgaggatttgaacgcctaattgttggtaaatggttgaggcatgacaaaaatattaatatccactgtttaccatcatgttatttgaaacaaaagtgaccatgtatactatcttgcttgaagaagtctttgacagaaaaagcaatatcatgtcatttataaattttcttgttctaaagaaagcagttatatatatatataaattatgtaaataaaagttattttatatcaaacaaaaataagcaaaaagaagcacaannnn

SEQ ID NO: 21347 - DNA, 540 bp, Homo sapiens
  misc_feature 1, 2, 3, 4, 540: n = A,T,C or G
nnnncattggctaaagctagttacgtggacaagcaaaattcagtgtagaaagagatttttacaagggtgtgaataccaggatgcatggcttattgtaggccaccaaagaaacagcataccacagctattcaatatgtatttcaccagtataccacagctatttaatgtgtattggagcagtataccacatctatttaatgtgtattttaacagactaccacatctatggaatgtgtatttcagtactataccacatgtatggaatgtgtatttaaatagtataccacaactattctatgagtatttcataactatgccacaggtatttaatgtgggttaaatccatctgacacacctatttaatgtgtgtatcagcactctgccacaactatgtaatgtgtattgtcagcagctatgctacagctatttaatgtgtatttcagcagtatgccacaactatttaatgtgtatttcagcagtatgccacagctatttaatatgtatttcaaaatgcaggcagtccttgctttgcatggtaan

SEQ ID NO: 21348 - DNA, 698 bp, Homo sapiens
gtagaatttttaatgtttgtcaaacctgttgcatgaatagctttgcttttctttagggaaaatttagttttaatttccatatgggtttttaggattttgtataattaccgataatcttccttttccagaagggaaaaatgtttatatttgcattttgcattttttgatatctgtggcagacttaaggtttattttgaagcatacagcattaataattagggcctaacttagcatcatttttaaaactaatttttacacttcaaatagatgatgaacaacatgggtggtgatcaggatgtagatttaccagaagtagatggagccagatgatgtaagtctaaaaattcttttttctgtttactttcatactattagaatagtaagaaacaacatatttacaaatggttttatatagattcacaattacttcttattttctaaaaaaaaaagaaaagggaaaagcaatgtattttataaaatgtgcccatttttgacgaatgggggtatcctaattagggaactggttgtaccgtagaccattcctaaatggattagatttccaaagaatcattgtatagagacattatatattaataccgtactcaattataacagtcagtttaggccgggcgaggtggctcatgtctgttatcccagcaggccaagtgggcagagtacgtgaggtcaggagttcgaga

SEQ ID NO: 21349 - DNA, 849 bp, Homo sapiens
  misc_feature 1, 2, 3, 4, 5: n = A,T,C or G
nnnnnataatgacatggggaaagccttcctatctatgaaaaaagtaaaatatgaacctgcatatattgtcccagtcttatatgttgggagctattttaaatagtgttgctttgaacattcttatacatgtcttgtggtaagcatatatatccctttctgttggggaaatatctaggaaaggaatggcggggtcgtatagatacacatttgtccagccttagtagctattgccaattagttttctagttttaccagtttgcccattcctagcgcatgaactcccattgctgcatatcattatcgatgcttgacatgtctgttttgtgttttcatttaagccattctggtggatggcagagacactctttgtggttataatttgcatttccctgacaagtaattaacttgaacacttttctatatgtttattggttatttgactgtcttctttggtaaaatgctttgaagaggaacattttcaattatcagaagaaaaacattttatttttctaataacattccaaacaattatgatgacgctattctaaggaccatactttgagtagtgaggctttattgtagaagagctaagtgaaatgatatttgaaagaacctgcagaatttgattgtggcgtagcttttggcagtcttagagggtttgaggtgagtaggagaaatctcaaaaaaaaaaaaaagacagtgaagagattttggtaacttaaactttttattatataaatatcagatatattcaatagtagaaaagtagtaaaaataaaccctgcaggtatttgtttatccagctttcataattgtcaactgaacatttgccaattctgtttcttctgt

SEQ ID NO: 21350 - DNA, 288 bp, Homo sapiens
  misc_feature 288: n = A,T,C or G
acagatgtgggaacaaacaggtctctcaggagaggtggtcattgctcttattccaactttgcatccctatgtgagttgcaatatacacagaaagcatagcaaggaaaaaatttcctggagtaattggtgtcagtgtccagagcaggattcgttcagcctcctgagttgtcctcttcagcatcccccaggtccggggcttgtgtcatctgtggaagctgctttgttaagggttgcggttccttgggccggaacccccctagggccaaattccaccccactgccggccgn

SEQ ID NO: 21351 - DNA, 1397 bp, Homo sapiens
  misc_feature 1397: n = A,T,C or G
gcgtccggtctcactctgctgacctcaagcaatctgcctgtctcagtctgccaaagtgctgggattacaggcgtgagccaccgcccccagcctgagcctttttttttttctaatgcatccaaggttaaggggaagacgcaaataacaggactactctaaaaggaaacctgtttgaactctgtgagatcagtcatcagtctcagtattccacaggcacaccttaatttcattgtaaaaagatatatatattttgtctatttttgtgcttttgggggcctattttgtgcttttttaccttatgtagagatcttattacaaagtgattttctacattaaaaagagactgaaataaattgtatagttacttaactaatgaagacatttcagaactctgggatgattttaatcttgaagtagtaggtggtatagtcataaaaccattcatccccttcttgattgtatcttaattttctggctttaaggcgacatctgagaggtaatgcattcttttttatattgaaatcataaactatcacccgctgcttctctgagttacttttaattttgccttgtggttatggtttggcgtttccttctgtttggttttcagagccccatgtctatatagtcctgagtgcaagtaattactatacttgtaaatgaagatcagtatttctgcctagatctgataaaaaaattttcttgtcttagttataaaaattcaaagaaatgtgttacaaagatacttagtatagctcctcagccataacctgagacttgggatgaaatttaaaccagatacgatttactttgcagatcataaggctttttatactcttgttatcaaaatggcttatttttcaggcactaaggattgttaagagaaaagcttttcaacgaaggattgcctttcttctcccacactgttcttgatttcctctctctttcaggcctcaacaggcactgtattcattgccaatgttccaaattatcaaattcaagtgaatttatttgtgtgttctttacttatataaaaaaagataactttaaggatgtgcaagtacatttccaactgctagcacaaccagtattttgtaattaaacaaatcgctgtatggtatggtcttctacacatttatgtctatagatatctatcgatcatctttctattctgtttcatgactgaataatgtaaaaccagtgttggcaattggtatcatcaatgatactcattttttaataaccaaaggcaggggaaaatcattttacttattaataaatattttatgatgtgaaaacaaagccagcacaaacaacaaaaaaggggggccaaatacccggggacatgcccctttgaaggcgcccagagggcaaaaagcccgcgcacaaggcaacan

SEQ ID NO: 21352 - DNA, 570 bp, Homo sapiens
  misc_feature 1, 2, 569, 570: n = A,T,C or G
nncaatgaggtagaagaaaaggcagaaaaagcattaggtttttaaaatagttaatatactacctgtactttagcttacatcattttggataaaaaaaaattcagttttcccagcttttagaaggtaagtctgagtgaggcctttagggactccctagtctccagtttgtttaaaacaccgatgaatgaatttttaaaaacagacaagtgagagatgaatggaaaacttttatgaataaagacacaagaaattagcctttcaaagtaaagttattcataatgtataaacccatttgtacaccaccccatttgatcctactacttactgaaacttggttaatgataagatcattttctcagttttaagaaatgggattaggcatctctaagaaatatagagaagtaataacactaagagtttcttgtcttacagccactgggcaattatatattctcccatttgatcctgctactatttgctgtgtgtcaagtactatgctactatgctgagcaattacacacactactttatttaaccatgagattggtggtattatcccccggacgcgnn

SEQ ID NO: 21353 - DNA, 921 bp, Homo sapiens
  misc_feature 1, 2, 3, 4, 5, 920, 921: n = A,T,C or G
nnnnngcagatatcacaggaaacctcaaaagaagtttagttctttttttttttttttttttgtagttagaactcaactttattgttacaacgaatttttatttacagaatataaatctcttcaaaaagatacattccttcatttaatcaatggtaaaaagccttattaacagaaataaagcctaaacatcacttatatttgaactgaaagacaaacagcttcattaaaagtttatgaacacatagtgaaaatgtatttttacttaaccagttacatgaatgaggctgtttttaattttcttcactgccaacctcattttatccacagaacaaattttatttaaattaacagtagtaaaaatgtaaaacttaaattttgaacatgaaaatatgaaacaagaaaacaggaagtatcttcattatcaaacagattaacaaattctcagacagatattttctgaggcatagcaaaacacctacatcaaaagttgcattcatttaagaggtatcaatacattttcagtgctgagactatttgtagcacttacattatatacaaagcagcattatactactatggttcacatttgataaacacgaatttaagctttatgccacaatttcccaattcaacataaagctaacgcaatgacagttacccaatttcattctttttcttctgaaactgaataaggaaattatcatttaagcacatggaataatggccatgtctttttccttttaataacagtatattttaaaactcaaatacttcatatcatggaaatttgaccaagctgtacaaaggctcctaaatacagtacagtcaaaaagtttcctctttgcagactcaatttatagtcaatttagtacagataaatataggaaactacttcagattattgacaaatcggacgcgtnn

SEQ ID NO: 21354 - DNA, 907 bp, Homo sapiens
  misc_feature 1, 905, 906, 907: n = A,T,C or G
ngacaaaaaggggaattgcctcaaggcgtttaagttgggtaaccgcaaggttttcccagtccgaccgttgaaaacgacgggcagtgaattgtaaatcgcctcacttaaggccgaattgggtaccgggccccccctcgagttttttattgttttttttttcatgaacagaaagaaaagtcttttattagtactgtgtagggaaggctaaagaaatatacatttaattcagaataatttttaagaaaaaacgtggggttccaagaaatggtgatttacattcaaatgaacatgtacatttgcaaacctggataagtagatattttcatgaagcacgctacaagaaaattcacacagaattatttgtttttcaaaggcctctttcaaagtacagactccaagtccaaagcaaatacccatggcatgaacaaataggatgcctaagattctaacatttgcttcggcatggctttcctcctcacttccctacctcacaacaagaaaaaatttcctagatgggacaatggcaagatattgtgctaatacatttcataggatttctagatgctgggctataacatccaggttacaatttggtgacggatttttttatttctattgcaaatggactacactccaaacacaaaaagattcttgccatagcatccaaacatccctatgtagacccacacttcctctcaatacagaaagagaatcactcagaaaggacaaagctggcagaccaagaaaggaggcaagggtaaactctgtcactggccaattatctaaaacaaaaatagcagcctctgttatcaaagttgtcagttaaaactgtcagctgtcaggcacagtgacacacacctgtaatcccaacactttgggagcccaaggtgggtggatcgcttgannn

SEQ ID NO: 21355 - DNA, 2079 bp, Homo sapiens
  misc_feature 1, 2077, 2078, 2079: n = A,T,C or G
naggatccccactatcgctaagaaaccctcaccactaaaggcagaagagaatgaaatcattctcacccactgacccgttcccaatctgagcatggggatagttcccaaagcacatttaacagaagagaaacctgatggccttatcaatgaagctactaggcaagttgctttggcagatatcattctcattaataaaacagacttggtcccagaagaagatgtaaagaaattaagaacgacacttagatccataaatggactaggacaaatcttagaaacacaaagatcaaggtactttaaaaaagctattcctattaataacaaatcattttagttattaataataaacattaagtaattgacaaatatgcttgattctgatataagaaaggtctaagtgcatttaaaaagatttggatccaaaatgttgtttggaatgctcttaataagttagtttggcatatttggctagtacatttgcctgtcttcaaaactaagattacaaagccatgataacactgtgtaagtgtttgcttaatgaggaagaaaagacttccaaacactcgagagggtttctcagtacagaaatctgaagtatattgaggaatcttaatttgaagtgtttaaatggctttttaatatttaaaaagccttcttagtgttttatagttgccaaaaaatacatggagtctttaccttgaagttcctgacaaattcttttattaaattttgactttcattttctctaggttctgttcctaaaacatctgtgaagtgtatttctgtagattaaattctgttttccattgaatgttatcttaatttcagaaaatttctgtgcagggttattttattaagctcatttttttttttgtggtgagaaaggctcagcagctgatagactcagcaacaggcagccaggagctctgaggctcacagctggcagtctagttccactcagtctctacttgagaaattctttctttggaagtacagcagaggccttaggtgagtggcttgtctgctatggcagagattagaggtgctgccagactgccataagtgttaggcagtaacagcagcagctgcttatatgcatgtgaacagctggggaattaatttggtatgcattctcaggagccactcatctgctggcagaggtagcagaagaatgcccttagtgtaagtcctctacaaccatacaccaaatgtgctccctgcatttcaaattccattgtagaaagtctctgataatctcacttataccatgagccattcctcagtatctgtcctcttcctgttagtgttctacaattcctttctccttaatttttctccgctttacaaaatgtcacacagacaagtgcataatacttaaacaagcttttaaaaataatgctcataaatagctttggttctgtcataatattcgtatttataaacattttaagtcaattctcttcttttgttttcatttcagaaatatccatgtcctgaataaaagttgtgtcttgattagtttattatgtaacaatttagtgtgtttgacatttctaacttttatttctaacatttgctttattatagaacaataaacatgcagtgattgatttttcttacttcaagtggatgagtgagcaagtgactaaaatcttctgtgaattcttcagtgtatggtgcttgccagtgcatctgagaatctagggactttctgaaatagtacttccttgctatgaggactgaagttggattagaatccgtttcaatgaagatcagatgtcctgagtagaattcttactattgggtcctgaatcttacattaaatattctctcaaattccttgaggcatagcaacttgagcttaccagtttagaaactggagatttgggctgggtgcggtggctcatgcctgtaatcccagcactttgggaggccaaggtgggcggatcacgaggtcaggagatggagaccatcctggctaacactgtgaaacccatctctacccccaatacaaaaaattagctgagcctggtggaaggcgcctgtagtcccagctactcaggaggggggatctcannn

SEQ ID NO: 21356 - DNA, 693 bp, Homo sapiens
  misc_feature 1, 2, 3, 4, 35, 690, 691, 692, 693: n = A,T,C or G
nnnncacatcctgactagcaaaggattataggaanagtgtctttgttatcacacgccctggttggaaggaaattaggattcctagtcaccagccttttttgttattgttgagcttctgccctagtctaccagtgagaaacactcacaggacacaccttgcccttaaaaagcaatgtaggaaaatatttgattttaaaaatcaagcagcagtcaaatgcgcaagttatattgctacaaaattagcataaattctgaggaattacttttatttgttggctctcttttgtttttttcaagaataccaaagagacattaagaaaggggaaaggatttctataatagaaaaaatcaaacagacctttacttgaaaaccagctgtcccctttactaactatatgatgttactagaagtctctgaggctaggcgttggtggctcacacctgtaatcccagcactttgggaggccaaggtgggcggatcatctgaggtcaggagttcaagaccagcctggccaacatggtgaaaccctgtctctactaaaaatacaaaaattagctgggcctggtcacgtacctgtaatcccagctatttgggaggctgaggcaggagaattgcttgaacctggaggtggaggttgcagtgagacgagattgcgccactccaaaccagcctgggtgacggagggagannnn

SEQ ID NO: 21357 - DNA, 2676 bp, Homo sapiens
  misc_feature 1: n = A,T,C or G
ngcaagtcacgctggtttcattctcaatcttttcatttcaactcagtggcaaaaagctattttactagctggttgatatggaaacatcctccacttatctctcaagaaaataaacacaaatcagccaaaagtaattggtaccaaattactgaaagtacagctattccaaggcccgaattctatttacaatgctagtagtgaaaaggtcttcttaattatcagcagacagcaagttttcaagtctttttccaaaatcacattaagacttaatgttatgctgttatttgttccatcgttcaaaagaaaaatgagatgacaatctttttgtaatagtatatcctcttcttccagtcaatacctgagtaccaagcaagcagcactcaaatattgggggcagtggaaaaatggaactaccatataagcaagattaaggatggtgacaacttcacgtgcttgctgaaaactccatacacagagatttaggtcctttaaagtacacaaacatttagtttggtcacaagttagatttaatcctgtgcgttttaatttttagatgtaaacaatggcaaataataatgaccaacatataagccagaaacagagcctcacacacagaaaacttggcaccaaaactcaagatttaaaataagaaaaaaaaaaaaaaagtccattaacatactcacgtgtggtgctagaaaatttaatacgatgcacagcagctgaaatgcgttatcttacagatgcaacctacattaacaagtaagttatataacaaaccattctagccacagacacttagtgtacttgcccttattattatgtacctgatgtccaaaaaagcacaacaatttaagactttgggcactttatgtagcagatatataaaaagcaaagcaggaattaagagcaaatgaatttaataatactgatataaggcagcttttaatctattcacaggaaaaggaaaaatttatattatctcctaaatattatagcatgtaatatgaagagttaataatctcgtccattctgaatgaaaaaaactaactttaaataagttaattctatgctccttgaacgtcttaaaaaaaagaaacggttatgatttgctaggactacactttaccatatgagcagcgttacagggaataaaatagacctagtaccattattttggagattcaaactgttacacgttggtggactaaatggggtaaattattaaaatgtgcagaaatcaagaagcaacttacaaattaacttactgacaaaactgacattttatcctcgatgttaaaactaaataaccacatatacaatagcaatgaataatgattacttgtgctctatctccaggccaaaggcttataattgtttttggctaggtagctcaggctaaatacttcttctaaaaaaaatatgaaagctcagtccagggaagtcaccataatgcagggtcttgagtggtggctcttatactgagaaggaaaaacagactggcacctgagcccatctcagccacacctggtggaaaagagacacttgagggccctgtaaccaaggacagaattgtaaatacaagattctcattttttagaaagacacctactaaaaaaaaaggacatcgtgatatttattggctgaaaaatttaagctatccataaaatgaataaaacatctttgtaataaaatgttcaggaccaattagagtattatttagaaagtcattaaaaatatcaactttctaattatccactgtttgaataaatgacaagcaatttaatcatgttatgactccgtattttataatgaaagtttgttataaaaattagagttttaaatctaactccagctaagaaaaatgcacaaataactttgctttaaagcaatccactgagaatcatctcaatgttctactagtatataaaacatactatcaattgtttctacattacctttagtcacaactatacatgaagtcgcgagagtccctgcaatgtaacagtaaacagaggccatgtttataatactaaatcactatataaggatcacagcccaaactaatggcgaatcttgccaataaacttaacaaaacagaagctaagctattcacagatgattgacagcctccggtacctacacacgtcgtgcactagcctgtatggttttgctgtctaggatctattttcaatataatacagagtcaaagcaatgaaatggaaaccaaagggttaaactagttttgtgggttttatttcctccgaagtctaaatgttcacatttctgattagaataatgtggtttataattaattttcatgaattattcataacacttaaggtaaaacaaaaaagctgatattggttattttggttattatagctctatagcttacactcaacatttaagggtgaaaaccgcatccattttgttaatgctgtgaactgcagaagaaaaatttttataatataaatttttaagaaaaagttaatacaaataaatgtaacaactaaaataaatgtataatgccatggctaatgatttgcatataagatctcatttctataagaccacacgtcaacattaagattgtcctatccaagcataaataagctaactgatgtaagctgggctaaaacgaaagatatttaaaaataatgccaccagtaccagaag

SEQ ID NO: 21358 - DNA, 539 bp, Homo sapiens
  misc_feature 1, 2, 500, 501, 531, 532, 533, 534, 535, 536, 537, 538, 539: n = A,T,C or G
nncataggcaaatagtggtgcttttgaacatccttaacgtatatctttgtgtacttgtgcaggtatttctggcagtatagaaacagtaagtggacttgctggtcaaatggtagctacatttaaaaaacagtgatggctactgcttaattgtatatcaaaagagatttataccagtaactttcatacatttctgtttccttattctctcacttaaattcaacaacatcattcctcttaacatttttgccaatggtgaaaagtatttcgtatacaaatttacatattcttactcatgtggttaagtttcttacatgtatttgttgaacttcctgtgaattgcttattcatatctttttcgcactttttcctaatgagttttgttatttttctttaatgaattttaggaatgctttatgtattggtgctattaatcttcaattttacgtatatttgcatagtaattgcctacttttagctcttcgttgtcatacagacatttnntacattttatttacttaaatttatcaatcnnnnnnnnn

SEQ ID NO: 21359 - DNA, 1910 bp, Homo sapiens
atctgacggatctcattgattttggcgccttgacgcccgattatgcagccaatcaaatcgtttggaatggtgagttcatgagaagtagtctgagcagatgcatccaaacctggccaatagcctttcacctctggagagctggattcaatgccactgaatccggtgttgccatgcgtcatgggaaaatgagactgttgcattgccaactggtgcagcttggtcaaatctggctgtggaatggcatactgtccttgaatggtataggcctgaccacctgcaaagatgaccggagagctggacggcttcggccgggattttacagtcaagaacttcggtcatctttgcaggtggtcaggacaggtacagcacaggcagcgacagtgcgagctttccccacaccaccccgtccatgtgcctcaaccctgacctggagggaccacctctagaggcctataccattcaaggacagtatgccattccacagccagatttgaccaagctgcaccagttggcaatgcaacagtctcattttcccatgacgcatggcaacaccggattcagtgcaggtttggatgcatctgctcagactacttctcatgaactcaccattccaaacgatttgattggctgcataatcgggcgtcaaggcgccaaaatcaatgagatccgtcagatgtctggggcgcagatcaaaattgcgaacccagtggaaggatctactgataggcaggttaccatcactggatctgctgccagcattagcctggctcaatatctaatcaatgtcaggctttcctcggagacgggtggcatggggagcagctagaacaatgcagattcatccataatccctttctgctgttcaccaccacccatgatccatctgtgtagtttctgaacagtcagcgattccaggttttaaatagtttgtaaattttcagtttctacacactttatcatccactcgtgattttttaattaaagcgttttaattcctttctctgttcagctgttgatgctgagatccatatttagttttataagcttctccctggtttttttttttgggtttttttttttgggcccatgaatttttctgttgggtacagggaaatgttgttaagagtgtggaattatttaattacattttcagtttagttctggtaatggtcagggattttttcaaaaaatttaaaagaagtggcacgggagctttttttttggaaaaaaaaacgggattcgccacaggtgatccatggtggggtttaatccctctggtctgcgctggatattttgggaccttttatccctcaaaggaccctttctggggttttggactgggaagccttttaatcccgggtaaagagtgttcctctctctatttaaccacttctccaatcctttgttggggggccctcgatcctatttttccccgtgacctccagtgctgggtgggcccttataaaattgggtgcccaaaagatggggggataagactttccgaggactaaccgtgtcctaggggagtaggcaagccctccactagggaggggggtgggggacaggcattgacctgacttactgcataccttaacgcgggtgatcatatgtctcgaccggcgtccccgttcttgggtaatgttgggctccccttgttcgagggctgcttttttaacactagaaattccaggccttgatgtttagaacctctttatagtcctcctaacagttagaggtgttttggtacattttacctatatttaaaaggggggtgcataaaccctggggaggatgccacaaggtggggggaaattccgacctaataatcaggccagcttttcagttttgcctttttttagaacacaaggcctgggtataggttcgggtgagccccgcagaatgaacatcaa

SEQ ID NO: 21360 - DNA, 300 bp, Homo sapiens
actttgacagaggttccagtaaacgaaaacttgattgtttccttgtatattttcagcgttatgtttggtggaagaaaagtttggaggtttggacaaaagaccatccatttcctattgatatagattacatgatcagtgatacactagaactgctaagaccaaagatcaaactctgtaattctctggaagaatccatcaggcaggtacaatttttttttctttttttagtaatagagttctactaatgggaataatgggattttttggcgggggacgggaggtaacattttgctcaatttg

SEQ ID NO: 21361 - DNA, 377 bp, Homo sapiens
  misc_feature 367, 376, 377: n = A,T,C or G
acatgtaatccactgtagtgaaggcactaaaacctgttgtattttccacatttcgatagatctctcacaggatttaacacttttggaatgctcagtaaattattattgactgcttgataatacctctttgttcctgcctttccccaagtccttcaacagaagtttcttctagcactttgcaggtcagttgagtggactatttgagtccctcacagtaatgagcttgtgtgtttttgtcattcttttttctttttttgaaaaaacaatagagtcatttaaggaagcaaaaaggtccctgggtcaagatttttattttatcttttatggtggtagggtgaggtgtgagtatttagggagatggttggtnggatggcgnn

SEQ ID NO: 21362 - DNA, 1415 bp, Homo sapiens
  misc_feature 1, 2, 3, 4, 5, 6, 7, 8, 9, 10, 11, 1415: n = A,T,C or G
nnnnnnnnnnnatccaaagtggaaaatttcaagaaaggacaactcactgtacacttgagaataatacctacagaggttcatactgaagagtagtctcaataatgtaaagaatttgacaagcatgatgctattgaaatagttctgtaaggaagtggtgttctttatacatcaattattacaaaaagcagtgaattgtaagtgtgaggtgtgtttacttagatgtgaagagttctccttactgctgtgatggaataacaagggtcagatttcctctcctgccttaaacaactggaagctatacaatacgtataataggtaatggtttttagacataggacaagcacaggtttgtgatcctcaggagactgcagacagagtgaggtgagcaccatggtttctcagcctgcccccgcacggcagttcctaggttgcagttcagggaagggaaacaataaatctcgctgaattgaagagacaggactggcagttggggaggccacagcagctagaatttccaggggaaagtactggagagatgggatccttctagatacagggctcaagaagtctgctgggagtcccctgagtcctttgacttagtactgacttgcactgaggccaggaaaagaagcactggaaagcagcaggctgaacaattcctggaactcatgcagggctgggaatagtttatgttctcagcagccagagtggaaacagagtggaaacacatggagcatcaggtagaattctcagaaaggttttgttttagtagtgcagctaattaactctagattaaaagctactctggacctacagtgtccggcatccaaaaaaactaatgtgttatgcaaagaagcaataaaatatgacttataaccaggagaaaaatcagtagaaacccagaaaagacagaggtgatggaattagtagacaaggatattaaaagagctattgtaaatataaagtagaggaaaacataagattgatgaaacctgaggtataagagatatttttactggccaaaatggaacttctagggatgaaatcaacttctgattttgttaaaatcccgagtggagagattagatacagaaaaagaagaaaaaatcaatgaacttgaagagtaagaataaaaactaccaaagtgatatacagagagaaaaaaagacttagagaagaggaagagaataggaaaaccattacagtagtgtaatatatgtttaactggagtcccagaaggagaggagaaaatgaagaggcatgaagaagtatttgaataaataatggctaaagattttccaaatctggtgaaaacaatacccccacatattcaagaagctcaaatgacctgaagtagaataaacataatttacatcacagcagtgcacctcagagtcacattcatgaaaaagcan

SEQ ID NO: 21363 - DNA, 229 bp, Homo sapiens
  misc_feature 1, 2, 3, 4, 5, 6, 7, 45, 227, 228, 229: n = A,T,C or G
nnnnnnnacagcagggccgaagaaaaaatatactgcttttttttngaccttgaagccatcaataaaagagtaaaagacactatggctctatcagaagatttggacaattccattgataaaacagaagctggaattaaggagcttcagaagagtatggagcgctggaaaaatatggaaaaagaacatatggatgctataaatcatgagactagagaactggaaaagannn

SEQ ID NO: 21364 - DNA, 422 bp, Homo sapiens
actctaaagaaaatcctgaaagtcaccaccttggtcttttataatcgggaccatgaggaagcccaagaaaaagggagaaaaggaacgagaaaaaggcagaggcactaatagctgccatacaggcatataaacctctcgatcccagggagcttctcattctatgaccgactgttatcagtgtgggagcactaaaagagagtctgcccccgaaatcagaagcagcccccacggccctgtccaatctgtaagggagactactggaagacaaactgcctccagaaacatacgtcccaaggttcagagccggcttctcaaatggtccagcaggactgatgggtcccagggctctcctccccagctctgacagcccaagctgcattaccatccaagagtcccgggtgagtctggaggtcaagggactc

SEQ ID NO: 21365 - DNA, 724 bp, Homo sapiens
  misc_feature 1, 2, 3, 4, 5, 6, 7, 48, 49, 708, 720, 721, 722, 723, 724: n = A,T,C or G
nnnnnnncccctctctgtcaattctacaaaggcctacccattccctanntcccgggaacccatttaccccctttttcccccaattttggtccgagctggggtccccaataaacccccccccggtggggggaatttccccccaggggggttcccccccaagaaaattttttattctgtaggttttctttttttcttttctctttaaagtagtattttatttctctgggctgtgcacacttaaggcattagatccacagatgggctcatccgctgggatgctacttgtggtgatcatctcctaagccccacgttttagccttgtacagagtgatgtcactgcagaccctgaagtgattcagcctgcggtcatggcgttctgggttgatcaagggctctaagtcccatccaacttcctggttttcagtctgtgtctctgggtacttcttccttggtccctgggcagcatggtgaatgagattcagaaacctggcatctgcaggttcctccaggttatcatgccaagacatgggcttcctggtgactgtatgaactctcatcttgcggaggggattcacgtgatactgcgtgtagagtttctgggttcgtagctccttgaggtacagttcccgcaagatctggttctgatggacctcaactggaatcaccttctcttttgggtgtcccgccatggcccggtggctgccaagngccctcttgccnnnnn

SEQ ID NO: 21366 - DNA, 950 bp, Homo sapiens
  misc_feature 1, 2, 3, 4, 5, 6: n = A,T,C or G
nnnnnnagtctttgtacgaaggaggctctccatgcgcaggagagatattgtattctcccgttttttgacctgcctcgtctattggacagcgaatacgagaacaggttcgcacgtgttttgaggccccgagcttgtaaggtccgtcgtgaacctgatcatagactttgggccaatccctaggtaccgaattgcataaaatggccggtctcaatttgcttgccagtaaaagggaacccgcgtaacagaggggcagaaaagaagcctgagtcaacttagcatattcagctgatcgcgttaagtaaaaggatttcaccggcttagtattggacatgagagaagggacaggctcctgtttcctctaagaagtctgactgagactgtcacaaccttcgtgccatgccttccccatcttaatagggctctttcttgtctacttcctcgtagccgtgaatatgtcacccgtagtgtatatcttttctaacccttgagtgttgtgttaggtacgttattaggttatgaaaaaaaaaccattaaatcatgatatactaaccattaaataatgatacctgaaatagattcctgaggattctattatattcttacaactcactgtaaaaaacatcactggaacatattctctatgtatcacataaattcttctgatagagaaacagctcagataccttcatatctgaacatgagaaaatactggaggctgcaggtgttaagagctgaatagaactgtgcagatttaaaacatttctaaatagcaaatacttcataattgaaaattcagaaatgagcagctacaaattattgagaatttaaatgcaggctgggcgcagtggctcacgcctgtaatcccagcactttgggaggccaaggggggtagatcacgaggtcaggagttcgagagcagcctgggcacatggtgacacccgctctctact

SEQ ID NO: 21367 - DNA, 2748 bp, Homo sapiens
ctggtacgcctgcaggtaccggtccggaattcccgggtcgactactactactactaaattcgcggccgcgtcgactttttttctgtacaagatttatttcatttaccacaatgttttagagtgaaagtatatgccctaatacagaaggagtgattcagaacccaccaaaagatcaagagccaaagtcagtggctttgtatcccaggtcaataggagtttcatccgccattttgtttttcttggattaaagagatgatgtgcagaacgccctgtgctgagctcactatggcttctgacatacaagcaccactaggaacaagacttcattgcttcatccttgctctggctgtgctagtgagtggcaaaagcctcttgctcgtgcttgccctccaaatttttcataagcattcctgttactagccatagcttcccatgacttcacatttgagtaagttatcctgaagtgtgtggctgtaatattgacaaatagaactaatgagagtgaactgccatctgtttaacaaaacgcactcttctaagagaatacccagtcttagtgcatttagtacatagtcacaacattgaaatgacgtgagaatcaatacaaaatatttattttttttcaaaccacagaattcttaaccccagagccacacaataaagttctcagaattgtaagccattaacatttttctaaacaatgcagtccagagatgaagataatttccaaccagcagggatgcaatatatagtaggttcccctatgaatgaagctcaaattagcatttcctttaattctcccacagccactccatcaacagaagcagaaacagtacacatattcatgccactcggctctgaaaagaggttcaaggtgggtcaaggtgggtcttggccagtggaggaaggaaggtgtccaggactttagttaatcaacagtggggacagagaggaatgatttcccttggaaaacaacagggttcctttctcatattcttgtggccagaaactggggtgaacttcagtggggtaatgaaagaaacaggagagccatttctccaggaactcctatgacctccattttaacttctgacaaagttaacttcatttatacaatcgtattgaaaacagtaatcacaaccaaaaaggtcctataaacctgtaatagatgtcaaagggattcacattctgaactttaattttaaggaccctttaaaaggcctagacttggattaaagtaaacgtaatattccaagctaaaagaggcaccataaaaaatcaactcaaaacatccaaacaatggctagatgactaatgtaggttgttttgctttttagttgcaaagcttttcagtatctcagattagtgtatgttcataaaacaatgctcagttattttaatagctgcttatgaaacaataacagtttaactcaagggcaatgcttcttgcataataatcacaaaaataattaactgctataaaacgggaaaaaaagtagaagaaaataaagccagcctcaataataaaaaggcaaaatctggaggggttactcggcttaaaaagagattaaccaggattatttaaatactataatacaagtgctcctgctcacttctaactgcagaaaccaattttgtttgctagatcaccattacctttgctagtatgcgtacagaccaccactcggaagttatccttttgtgctgaaaaacgttcaaatcccttgtttggtcagtacagaatattgcgaggtgatgctcatgcaaactcttcctgaggaatttatgtgtgcaaatctgcaacccgacagcatggcacgcagccagggagtggtagctgcacagtgtgagcactggagatggatgtgcagtgtgcagtgttcacagccatggacatccattcttctgcaatctcatctacccacaaattagctttcactctagaccccaaagggagggtaattgctgcaaatttgttaaagggacagaagaaaaagtagcttgtctacaaaataatgcacaatgcatgcatctgggtttgtgtttcttctcactaaccttgcctaagaaccattaggataaaagtcacaacaccaggttttgctttctgccccacaaaaaaacagtagttaattcctgtcaggttagggtacaggtgtgacaacaaaaggtcacaaaatgacaatgttactgaagcttaaggccaacctttaaaacatgtaccgtctctcaaaacaattatcgatttacttttacatgtcattttttcaagatgactgacccggctttccttttaaggagccagtttcaggctgcacatacatactagacagttgaagcaaatcagccattgactaaccagacaaccagcctgcatgtacggttttgtatcttcaatgatttgggcctttagtgatgtggtacaaaacccagtatgtaattggggtagaaaaaccatatactgtactggcaagaatacaaaaaaaaaaaaaaaaaaaggccaggtgcagtggctcgcacctataatcccagcactttgggaggccgaggtgggtggatcacttgaggtcaggagttcaagaccagcctgaccaacatggtgaaaccccgtctctactaaaaacaaaatacaaaaagtagccgggcgtagtggcacgtgcctgtaattccagctactcaggaggccgaggcaggagaatcacttgaacccaggaggcagaggttgcagtgagctgagattgcaccacc

SEQ ID NO: 21368 - DNA, 533 bp, Homo sapiens
  misc_feature 532, 533: n = A,T,C or G
actcaactagtgcaaacctgcccgtcatgggccatgagaagttccccagcgacttggacctggacatgttcaatgggagcttggaatgtgacatggagtccattatccgtagtgaactcatggatgctgatgggttggattttaactttgattccctcatctccacacagaatgttgttggtttgaacgtggggaacttcactggtgctaagcaggcctcatctcagagctgggtgccaggctgaaggatcactgaggaaggggaagtgggcaaagcaggtcagtgccgaatgctatggcataaaaataacaatatggggatgaggggggatctctgggggagcctgtcttctctttactttgaactttattccacactgaaaaccatggagcagtggtgcacataatatggctcccagccagttccatctcagggttttacctgcaaaccaaatagggctgtcaggtgccccccttcccccgcacagtttgctgatagttcataaatctactgctcgggaagagaacacgnn

SEQ ID NO: 21369 - DNA, 340 bp, Homo sapiens
tggataggactaaaaatcaaaggactaattatatcaggacatcccatattcccttcactgattaagacaaaacaatggggccccttattttactttgtggagccaaattaacaaagctgaaatagaagttctccttataagaaaggctacaaacactggaaggattagtcacagtgagcaaaaatcgccgatgaacccaaagtatgcatatgagcagggattccattgggtatctataaggctggcaagagctttagaatttggttctcaaggaaatgaggtgggtaaggaatcccctcaaatgtcaatgtatcttcttaccatctcaacaatcctgggt

SEQ ID NO: 21370 - DNA, 503 bp, Homo sapiens
  misc_feature 501, 502, 503: n = A,T,C or G
cgtccgtgcaccccaaatgggatctgtgggacatgagatgccggctgcatgtgagcatcttggtaaccaaataataggaaagaatgtaggagcaggcaatcctggggcaaaagctgacgccaacgtacctattcatcttagaattgagactctgatctgtctttcccaaggccagatctacagagaaactttctgtcttgggcagaatagctggctgagacatcagagagagagactgaggaaatatcccaggagcctgttgacacacaggccctgataactaaagagaagtcccacctgggcgtggtggctcatgcctgtaatcccagcactttgggaggctgaggcgggcggatcacttgaggtcaggagttcgagaccagcctggccaacatggcgaaaccctgtctttactagaaaatacaaaaattaactgggggtggtggcatgtgcctgtaatcccagctgctcaggaggctgaggcaggaagatggcttgaannn

SEQ ID NO: 21371 - DNA, 1584 bp, Homo sapiens
  misc_feature 1567, 1568, 1569, 1570, 1571, 1572, 1573, 1574, 1575, 1576,1577, 1578, 1579, 1580, 1581, 1582, 1583, 1584: n = A,T,C or G
accacaagaccacccaagtgtaaggagcaatgcagtcgaccaccaacttgtcatcatacaagtcaagaaaaacatcgctgtcactttggttcttgtccaccatgtcatcaaccttgccaaaaagttttggagaaatgtggtcacttgtgtcctgctccgtgtcatgatcaagcgttaataaagcagactggcaggcaccagcctacaggcccttgggaacagccttctgagccagcatttattcagactgcattaccgtgtcctccatgtcaagttcctattcctatggaatgtcttgggaaacatgaggtgagtccactaccatgccatgctgtaggaccctactcttgtaaaagagtttgtggaagaatcttggattgtcagaatcacacatgtatgaaagaatgccacaaagtaaccaaaactgatggctgcactggaaaaaacaaggctggcccagaatgccttcattgtgaggaagggtgctccaagtcacggccactaggttgtcttcacccatgtattttgcgatgtcaccctggagaatgtccaccttgtgttcagatgcttagaataaaatgtcactgtaagatcacaagcctgtatgtggaatgtagaaaaataaccacagctgatgtaaatgaaaagaacctcctcagttgttgcaaaaatcagtgccctaaagagcttccttgtggtcatagatgcaaagagatgtgtcatcctggtgaatgtccctttaactgcaaccagaaggtaaaacttagatgtccttgtaaaagaataaaaaaggaattgcagtgcaacaaagtacgtgaaaatcaggtttcaatagaatgtgacacaacgtgcaaggaaatgaagcggaaagcatctgagataaaagaagcagaagccaaagctgctcttgaagaagaaaaacgaagacaacaggctgaactagaagcttttgaaaacagactgaagggtcgtcggaagaagaacaggaaaagagatgaagtggcagttgagctatcactatggcaaaaacataaatattatctcatttcagtgtgtggagttgtggttgtagtgtttgcctggtacatcacccatgatgtcaattaaaaaaagttttgatcttttaatgtaactcagattggatttagataagttgttaaatttgaaatattagaaaatgtatattatagaacatgatatatatttacattcatctctgtattctctcagctgttgttagaaggacagaatgttaaactttatcttaattagtatactagaaagggcagtataatactgttttaaagtgaaggcatgactgaaactaaaatatttcataaggcttagctagaggcagagtaacgtgtttttgttcattggggccctgtactaggtttcatttttatctaaccaccttttaaaataatgattgagaggcaattggggaggacatattaagtgggggctaaaggcttgaacggaggggtgtaaaggtgtacctatgtgaggtgataaagaaagaaaagggtgattttagccagtttgtgtgtttttgttgtgtataaannnnnnnnnnnnnnnnnn

SEQ ID NO: 21372 - DNA, 4061 bp, Homo sapiens
ccacgcgtccggggtatttgccttggtttgccgtgtgcatggtgtgtctgtcgtccacacccctcttgggcgctacccaccaatactaaccctgtgatgcgccgctttctccagtgaatctgcttgggtttggatgtagaacatagaatgataattttaaatgcaaaagttctaggaatatgaaaccaaatcttggttttcattacttcagatagatacatagtacattgtgtatcatttttgtgtaatgtggcccggactaccctgagcctgccatgccatctattttacctaattgatctgacattgaaaaccaagacctgccagaccttttcatttgctctaatccctaccacatcactaactaaccttgtccctgggcctgagatttggtaaaattattggagaattgaactatttgtatttatttttccattattagacttagtaatgaccagttgcccagggactcccttttcataaaaatgtagaaatctgtttttcctagcctgaaaatggtgcaggtgtatgctttttttcctcagtagtctttactgatgcttggcctttgaattgaaagaaatttatgtgaattatgtttggaaaaactagagatataggtcatcatcattgagaatcttctaattatattgattagatcacattgctggggtgaatggtttgaaaatgaggctgaatatgtgtacgtgtctgcttttgacttcctccaacccagtttaaaagttgaggggaaaaccacccaacctgttgtgcctccacggtgtgattttggttttttcacttaagtgtatctgggggcaccttctgacagaactttacagggataattggactattgggtaaaattttagagtcatatgggtcattatttgcctgtgccaagaaacaaagaccttgagggaaagaaagcagttacagtatattaaactgctcagctatttctagtgattactcctcatttctggggttagggctgggtctttactagatgtgtatccgctagttagtgactaagttggaggctatcaagctgacttcacacaagccagttggtttacatttaacattcttaggtctagcatgaggcattcacctctagtccagggcaggctgtggtgaagtaccttctcttataatttctactataaagcagtaaaagttgtttctcatcttagggtctggaacagaatctgacagtgatgaatcagtaccagagcttgaagaacaggattccacccaggcaaccacacaacaagcccagctggcggcagcagctgacagtgatgaagaaccagtcagtaaagcaaaacagagtcggagtgaaaagaaggcacggaaggctatgtccaaactgggtcttcggcaggttacaggagttactagagtcactatccggaaatctaagaatatcctctttgtcatcacaaaaccagatgtctacaagagccctgcttcagatacttacatagtttttggggaagccaagatcgaagatttatcccagcaagcacaactagcagctgctgagaaattcaaagttcaaggtgaagctgtctcaaacattcaagaaaacacacagactccaactgtacaagaggagagtgaagaggaagaggtcgatgaaacaggtgtagaagttaaggacatagaattggtcatgtcacaagcaaatgtgtcgagagcaaaggcagtccgagccctgaagaacaacagtaatgatattgtaaatgcgattatggaattaacaatgtaaccatatggaagcaacttttttttttcatccaacaagaagccataactttatttatgatagaaacagtacaaatttcaaaccaagctgcagttactcctttgagacaccaaaaaaagttgcttccatatggttacattgtaaattccataatcgcatttacaatatcattactgttgttcttcagggctcggactgcctttgctctcgacacatttgcttgtgacatgaccaattcaatgtccttaacttctacacctgtttcatcgacctcttcctcttcactctcctcttgtacagttggagtctgtgtgttttcttgaatgtttgagacagcttcaccttgaactttgaatttctcagcagctgctagttgtgcttgctgggataaatcttcgatcttggcttccccaaaaactatgtaagtatctgaagcagggctcttgtagacatctggttttgtgatgacaaagaggatattcttagatttccggatagtgactctagtaactcctgtaacctgccgaagacccagtttggacatagccttccgtgccttcttttcactccgactctgttttgctttactgactggttcttcatcaatttcagctgctgccgccagctgggcttgttgtgtggttgcctggatgcgatcctgttcttcaagctctggtactgattcatcactgtcagattctgtgtgttttcttgagggtttgagacagcttccaccttgaactttgaatttctcaagcagctgctagttgtgcttgctgggataaatcttcgatcttggcttccccaaaaactatgtaagtatctgaagcagggctcttgtagacatctggttttgtgatgacaaagaggatattttagatttccggatagtgactctagtaactcctgtaacctgccgaagacccagtttggacatagccttccgtgccttcttttcactccgactctgttttgctttactgactggttcttcatcaatttcagctgctgccgccagctgggcttgttgtgtggttgcctgggtggaatcctgttcttcaagctctggtactgattcatcactgtcagattctgttccagaccccttgttgttcttcgtaacaggttgcttggcagagggggttgggacagggattccagcagatttaggggtgggcatgttgacgaggaccgactggaaaggcactcccccagagattggttccgggggaatcagaggcggcagctcatcctcatcagcaggggcaaggggtttagagggtgattccaacaccagcccaggagaggacggcagaaattgctgtttaggaggcagagtgggaactggggagggagcaagaggcagagagactggtggggtgggtgctgcagagacagatgctgattcaggtttaggaaggaccttctcaaaggcagctgctgttagaggggtggacgccttagactcaggaggagccaaggggccctttggggaatgagaagcatctttgccttttgctgtctttgaagagtctttctgaacagggagtagaggggctggagccactgtggaaaggggtcctttagaaccattcttagctgagggatctgggcatataggaggtgaagtagcagaactctttttggtctgtggacctttccgagtgggagctgtgatgattggcgtgctttctggagctggggcaacaagtacttctttcagagctgtggggcctttctttgctggaagccctttagatgcttgaggaacagtggcccccattttacatgtgacagaagctggggaagtaggggagtctttgagggaggaaggagtcacaggtggggaagtgggagtccctttgggggctggagttgctgggcccttttcgggggatggaggagtcacagctggaggagtaggtgcctctttgggggaaggagaagtcacagctggtggaatgaggagctctttgggggatggggcccctttgtaagtggaaggagtcactgctgggggactggaggcctctttggaggatggggtagctggggcttctttgggggttggaattgctggggtctttttaggggagggaacagtcatagctgggggaatgagggcctctttgggggctagagttgctggggtctttttagagagaagagtcgctgttggggcaatggggtcccttctggaggatggggtagctgggacctctttgggggaagaaggaatcacagctggcagagtgggggcccccagggggctggagttgctgcggacgcg

SEQ ID NO: 21373 - DNA, 305 bp, Homo sapiens
accttcatatacccagaaatgcactggaaatcgggacattttgtttcttcgtctttaataagttgtgtttgaagtcctacattgagccaaaattcatacctggaaactgaattctagaaagattattttggaaagcctgtagttacgtgtattaccactagatgaccttccctcattattgtctctaaagtggagctgctagttatatggactttccagaggactgtaggaaatttatgaataatccctctaaagcaacaacgacaacaacaacaaaaaagtctactttatatggtgttgagtgt

SEQ ID NO: 21374 - DNA, 762 bp, Homo sapiens
  misc_feature 745, 746, 747, 748, 749, 750, 751, 752, 753, 754, 755, 756,757, 758, 759, 760, 761, 762: n = A,T,C or G
acaagtgacgaggaagattctgttttgggtatagccagagaaaacaaggatggagaaaaatctaggacagtgtcttctgagaaaccaccaggcttgaagtgtcttctcggaaaaaaccatccttggaggccacaagtgatgagaaggattctttttcgaatataaccagagaaaaaaaggatggagaaatatctaggaaagtgtcttctcagaaaccaccagcctcaaagactgcaagtgacaagacagattctgctttgaatacagctacagaaataaaggatggactacaatgtgggacagtgtcttctcagaaacaacaagccttgaaggctacaactgacgaggaaggttctgtttctaatatagccacagaaataaaggatggagaaaaatctgggacagtgtcttctcagaaaaaaccagccttgaaggccacaagtgatgagaaagattctttttcgaatataaccagagaaaaaaaggatggagaaatatctaggacaggtatcagcaaacaggtgtccaaggtgatcaattcaggactcttccactgaagagatgtgaagttgtcttctcagaaaccaccagccttgaaggctacaagtgtcaaggaagattctgttttgaatatagccagagaaaaaaaaggatggagaaaaatctaggacagtgtcttttgaccaaccaccaggcttgaaggctacaagagacgagaaagattctcttttgaatatagccagannnnnnnnnnnnnnnnnn

SEQ ID NO: 21375 - DNA, 1379 bp, Homo sapiens
  misc_feature 1, 1372, 1373, 1374, 1375, 1376, 1377, 1378, 1379: n = A,T,C or G
naatatgcatcctttgttatatagagggggagagcctttttttgatataacaatttacttgtgtgccctgtgggtacaaccgtagtgattgtatgccagcacccactggtatacccgcaggtctggcctgttgtaaaaatgcatacaaatgatatttaaaccattaccagaaaagtaaatgaagagtctacttaaggcacttcatatgaaagctaattcaaaattttcacaaaagtcacactattttataagtgtagtaaattaccttctacacattttagccagaatgctgcctttctccttacagaagaatgtgctcttaaagggagaaaaagcaaatacaaaaaattgtcattctgtcaatgttcatgacaaattatctggaactatacagattacatggcagtagtattcccgtggtcaatctgtacaaatcagggcatcttcatacaagtctcataagaaccacagcatagatttggcctgagacaagtacaagaatagcaggtaaggaattcagaatctcacaatttacaagtgagtaattaacaaaaactggctgctccattaaaaagtaaaaggtcaaccatatcccctcatccatgaaatctagtaacgaaaaacaaaaaacccacataaaatatttcttctgaggctactatatccatctctttctgcaaaccacatggcagggttattagaaggtaaatggcaggtggcagtcatagtatctttttaatgtaatacttgtaagatttccttaaaattattttttcacaattacaattatcctatttccacaatagtggcatttcaggttactcttcataactatgggggaggttatagttagatataatgataaccatgaaaacattcttcacagaaatttggttagcacatatggttatttctactgacagaaaccaaaagacaaaataaaaaaaatcccttcaaattggtactttgtttctccacctaaaggaagagaataaagactaaaataacagcaaaacatagaacagctttcgagaaacgcttaatttctatatacaggcatcagctcaatattttatgatttttctttcccattctaagggagtccttttctttcttaccgcccacgcgtccgccccacgcgcccctaccgaacccccttttttccccggggggggggccgggggggaattttggttccaaaaaaccccccttttctggaaaaaaagggtttttgggcccccccccccggggtaggggggaaaaaaggggctcccccccccccccccccttttttttttttttttaaaaaaaggggggttaccccttggggccgggggggggccaaaccccccaccccgaaattttccccccnnnnnnnn

SEQ ID NO: 21376 - DNA, 330 bp, Homo sapiens
acttggaccaagaaaaagaagatggaaaatatcacaagcaaattaaaatagaagagaatgcaacaggtttcagttatgagtcactttttcgcgaataccttaatgagacagttacagaagtttggatagaagatccttatattagacatactcatcagctgtataactttcttcgattttgtgagatgcttattaagagaccatgtaaagtaaaaactattcaccttctcacctctctggatgaaggcattgagcaagtgcagcaaagtagaggcctgcaagaaatagaagagtcactcaggagtcacggagtgctgttggaagttcagt

SEQ ID NO: 21377 - DNA, 3614 bp, Homo sapiens
  misc_feature 1, 3611, 3612, 3613, 3614: n = A,T,C or G
naccacgcgtccgctcgaacctgccgctgtcgccgcggcggggcggggagcgagagtgggccgcggaggccggccttcgggctccatggacgggcgccgcgcccctgcacagcccgccgcagaggtacggccggggcaggggcgcggggccaccgcgggcccgcggggggccgctccacctgcggggcgcgtgaccgtgagtgtgcgcgaccgtgtgtaaggctggcctctctgcagtcagaggtctgagctctgccatggggataggggtgtctttattactgcagttttctctaacacctgggggctaccggagtgtgggccgaagcaggcgctgcagccgcggaagtatccccaggaacatccccaagaggagctggaaaaagcctcatccccagctctgcagtctccaggggagctcagtgtctgtttgtccagcttctcagagttgctgtgcagctcggatgtggcataggaaacagagacacaggggcagagggagttggtctctggagtgactgtgcttttccaccctcagcagaggaagaaccgatgctggaacgtcgttgcaggggccccctggccatgggcctggcccagccccgactcctttctgggccctcccaggagtcaccccagaccctggggaaggagtcccgcgggctgaggcaacaaggcacgtcagtggcccagtctggtgcccaagccccaggcagggcccatcgctgtgcccactgtcgaaggcacttccctggctgggtggctctgtggcttcacacccgccggtgccaggcccggctgcccttgccctgccctgagtgtggccgtcgctttcgccatgcccccttcttagcactgcaccgccaggtccatgctgctgccaccccagacctgggctttgcctgccacctctgtgggcagagcttccgaggctgggtggccctggttctgcatctgcgggcccattcagctgcaaagcggcccatcgcttgtcccaaatgcgagagacgcttctggcgacgaaagcagcttcgagctcatctgcggcggtgccaccctcccgccccggaggcccggcccttcatatgcggcaactgtggccggagctttgcccagtgggaccagctagttgcccacaagcgggtgcacgtagctgaggccctggaggaggccgcagccaaggctctggggccccggcccaggggccgccccgcggtgaccgccccccggcccggtggagatgccgtcgaccgccccttccagtgtgcctgttgtggcaagcgcttccggcacaagcccaacttgatcgctcaccgccgcgtgcacacgggcgagcggccccaccagtgccccgagtgcgggaagcgctttaccaataagccctatctgacttcgcaccggcgcatccacaccggcgagaagccctacccgtgcaaagagtgcggccgccgcttccggcacaaacccaacctgctgtctcacagcaagattcacaagcgatccgaggggtcggcccaggccgcccccggcccggggagcccccagctgccagccggcccccaggagtccgcggccgagcccaccccggcggtacctctgaaaccggcccaggagccgccgccaggggccccgccagagcacccgcaggacccgatcgaagcccccccctccctctacagctgcgacgactgcggcaggagcttccggctggagcgcttcctgcgggcccaccagcggcagcacaccggggagcggcccttcacctgcgccgagtgcgggaagaacttcggcaagaagacgcacctggtggcgcactcgcgcgtgcactccggcgagcggcccttcgcctgcgaggagtgcggccgccgcttctcccagggcagccatctggcggcgcatcggcgcgaccacgcccccgatcggcccttcgtgtgtcccgactgcggcaaggccttccgccacaaaccctacctggcggcgcaccggcgcatccacaccggcgagaagccctacgtctgccccgactgcggcaaagccttcagccagaagtccaacctggtgtcgcaccggcgcatccacacgggcgagcggccctacgcctgtcccgactgcgaccgcagcttcagccagaagtccaacctcatcacccaccgcaagagccacatccgggacggcgccttctgctgtgccatctgtggccagaccttcgacgacgaggagagactcctggcccaccagaagaagcacgatgtctgagacggtgggcggggccgtgttggctgagagagggctggggtccttcgtggtgggagtcgcagtgggctgggggtgcctgcctagtgctggagtaggggacaatgggaatcctagaggggatggaagacgcggggagtgagctgggtgggccctgctagcgagagaggtcaaccccggtggccagggaacccacttccaagcgcagggacgccggcctccagctggtgtgtgctaaggctccgtcctgactgccctgtgccctggaaaagcagcaatagcatccgccccttagagccctctggctagaggagccaccagtggaaaggaagaccctccatcctctggtattaacgccttaatgcccctgtcttttactgtaagttacttaagatcatttttggaagcaggcgtggtagagtcctgtaaatgaatgctctgggctagatacagcttggagaacctgctggccttgttagacagcacttgggcctttgccagcagcaagaggtgaagcgaagccactcttacctctcccttcccctcccacctgccccctgcgtaggcacccagacttggagagacccgtctgctgttaatacttccatcctcttccttcccaaagagcagatcccaaggcatttactccttggtctgtctcgctttatctgtcgcccctcccagcgctgagagcctcccctggctgtcagcagcactgtgtccaggctcttgtctgaacaccgcagcccctccttcgctccttccagagctcagcatgtcacggcaaggactgccgcattggtgatggagggccagctgaggggaagttgctggtgagtttccttttctccatttctagcatatggacacctggcctctgcttgagcacttaggtgacaggaacttccgcacctcctgaggccctggatgattctaattgttagaaattctaattgttagaaatccttccttataatgaatgaattctgctttcctataatttctacctattgggccttgttctgttctctggaactaaacagaacaaccatttacccctccttttcaaactagagaataaagatttggttttagaaaaaaaaaaaaaaaaaaaaaagaacacactacttcactaatcacccctgtgtttggccggcatctcgccctagcaaacatcgtctcttacaccacttctctatgacgccgcgcgcccactccgtcggcaccctgggcacagcgcgtgcctgaagccactccgttcagcacccggggcggactcccccgataaaaacgccggggcacgcacgtatagcaactcgccgcgaccgcgccactcggacttcacgcggcagcgctgnnnn

SEQ ID NO: 21378 - DNA, 950 bp, Homo sapiens
  misc_feature 945, 946, 947, 948, 949, 950: n = A,T,C or G
acgcgggggggccgcacgctacgaggcccgcacacccacagaagctggagctaaccgggttacgaggaccacccagctgtctggagagatgaagaaaatgaggttcaaagagatgaagtctcttgcctaaagtcagtgacagaaagtgacagagctgggatgtgaatcctggtctgactctacagtcccacatggtagatggaacctccgagcaacacctaaacaaagggagttgatgcctccgaacagagtaatgtcgctggagacactaagcatcgtcggcccctggcaggagctccctaaatatgtgttggatggatggaagaaaggatggatagttcagagtacttcagccttgattcctccgcaacagacacctgaaacttgaccctacattggttcttggccatcgtgatcttccttggacagaatcacctttcagctccggtcatcagactttcccagggccctcagaaagcccttcagagttgttactcacaggcaggctgagggattccttacggggtctgcagctctcctcacctcatccacaagtaggaccgtggcctgttcctcactactgccccaggatcactctgttcccagcccagtccagcaatcacttgtctagctttctggaaccttgagtactttcttgaaccatgagtcctgtgaccaccctagcagctctaaccctcccttatctgaaaaggaagtgtgaggtgaccttgcagggtcccagagttgattgaagaccccatccagaaagaaggcgccctgtggggaaagattgcaaggcctaggtctgaaatcggaaagcttcacccatgggaaaagctggcagggagctaacttgaagccaggactgtatgcatgcaggcaaggaggcagaaagtggacatcaggaaaaaccccttgtgttatagacgcgatacaaccctgccnnnnnn

SEQ ID NO: 21379 - DNA, 3349 bp, Homo sapiens
ccttgcggccgcaggaatttttttttttttttttttgtttttctgatcataaaatatttattaaggtatactttagggaatatagtgaatataaaatttaggatcacaatatgaagcaatttcaaatcctctcaaaggtcagcacagccctcaaaactctgcagatgtaaaaccactggtgagacactaaaagcagttcgactagtagagaagtggattttcatgaacatttacaactagagcatatgaatacctcttttaagtgcaaaaccacaccacattacactaatgcagcaacaatgcattcattattgttctcattagtcattagtagtcaacttgcataaaacaccagaaaaaagcacaatggagttcacaaagtgggctaaaaaaaatgaacctgtccttgcaaaacacacattgtaatggaagaagagacgttaaaaaagtatatgcacactttagaagctgtgttcattccaaggatctcaagtgtcatttccttttctgtaaaatcaaattacaagaaccaggcacaactaatatttgggaggcagtgtgtagctaaaatttcatttaactagttattcaatgatttttaaaatccccataaatcttttctgtcctgaggtagttgcaaaataaatcataacttggatatcaactagagctgaggctttgactttttactcattaaaactagttgttacaggaactacctttagatatttaaaagacagttgagaaatgggcctcttactacacacacaagatgatggctatgtgggaaagaggattagctgcttcagaacgtgagagatacagtccaccatttcttccaccctccccacccattttagattctttattgtccaaaaagccaccatgaacaacacagtgaaagcaggcagatcatcgtcctttgctgtagccagggaagaaaaggtcaagtagagtctgcagaatctcattgggaatcatgatgtaattctggccaagatcatgccggcaagcagggcaggagaaaacctgtgccttaaaggagcgctgtaggcaatctttacagacattgtggaagcactcagttgtcacaggctggtaaactagctcctgacagcaaacgcacataaaagattgttccaattttttcagaaaattctagaacagtacctggtccttccacaagatgtgaaagcacttcatcccacagcttctggttttgacaatcttctctgatgagatgttgctgttgaggagttagttgaaaagcctcaattgcttctgctgaatctgatgctttgtacactttggaggcacttggacagtcatcatctgaaattggcctttttgtggttccactgggctgcttctttgactgtcctttaggcttcttcccttctttatctgaagggtaacctgctggatactgtaaacgtagacataatctccttgaccgttctattccttcagaggtccaaggagcaggttcaacatcatctcttcttaaaagatagcgccaaaccaagaatccatggcttgatgaaatctctggccagtatttcaccaccttataaatgccatcatatctgttgccttcttcaggagcatatttgctgatcttcctccctttaaaactgcgtatcactctgactggcttaccagctctccaattccgagactctgctccaattttatcatccaatggagcatcacagtttagggccaatgccctgttcatgtttgttaatgtttgatcagctgaaggtgcaccaattcttttgttaccagcaagatttttaccaccgcttccagtgtatgtgaactcatcacctcggtcgacttcatccgcaaatccaccagccagtacaagagaataagccccatcattacttcgaccatgaattccaccaacatggggtctgtgaacacctgcttcgctcacctgaactctaaatctccaagttgatccaacaggaataccaggaatgggtccataatgattagaagggacaatagtacattctctcgtacgaccaacacaagccattcccctgccccagtctcttcggctttcagtactagctgacggcatctttgctttctttttactcatcttgagtctttcaccagcctttacaacttcactggaatcagttttacaagaaggacaataccagtattcctcttctgggactttatccaaaggtggattcagacagtaaatatgataagccacattacattcatcacacagaagctgcatgttgggttcatgtttcccaccacatacacgacaggagcaagaatgacatttcttttctgggtctccaccacacaggtcacattcagggtcatttcgccttaaaaactttccatctgcaaatgaaaggggatgggctccaggtctctcaatcttgaagatttcatctacagatattatcttgcagtcatttaatgttccttcagaaccccccaggaaaattttcacacgaagttcttttttggtccttgagattgtcttcaatgtggtaatttctgcatcaaaccagaatcctctttgtccaggactttctacattataattaaccattaccacatcaccaacatttagttcattccatttcaaaatggttctagctcgtggtctaagatccttgacattcatttctagagtaccgctttctgggtatcttatatattccaaagccaggatcaataagacgggcacgagctgatgtagatggctgattggaaggtcctaccctcggagctttctttactttaggtggactattagaacagggtttagcctcaatctgtgtagatgtgccaggaagatgatcagggtctgggcgaactagcagctgaattatatcattcagtccaacatcataatcaaataaggtatatccattttccaactgcttgccccggtagaagaggcgctggcattcgggccgcacgtcgaacagcgcccacacccgctcgcgcagctcctcaatcgtggctttgcgagacacgtcctcaatggtgcacgtcttggagccatcaatggtgcgaacctgtatccacatcttggcgcctagagaggaaccggtcccctttgtctccccctgagctctgggcgccgcgccccgcccggcccgcgccgctttccctgcggctcgggccctcagcggcaggcgggcgagcgcgcccaccggaccgaccggacgccgggcccgacaggcggcgacgactctcagcgcgcgcgcccgactagccgacttgaggagagacgaccggaaccactctgaggcgctgccgcagacaccgcctcaaagataggaagaggccatgtcgcgcggac

SEQ ID NO: 21380 - DNA, 313 bp, Homo sapiens
  misc_feature 312, 313: n = A,T,C or G
aattcaagaagggcagccagcagatggcgaaggagcggcagaagttttttgaggaagccttccagcaggacatggagcagtacctgtccactggctacctgcagattgcagagcggcgagagcccataggcagcatgtcatccatggaagtgaacgtggacatgctggagcagatggacctgatggacatatcggaccaggaggccctggacgtcttcctgaactctggaggagaagagaacactgtgctgtcccccgccttagggcctgaatccagtaccggtccactgcaatcgcacacaggatcctcann

SEQ ID NO: 21381 - DNA, 1922 bp, Homo sapiens
  misc_feature 1910, 1911, 1912, 1913, 1914, 1915, 1916, 1917, 1918, 1919,1920, 1921, 1922: n = A,T,C or G
gcccgggcaggtacgcggggaacaatacgcctgctgccgcaggaggagttacgagccgggccgcgcgctgcctaaatacctaaaccaggtttagcgcctgctcatataaagctctcctaactcgtcttccggtgggaatttcttcacgtgggccggagtcggagactgagtttagctttactgaggagctctaaatttaggcgggtatgagtgatttcagtgaagaattaaaagggcctgtgacagatgatgaagaagtggaaacatctgtgctcagtggtgcaggaatgcattttccttggcttcaaacatacgtagaaactgtggccattggagggaaaaggaggaaggattttgctcagacaacaagtgcttgtttaagttttatccaagaagctctgctgaagcaccaatggcagcaagctgcagaatacatgtacagttattttcagaccttggaagattcagatagctacaaaaggcaggctgcacctgagattatttggaagctcggaagtgaaattctattttatcatcccaaaagcaacatggagagtttcaatacttttgctaaccggatgaaaaatattggcgtcatgaattatttaaagatctccttacaacatgcattataccttctgcatcatggaatgcttaaagatgctaagagaaatctgagtgaggcagagacatggagacatggtgaaaatacgtcttcccgggaaatattaatcaaccttattcaggcctataaagggcttttacagtattatacctggtctgaaaagaagatggaattgtcaaagcttgataaggatgattatgcttacaatgcagtagcccaggatgtgttcaaccacagctggaagacatctgcaaatatttctgcattgattaaaattcctggagtttgggacccttttgtgaagagttatgtagaaatgctggaattctatggggatcgagatggagcccaagaggtactcaccaattatgcatatgatgaaaagtttccatcaaatccaaatgcccatatctacttatacaactttctaaagagacagaaggcaccaagatcaaaattgataagtgtgcttaagattttgtatcagattgtaccatctcataaattgatgttggaattccatacattacttagaaaatcagaaaaagaagaacaccgtaaactggggttggaggtattatttggagtcttagattttgccggatgcactaagaatataactgcttggaaatacttggcaaaatatctgaaaaatatcttaatgggaaaccaccttgcgtgggttcaagaagagtggaactccaggaaaaactggtggccagggtttcatttcagctacttttgggcaaaaagtgattggaaggaagatacagctttggcctgtgagaaagcttttgtggctggtttactgttaggaaaaggttgtagatatttccggtatattttaaagcaagatcaccaaatcttagggaagaaaattaagcggatgaagagatctgtgaaaaaatacagtattgtaaatccaagactctgatactgaattttagttatttcacagttgtagctacacagtaagtagcttggtagatagttattgaatgtatttatgtagtgtattaagaagcttatattactacaaaaaacttatttttatatatttttatatttttgtattatttatagctagagaaacaatattactgcctttgctctttgtaactatgtctgttttcttttttgtaatgttaaatgttacatttgttaaggaataattcttcaaatgacaaactaattacagaatatagctctacagcagttattgtttgcaaatactttgcctcttgctattgtgtaataaactgtaacttgtagtgctgtgaaatgnnnnnnnnnnnnn

SEQ ID NO: 21382 - DNA, 1221 bp, Homo sapiens
  misc_feature 1218, 1219, 1220, 1221: n = A,T,C or G
cgtctgtttttcttaaatgcatatatactgtatttaaaattaaaatatagataccaatttaccaaagatacatattactaattctaagcaaaactaaaaaaaaaacccaactcatcataatttaagaatcaaaatgtagtttgtcttaagaatttagtggttatactggaaatgcattttcaactcctatgttctaaagtttatgttcaaatggtgccagtgaatttttatatgaagggaaaatgcctgcttttttttttttttaacagatgtaatttcacttaaccctttgcgctttcccttagttgtcatttaacatacaatactggctttacttatctctagaaagaagaaggcatgctacaaataggaaggaattgtaataatgatatttggcctctactttgtcttagctgttaaactgtttttagtatttttgttaaatatttgcaaagggaagcattttctacagaggataattaatttcaagaaaaatatcttgagttttaagaaataaacatctccagaaaaggagaaagtcgattttataaaatgtcgcaactctccaacatttggggtagtgactccttttttgttaggacatttgaaactagcaagcagccattgtttctaaagaattctggcttcacattgactcatgtttctttcactccattttgaaatagctaaaaatcattaaaactgtaaatattttgttgcttgggtaagcatcttctgggaactttgtatctatggtatataatcatagaattttatattttcatataaagctaatttttttctagtttcaactccgtcatagttttttttcctttttgtggtggatatgtgaattcaactttctgtgtattgaagtagcaaaaaccatctttacattccaaaagaatccaacatgtgttatttctttgaggcagtgattgtgaaagttgggttttctttttaattccattgaccatttgtgcaataggaattagacataattagtcactgaaaacattcgtcacattgacccatttggaaaaagtgtgctttttttttttttttaaatttgttcagggggaggggttttgtaacctgaaatttttccctttttcttctgtttaaactatatcaaatcattctattatagtgttatttaatatgtaaattgtattgctatacataaaataaagtatggaaaaggggggggtaaaatannnn

SEQ ID NO: 21383 - DNA, 1085 bp, Homo sapiens
  misc_feature 1084, 1085: n = A,T,C or G
acatgaacctattaataaaccattcatgcttcccagtttggcagatgtgagcaaactatgtataggaattccaaaggtaactttttcctttcattactttacagaaatactgtcaagtccaatagagagcacagacttgggaggcggattgggtgggtttgaatctctgctctgccacttttattaatcatgtgagttgagtatgtgacttaatctcttttagctcaatttccccatctgtaaaataggaataataaaaatactgacttcagagaggtttgtgaggatcaattagacagtcatgttaagtctgtaaattgtttctgtaatgggcaagatagcaaatattttagattttgtggaccatgcagtctttatcataactgcttaactgccattatagtgagaaagcagccacagacaatatgtaaatgaaaaagtgtgtctctgttccaataaaactttattttcaaaaaccagctggcttgtcacatctggcctatgggccatagtttgcccatccctaatgtaaagaaaggactttagcccaaagccacaacttgcatagtaatgcctcaaaaaatgttaacatctttactgttattattattactactgcatctattacagtagcaattgagtaatgaatacatgaatgttataatgttaaattactaaccttttaaaaatattaagcattgcaatatattaatactttaaatcttttaggaagataagttacctgcagaataatgaagtttcacaaacctcagcactgtggtgttggggctggtaatcgttgtgcgggagaatgtctgtgcctgtaagatgttagtaagaatcctgggcttctaaccctaatgcaggtagtaccaacaccataacaaatcccaaacaaaatgtcgcgcatgcaggtccgggtgggaaagagaaagacccgggaacacggttagaaaactctgtagcccaaggaatatggggggaccatacaccgtggaaaggaggcggaaaggaaccggaaacagcaaaaaaaaggggggggccaggggggaggaaggactagcaagacgggtgtattagtgann

SEQ ID NO: 21384 - DNA, 625 bp, Homo sapiens
tccaccgcggtggcgcggccgcccgggcaggtacagtagagtatgagttgctaagttagatgacaaagcactgggtttattatgtattagtgctgtagttatactaaaggaatataatatatgttgacattaccagactaagcattgatcacaatattctcaagtagggaaaattagaatattaaagtggaatataagctgattttctttacgaaagtaataaatgaaaataaggctgtgaccaaaaagtaagtttctaagtggttctcttgttagccaagcaaataaatccatttaagatatggttagttaattaaatcatatttgattgcaggaactgaaaaaatgtatctagagaaaataaacattaagccttttggtgggaacagtttctcaaagagttgagggtattgggagcagcatttctagtcagttacaaaacacaacaagtgatttttgagtggttttccttgactcttggtgaattgacaaatgttatcaatacttttctgttggtttttattttaggagttagtattgagttttaataagcctctgaatagtcagtgtggaacaattagtggcaagaacattttcaaataatttgagaaaacattaatttagt

SEQ ID NO: 21385 - DNA, 5989 bp, Homo sapiens
  misc_feature 5972, 5973, 5974, 5975, 5976, 5977, 5978, 5979, 5980, 5981,5982, 5983, 5984, 5985, 5986, 5987, 5988, 5989: n = A,T,C or G
tcgacccacgcgtccgggcggcggcggcggcggagtagcacgccggacgagacgtcccagcggctcaggcgctgcccagcgccggccctggcagggagcctggtggggtggcggagggggagactgtgccgtggagggcctcgccatgtcctgctgcccgacttccttgtgaaacctcctagtagaaaaagttcttgggacaaacttcatttgacttcaccataagggaaagaagagagccttgttggacactgaagaagggacggggatttctcctcctaatctgggcctcttgtcatggatgaagagactcggcacagccttgagtgcatccaggccaatcagatctttcccaggaagcagctgatccgggaggatgagaatcttcaggttcctttccttgaacttcatggagagagcacagagtttgtgggccgtgccgaggatgccatcattgccctttccaattacagacttcacatcaagttcaaggagtctcttgttaatgttccattacagcttatagaaagtgttgaatgccgagatatatttcagcttcatttgacttgcaaagactgcaaagttatcaggtgtcagttttcaacctttgagcagtgtcaagagtggctgaagagactgaacaacgcaatccgaccacctgctaaaatagaagatctcttctcatttgcataccatgcttggtgcatggaggtctatgccagtgaaaaagagcaacatggagacctgtgcagaccaggggagcatgtaacttcaaggtttaaaaacgaggtggagaggatgggttttgatatgaacaacgcctggaggatttccaacatcaatgagaagtacaaattatgtggtagctatcctcaagagctcatagtgcctgcctggatcactgacaaagaactggaaagtgtatcaagtttcaggtcctggaagcgcatccctgccgtcatctacaggcaccagagcaatggagctgtcattgcccgctgtggacagccagaggttagctggtggggctggcgaaatgcagatgatgagcatctggtacagtcagtagccaaagcttgtgcctctgactcccgatcgagtggcagcaagctgtcaactaggaacacttctcgagactttcccaatgggggagacctttctgacgtggagttcgattcttctctgtcaaatgcttcaggagcagagagtttagccatccaaccgcagaagcttttgatcttggatgcacgctcctatgcagctgctgtggcaaaccgagccaaaggaggaggctgcgaatgcccagagtattacccaaactgtgaagttgtgtttatggggatggcaaacattcattctattcggaggagttttcagtctctgcggttgctgtgcactcagatgccagatccgggaaattggctatcagctcttgaaagcacaaaatggctccatcacttgtctgtgcttctgaaatcagcgcttctggtagtgcatgctgtggatcaggatcagcggccggtgctagtacactgctcagatggctgggaccgcaccccccagattgtggcattggctaagctcttgctggacccttattaccgaaccatagagggtttccaggtcctcgtggaaatggagtggctggattttggccataaatttgctgaccggtgtggtcatggggagaactcggatgatctgaatgaacgttgcccagtgtttctgcagtggcttgactgtgttcatcagcttcagaggcaatttccttgctcttttgagttcaatgaagcattccttgtgaaactggtgcagcatacctattcctgcctgtttggaacattcctgtgcaacaacgccaaggagagaggggaaaagcatactcaggaacggacatgttccgtgtggtcacttcttcgggcaggcaacaaggctttcaaaaacctactgtattcctctcagtcagaagccgtgctgtaccctgtgtgccatgtgcgtaacctgatgctgtggagtgcagtgtacctgccctgcccatccccaaccacccctgtggacgacagctgtgcaccatacccagccccaggcaccagccctgatgatccccccctgagccggctaccaaagactagatcatacgacaatctgaccacagcctgtgacaacacagtgcctctggccagccggcgctgcagcgaccccagcctgaacgagaagtggcaggagcaccggcgctcactagagctgagcagcctggctggccctggagaggatcccctttctgccgacagcctagggaagcccaccagagtgccggggggtgccgagctttctgttgcagccggagtagctgaggggcagatggagaacatcttgcaggaggccaccaaagaggagagtggagtagaggaacctgcccacagggcaggcattgagatacaggagggtaaagaggaccctctcttagaaaaggagagcaggaggaagacacctgaggcctcagccattggacttcaccaagacccagaactgggtgatgctgctctgaggagccatctggatatgagctggcctctgttctcacagggcatttctgaacagcagagtgggctcagtgttctcctcagttctctccaggtcccccccaggggagaggattccctggaggtccctgtggagcagtttcgaatagaagagattgcagagggtagggaggaagcagttcttccaatcccagtagatgcaaaagttggctatggtacctcacagtcatgttctctgctaccttcccaagtcccttttgagaccagaggaccaaacgtggacagttctacagacatgttagtggaagataaggtgaagtcagtaagtgggccccaaggtcatcatagatcttgccttgtaaatagtggcaaggacaggcttcctcagaccatggaacccagcccttcagagacaagcctggtcgagaggccccaagtggggtctgtggtgcataggacttcccttggcagcactctcagcctgacacgttccccttgtgccttgcctttagccgaatgtaaagaggggcttgtgtgcaatggtgccccagagactgaaaacagggcctcagagcagcccccaggtcttagcaccctccagatgtaccccacacccaatgggcattgcgccaatggggaggctggtaggagcaaggactcactgagccgtcagctgtctgctatgagctgcagctctgcccacttacactcaaggaacttgcaccacaagtggctgcatagccactcaggaaggccatctgcaaccagcagccccgaccagccttcccgcagccacctggacgatgatggcatgtcagtgtacacagacacgatccaacagcgcctgcgtcagattgagtcaggccaccagcaggaagtagaaactttgaagaaacaagtccaggagctgaagagtcgcctggagagccagtacctgaccagctccctacactttaatggagactttggggatgaggtgacttcaatccccgactcggaaagcaatctggatcagaactgtttgtctcgctgcagcacagagattttctctgaagccagctgggagcaggtggataaacaggacacagagatgacccgttggcttcctgaccacctggccgcccactgctatgcgtgcgacagtgccttctggcttgccagcaggaagcaccactgcaggaattgtgggaacgtattctgctccagttgttgtaaccagaaggttccagttcccagccagcagctctttgaacccagtcgagtatgcaagtcttgctatagcagcctacatcccacaagctccagcattgaccttgaactggataagcccattgctgccacttccaactgaagctcagtgacctgggtgggcagtggccaagctgctgttcctatgacaggcccactcaacctgggcagaccgagaggcccgtgcactttggaatgggagcgtggaaccacctgtacagagtgacagatttgggatgcaccactggattgtagattgatttttctttcctgtccccctactccctccctaccttttccatcctcctcctctgccttcaaaaaaggaaactttcccttggttgtcttaatttttttttttttttgatggaagaccaagggttgccaggcccactgtaactgccgagctgcctgctgtcacgtgacactgagggatggcttgtttcttccgggtgggaggatggtggtcagagccaggagtatggagatctgagaccgtgagcagggaagaaagccagtgctaacatgcaaccattcctcacgccaccgccacatcagagctggttgggaaccctttgctgctggggaggctggaagcatattccccaagagcactgccctgggcatcatctccctcctgcgaggagctgagccagtcccctcacagatggataaatgaggctgatgtttggagggagaggcacacggtaaatggcatccccttaggcgcctctttgggaaaggaaagtggatgctcctttgaggcaggcgaggggctgggagtgggtagccgtcatgttgtcccccgtgggatcccatttttaacttgacccagattgtcttgggctccttttactttcagggggctgctttcctgggccaggctgtgtagcacttcccaccctcaggcatgagtacagactggtcaaaatgtttatgcagtcaaggccaaagcctgccctgagcccagacacacctgggtccccattctggggcctggtcccctaaacaatctcttcctcagccagcacagggaaatccagactcagggttccagaaatcccccgttcccaaaccaaaccaatcatggatcttccctttaaggggtagaatcagcctttagagttacaagcccctggaaaagggagcaggtcccatacaatcagcctttctcctcttctcttcttgggacaggaataactgctgagcagtccccctttgccactcctggctgtctgagtgggcacttgtctggctgctggccagcagtgaagggccacttggtgacttcgtagggttccttagagaagtgacatggccttgaggagattcagggcacctttcctcagtgagctttgatatggtccaaaaacagccttaaatcaagaatatttgtggaggtaggtgtggggaaggttggagaagagttaggtttgtgctttgtaatcttggcatccatgttttgtgcctgccctccctcttggggaggccatgcttgactctgctgaaagctgctaactggtgacagggtggatcatggtgaggactaggggtaaggtcagggaatgcttaagctctggccctgccctgtattcctcttccccttggtagcagttccctgaccaagggcaaggtgtgtctcaggaaggtggttctgtgcatgcctgggtgtggttaaggcgtggcccagaaggcttccctggtgctctcagtccaggcaaagcccagagcatctgagcacgtctctgacttccagtggcaacacagtttgaacgtggtgaaacagggtgtagttcttttccacattctgtgtcatctagtcgtgcaggtagggaaaaagttggtctaattgaagattgtgcatttcctagtgacaggtgccaagaggttatgatacgggtttcttgggtctgatgtacagtgtgaataaatgcttgcagctcttagctcttttttgatcgatgaagcacttttttattaatattttcctttgttaaaggaggaaccgtaactctccatagctgtacatataacccttttctcctaaagaggagtcagtcagtgctcctatatttttcattttttgtcaaagcaagaagtaaatactttagaattgttaaatatataaataaagcaaataaagttgagtgttccacatggtagcatttgctaacacttccnnnnnnnnnnnnnnnnnn

SEQ ID NO: 21386 - DNA, 1096 bp, Homo sapiens
cgttcgggcttcttgttgtgcgagcgtgcggtgcgcgctgagttgtgttccttgcgtcggtgtgtgtctgcctggcggtgtggttccgcgtggtcgtgcgccgtcgtgttcgtcttttgtgtctcgtgctatcatgggggagctcggttggatgtgtgtcgttcaggctcatgcgcctgcggttgccgttctaggttgtgcgggtggttgtgtgcgccggtggccgcccggccagtctgcgggggcgtctgcttcgattatatgtcccgtctgggagttatgggttattatgtgctctgcccctgtttgtttttgtgctggtaattctaattttaaaaaagagtttggtatggttttaaagtttccattgaacctctgaaggtggcttatgtctcgactcctctcctaggactggtcatgagctgagaagcatagaggcaaagtatctcaacattacaaaacccccagtcttcaaggaaaggagcacattaccatggagctacaggactccaaaggacctcagaaagcatttagccaaatctccttatgcaggaaataaatgagaatttaaggctcagatgggttaaggtgatttgtcaaggtcataagaacttgtcagttccagacttgtagtccagggctgcgtccttttgtaaaccagaaacgtctgcatagaaaggattaatccagaatatcctcaagaccgagtatgagagaagtgacctatatggtggtgactgaatagagtgcttcataccaaatagaagttgccagtgcctgcactgagctctgtgtcctgggcaccgtgctgctctgctggactgggcaacgtggactggggcagcccatggcttccttcctgctgcccaactgctcctgggcgagaaggcgagtccggctccaccttgattggagccagcagttccgggacactggcattttctcggggggtgctcgaagaggtcggtgtggtgatatgtgctgctaagttactattggaggtcaaagccagtgggtcgtcactcaagttcttcatgggcagagccaccagacagcctaatgctcctgcactcattactccgcaggtcatccacac

SEQ ID NO: 21387 - DNA, 390 bp, Homo sapiens
  misc_feature 1, 2, 3, 4, 5, 390: n = A,T,C or G
nnnnnccaggggaccaatgcattttatcactaaaactatttttatataattttaagaatataccaaaagttgtctgatttaaagttgtaaaacatgatttctcactttcatgtaaggttatccacttttgctgaagatattttttattgaatcaaagattgagttacaattatacttttcttacctaagtggataaaatgtacttgctcatgggatgttgcaaagaacacaaagtgtgccttagacattctcaagtcatcagcgtcacccttccagaatgttcacgtccacacccattcttggctaatgtaatgaataaggcttctctcatttgtttttgataccttgggaatttctatgcagggctttaaaaaaaataagtgattcgan

SEQ ID NO: 21388 - DNA, 2318 bp, Homo sapiens
  misc_feature 1, 2, 3, 4, 5, 6, 2221, 2318: n = A,T,C or G
nnnnnnccatatttactgagtttaaatgaatcatctcagagagaaaagaaaaactaaatatagaaaagtgcatggcagaagctgaaatgagctcaagcagtactaaccttggaaccattctgggtacccaaaagaaaaatttaaaatcaagatgagtaaaaggagaatggtctcaatatcctcaaaaatgcagtaagagaagtaattccccactgaaaatgtctctctttctttctatgttataccctggagtcctggttgaggggtgggggaatcagaaaagtaggtttacatttaacatttttcttaactacattcacttcttaaaaaggaacaagaagtgtaaataagtatgtatagagtgagggattaagcatatttgcattggggactcgtgtattatgcttttaagtcaaaattaatattctcaaattcgaatttgatagctattatttctaaatctttttaatcctcaattttcctggtaaccttctttcaagagtctccttcttctaaaagttgccaaaccctttatatttaagctttttccactcaggactcaattagagtggtcaacagggagagggatggtcccatttgatctttgccactgagcaaaacaaaacttcaaatgaacttttaaactgtagctttagtcttctggtataaagtggggaagattacacttatgtgatcaccaaaggatttactagtatcttggtcattccaattgcacaatgttaactgtacaacacacagcagaaaagtgaatagacttcactaagggattctaagtttagaaaataggtttggttttcttaaaaaatttggtgtataatacaaactaatgaaaactatacatattctccaattcctatagtaataataatgtaactgttacaccaactttcctcatatttgagagatgagtacatgttggattgcagcatttcttcatgttaaaaacatggaatattattcaaatatagtacttggggcctaaacaactaaaattagtcaccgcataactagttgaaaatggcataggcataaaatgttaataaagaatggcagttataatttatgctcacttcctggagtactgggtaatattcagaaacggcacattcggggtacgttcaacgtgttccagggcttaggcaagtttctagccaagtattattccagattctcctgagtctatataaagggcatttggggggaccttctgggcatattttttccaactccttacatttgggaatttcctaggagaacaccgtctgaatgagccggggtctagcggaagtccagagccagggattacaaagaaagcgcacgtaaagaacaaacagggggggaaaaacgaacacgtgttccccccctcccgtcttcactcacacacaccgacacctctccgcgcaccgaaaaggcaagcagaacaagaccaaggcgacgacgacgaagagaacaacgacgcagaacgagacgagcaaccgaacacagaagacagaagagggagaagcagaagagaggccggaaagcagaggagaaggcgagaaggacgccaaaggaagaggcggagaaggagcaggcagaggcagaaggagagaagaggaagagagcaggggcgaacgaggaagagggcgcagcgagagcaagagaacgacaaggaagagagagacaagagcagaaagacagcaagagagagaggcaacaaaggacagaaaacacggagcaacaacagaaaagaggagcgaagagaggagacagaaggagagagacaaagcaacaaggagaagaagagaggagaagacagagagagagagagaaggacggagacggagagcgagaagcagcaagagacagagggaagaggagagaaagagggagcggaagaaaaagaggggagaagcaagaagcacagagaagagagcgaagagaggacaggaaggaggaggaggacagcagaggagagaaaagagagagaaaagaactagaagaaagaacagacgaagagagagcgcaggggcaagagaggggaaaggaagagagggagaaggagctagaaggagagaagagcaggagcaaggagagagcacgcagaaggcgagagaagagcgaggagagagagaggaagcacaaggaagagggagggcgaaggagaagagaagagcagaaggacgcaaggaaggacagagcgggactgggaacaaagaanaccaagaaggaggcacaaagagacaagagagagagaaccagacggggcaacgaataagccggcagaaaagacaaggaacaccaagagacaccgacan

SEQ ID NO: 21389 - DNA, 376 bp, Homo sapiens
  misc_feature 376: n = A,T,C or G
acctttggttttcttaaagtgaaagtcagctatatctatcaacctttgtatttgaatagtcccgctttacactctaagaagggtcataaacagtaatttaatataattatgaccatgctaatgtgaattcttaggctttactatatttacaacagcacaattttgattcaaaatcagctcttccaactgtaataactatcttcaaaaactggtttccaggccaggcacagtggctcacgccagtaatcccagcactttaggaggccaaggcaggaggatcacttgaggccacaaattcaaaaccagcctgggcaacagagcaagattccatctccacaaaaacaagttttgaaattaatcaagtatgatggcatgn

SEQ ID NO: 21390 - DNA, 2387 bp, Homo sapiens
  misc_feature 1, 2385, 2386, 2387: n = A,T,C or G
naggcgacagtgtcgagcgcccgggggcgggcgcacggccatgtccgccgagggcgcggagccggggccggggtccgggtccgggcccgggccggggccactctgccccgaacacggccaggctctgagctggttctgcggctccgagcgacggcccgtgtgcgccgcctgcgcggggttgggcggtcgctgccgggggcaccgcatccgccgggcggaggagcgcgccgaggagctgcggaacaagattgtggaccagtgtgagaggctgcagttacagagtgctgccatcaccaagtatgtggcggacgtcctgccggggaagaatcaaagagcagtgagcatggccagtgcagcgagggaactggttatccagcggttgagtctggtgaggagtctttgcgagagcgaggagcagcggttactggaacaggtgcatggcgaagaggagcgggcccaccagagcatcctgacacagcgggtgcactgggccgaggcgctgcagaaacttgacaccatccgcactggcctggtgggcatgcttactcacctggatgacctccagctgattcagaaggagcaagagattttcgagaggaccgaagaagcagagggcattttggatccccaggagtcggaaatgttaaactttaatgagaagtgcactcggagcccactactgacccaactctgggcaacggcggttcttgggtctctctcaggcacagaggacatacggatcgatgagaggacagtcagccccttcctgcaattgtcagatgatcgaaagaccctgaccttcagcaccaagaagtcaaaggcctgtgcagatggcccggagcgcttcgaccactggcccaatgccctggctgccacctccttccagaatgggctccatgcctggatggtgaatgtccagaacagttgtgcctataaggtgggcgtggcttcaggccacctgccccgcaagggttctggcagtgactgccgtctgggccacaatgccttctcctgggtcttctctcgctatgatcaggagtttcgtttctcacacaatgggcagcacgagcccctggggctgctgcggggcccagcccagctgggtgtagtgctggacttgcaggttcaggagctgctcttctatgagccagcctccggcacagtgctctgtgcccatcatgtgtccttcccggggcccctcttcccagtctttgctgtggccgatcagaccatttctatcgtccgctgacctctggccacaggaagccaggtccaccgcccaccaccctttcaggccatgtttctactcagtgtgcttttcccaaatgatgtgtgtggtgtttctaagagaaacagggcccataaccagtgggcagctttaggagggatggggatctgtttcagatctaggcataacctgtaaatcacaggtgtccaaacttttggcttccctgggccacatttgaagaagaattttcttgggccacataaaatacactaacgatagctgatgagctaaaaaaaaaaaaaaagtctgtgtataatttttgtgatatctgccaccacagataagcaaaaaagtccttgcattcaaagggttggagattgctgctttgagtgctgggtacctgtggggaacctactactccctgggccttagtctcccaaatccaccatgcatctgcccctctgagggtgtcttcactttgtctctggcatctagcatggtgcctggtgcatagtgagcatgcaataaatatttggcaggtgagtggatggatagatggataggtgaatgtaggtggacaggtgactgggtggatgttgtggtctctggagaagcactgccattcagcctcctgctccagctgttcacatgcagaaatgctctcttcacaggcagagaagcctgtggctaaagtttccacatcccattaactcagtgcttttgtctttttcatgacatggcacatagagaaaatatttttttctagcacacaagagcaacctgaaaggctgctcctggccagaggactctgtcccgggggaccgtgtcctcccccatgtcctgcctaggccctcagaggaccaggggatcatgtctccaggtaacccgactgtagcccctgctggctgagctccagcctgtgcccactgataatagcagggacggccttttctcttagagcagctgataagtttccctacctgatggccccctctgacataaactgcacacctggggtgatggcttaaagccagaaagagctgagggagttaagagggccaaccttagggcacgtgggcattattaaaggtcttaaaagcattgaatacaaataaaaaaaagaaagaataattggtgcggccgcaagctcattcccnnn

SEQ ID NO: 21391 - DNA, 2180 bp, Homo sapiens
  misc_feature 1, 2, 45, 2179, 2180: n = A,T,C or G
nnggccaagttgtatgataactactagaccagattctgatcgagntcattgagccttttccagagtacagattgaacacatatctagtctcatcaaactctccaaggccgacgtggaaaggaaattatcacagatgattcttgacaagaaatttcatgggattttggaccagggggagggtgtcctgattattttcgatgaacccccagtagataaaacttacgaagctgctctggaaacaattcagaacatgagcaaagtagtggattccctctacaacaaagccaagaaactgacataggtgagtgctggcttcaggaccccagggctgggcagctctgtcttctgcgtgtcgagactgaaaacctcctcctggtgtcctcatggcttcctgattgacactgctctgtcttctcttgcagagttggatctgtagcggtcctttggagagtgtgtgtggcgggagagtgaaaccttgggggaaaatgctaggagattcttttttctttttgttctacttttcgctcggaaagtttttaaatcctcatttggtgcatctgtattccagccaataggtgtgccagttttcatgtaatctttactggcccaacttgggagtggggaaattgcttaaaaaaaaagaaaaagaaaaaaaaaaaagattattctaaataaaaggaaaaaggcttacactacctaaagctgtgctctctgcctcctgggagagggccgcaaagccaggcaccccgccaaccactgggggtcctaatccacctgctgggcatcacctctcctcctcctcagaattgggtgtttgctgaccatcaaaagcaatgactttttattctgtttgtactgaaccaaaacaaacaactgtgtatagactgctgttttcttttttatttgaaatgaggcattttggtgttctttcccctaccatacggcctgtctgcccttccctccccacattggctccagcagagtagccgaaggtcctgccgccgccgccaccaccaccaccactgcagcaacaacagcagcagcagcagcagcgcctgcatagctccactctgacctgtgaaggaatggggatgaggccaggagctagtgtctaccacggccacacagggagcagtgtgggcccttagcccccaaggggcctgctatgcatgtggctttttttttttttaaacacagtaaactagattagtcgtcagtgttttaattgcccctcttctcctctcctgcattcctctcctctcttctttcctctctgtcccttctctttcccctctcaaccaggagaccatcatgtctctctgccttcctcctctcccctccaggggagtcaggctgtctgtgaaagccatgagcttctctccctctcccactcctcctctcctactttcagatggatttattccttttttaaacaatgaacatcggaaatgagactgtggggtgtggtttctctctctcttttttttttaattttctttgttgggtttttgagcaacctcatgtccccttcccagggagctttttaatttacctcttagaactcaagtggatgggaagtagagcactatgtgtcagtatgctttgttttctgacacgattacacagcgaggctttaatgccatttgggtaggtgagcttctgcacttctgttgtgctgaactgtattttcttctctcatctcctctttgtctttttctcttttcctctccttcctgccttcttctgctggcctccttttctctttctttaccttccttggattatccttccaggttttcataataaatttatattttgtaaaaggattttgttgtaccaggttttgcatcctcactgaatctgactggcttttattttcctctccaaaatcaggtttttgttctcaacatctttccccatcatgtctagtcactgttttggttttggcaccatcagtatcaaatgtacaaacggttcttgctaaccaacaccaggtatatctgatgttcagatgagttccaataaaaataattttttttttttcaaaaaaacaggccaaacaaaaattgttggggcccggccgaaaaagtttaaaacacgtgggcgggcccggggagcgacagggcacgggcaggaccggcgaaagggggtttcccaaaacccgggccggcgtgacccnn

SEQ ID NO: 21392 - DNA, 1143 bp, Homo sapiens
  misc_feature 249, 1102, 1103, 1104, 1105, 1106, 1107, 1108, 1109, 1110,1111, 1112, 1113, 1114, 1115, 1116, 1117, 1118, 1119, 1120,1121, 1122, 1123, 1124, 1125, 1126, 1127, 1128, 1129, 1130,1131, 1132, 1133, 1134, 1135, 1136, 1137, 1138, 1139: n = A,T,C or G
  misc_feature 1140, 1141, 1142, 1143: n = A,T,C or G
gctgggtgccgggccccccctcgagagtacttctagaattaattaagcggggatactgattcagaaatcctgtagcgtgtaataaaagaagaggaaatggcatggaatcactgcctcctgtgatttgaaggccattgtgaaggaaaacaatgcagtgaaagaaagttcttcatattaggacagatatcattgcatcacatttatttatctttctgggtatttttatagcccttattaaaaaatattaanacaagcaaaagcaagaaaaatagggggggggcccccccccgggggggccccacactccccctttggggggggttttgaccccccccagggtgcctcccgccagtatctgatgaagagtgactcagccctggcctcatggaccctccacaggctctccctccctcaagggtgcagaatgatgaggattccaacctccagcacgacaaaagcaaaacacactcgctctgagaaaccgaggaacgagccagacgactggagttgccaagagcaagtcaaaaaacattctggtgagaatggtgagcgaaagctgggacaggtttctgcttcaacaccaagagaaaccgactgcgggaaaaactgactcttttgcattatgatccagttgtgaaacaaagagtcctcttcgtggaaaagaaaaaaatacgctccctttaaacggtggattgaaaatgactttgatttataaagagaagactgagggcggggatactgattcagaaatcctgtagcgtgtaataaaagaagaggaaatggcatggaatcactgcctcctgtgatttgaaggccattgtgaaggaaaacaatgcagtgaaagaaagttcttcatattaggacagatatcattgcatcacatttatttatctttctgggtatttttatagcccttaataaaaaatattaaaataaaaaaaaaaaaaaaaaaactcgagggggggcccggtacccaattcgccctatagtgagtcgtattacaattcactggccggcgttttacaacgtcgtgactgggaaaaccctggcgttaccaacttaatccccccccccgcggggggggggcccccacaccaaaaannnnnnnnnnnnnnnnnnnnnnnnnnnnnnnnnnnnnnnnnn

SEQ ID NO: 21393 - DNA, 480 bp, Homo sapiens
  misc_feature 1, 2, 3, 479, 480: n = A,T,C or G
nnnatgtgtactttttcatttttaaaaaatcatcaggactgcctgtgaatgaagtgcatttgctgtattgaaccaaaaccatagagctcagaaaaatcaaaaccatgacaagacattttagcatttaactactttctataactaagtactctttaaatatttttatttcaatactgtggatggaaatgagaagcattctaaatttgagttaatatatttttatgaagatatttgagaaaagaaaaaaatagctagtattcatgaccatggacttgctcttgatcatgcacttatgtatgttacctaatttggccttttaaaaaaggtgtaagtgtttattatagctactttcaaggaaagtttgaatatgattctagtctctaaagttcttcacgttttctgacattccctggaaggtgactggggaaaaattgctccaggttgaaacaaccaagcccaaaactttaccattctgatcnn

SEQ ID NO: 21394 - DNA, 902 bp, Homo sapiens
  misc_feature 855, 894, 895, 896, 897, 898, 899, 900, 901, 902: n = A,T,C or G
gagtcgacccacgcgtccgggcggcgtccgcagtctgccgagcggcctgctctgggacgcaagcgctacttcgcacctgccgctcgccggccctgctgaggctacctgccttgcggggtaccgcaaccttcgtccaggccctccagagcgtgccggagacacaggtcagcgtattggacaacgggctgcgtgtggcctcggagcagtcctcgcatcctacctgcacggtgggagtgtggattgacgttggcagtcgctatgagactgagaagaacaatggagcaggctactttttggaacatctggctttcaagggaacaaagaaccggcctggcaatgccttagagaaggaggtagagagtattggcgcccatcttaatgcctacagcactcgggagcacactgcttacctcatcaaggcactgtccaaggacctgccaaaagttgtggagctcctggcagatatcgtgcagaacagtagtctggaagactcgcagatcgagaaggaacgagatgtgatcctgcgggagatgcaggaaaatgacgcctccatgcagaacgtggtctttgattacctgcatgcgacacttccccaagggcacacctctagcccaggctgtggaggggcccagtgagaacgtcaggaggctgtcgcgcacagacttgactgactacctcaacagacattacaaagccccccggatggtgctggctgcagctggaggtgtggaacaccaagcaagctgctggaccttgcccagaaacacttgagcagtgtctcccgagtgtatgaagaagatgcccgtgcctggtctcaattccatgtcgcttcactgggcagttgagattccggcnatcgggatgacgcccctgcctttgggccacgttggccannnnnnnnn

SEQ ID NO: 21395 - DNA, 807 bp, Homo sapiens
  misc_feature 793, 794, 795, 796, 797, 798, 799, 800, 801, 802, 803, 804,805, 806, 807: n = A,T,C or G
actcctgcctggatgacagaatgagactctgtctcaaaaaaaacaaaagcaaacaaacaaaaaaaaacagatatttctcacagttgtggagactggaagtgcaagatcaaagtgttggcaggtgcctgtaatcccagctattccagaggctgaggcaggagaatcacttgaacctgggaggcagaggtttcagtgagtccagatcatgccactgcactccagcctgggtgacagagcgagattctatctcaaaaaaaaaaaaaaaaaaaaaagcaacagaagcaaatgagagtgcctgggagtggtcattgtggggccttcccgttcgtgtgacccaggtcatgtccctccctaagccctggtctctcttgcctcctgcagggctggtgaattaccagatctccgtcaagtgcagtaaccagttcaagttggaagtgtgtcttttgaatgcagaaaacaaagtcgtggacaaccaggctgggacccagggccagctgaaggtgctgggtgccaacctctggtggccgtacctgatgcacgaacaccccgcctacctgtactcgtgggaggtaatggtggtttgggacttgcttaagggaggtcttttgctcccatctggtagccctggcttcagcaggagcccaggacaggtgaacgggcaggtgtggtcctctgagcttttctgagctgatgtttcccacccttggtgggaggcccagattttttatttatttatttatttatttatttatttatttgtgacagagcgagattctatcgagtgagactgtcnnnnnnnnnnnnnnn

SEQ ID NO: 21396 - DNA, 1614 bp, Homo sapiens
  misc_feature 1, 2, 1614: n = A,T,C or G
nnagggagtcgacccacgcgtccgaaaaatctccagggcgagggatcagtctcgaggctgccggttcccctggccctcagggatggagccaaggtcccagggcgggttttctttcctaggaagtggttgctgggttctgaggagtttcccccttggcagccatgagccggcagttctggtagtgactgctgggccctgctggaccagcggtcgcatgccagctcctacacgcgcccggccgccggtcggcgatgtccggctggagctgtcgcctccgccgccgctgctgccggtgccggttgtgagcgggtctccagtcggctcctctgggcgtctcatggcctctagcagctccctggtgcccgaccggctgcgcctgccgctctgcttcctgggtgtctttgtctgctatttttactatgggatcctgcaggaaaagataacaagaggaaagtatggggaaggagccaagcaggagacgttcacctttgccttaactttggtcttcattcaatgtgtgatcaatgctgtgtttgccaagatcttgatccagttttttgacactgccagggtggatcgtacccggagctggctctatgctgcctgttctatctcctatctgggtgccatggtctccagcaattcagcactacagtttgtcaactacccaactcaggtccttggtaaatcctgcaagccaatcccagtcatgctccttggggtgaccctcttgaagaagaagtacccgttggccaagtacctgtgtgtgctgttaattgtggctggagtggcccttttcatgtacaaacccaagaaagttgttgggatagaagaacacacagtcggctatggagagctactcttgctattatcgctgaccctggatggactgactggtgtttcccaggaccacatgcgggctcattaccaaacaggctccaaccacatgatgctgaacatcaacctttggtcgacattgctgctgggaatgggaatcctgttcactggggagctctgggagttcttgagctttgctgaaaggtaccctgccatcatctataacatcctgctctttgggctgaccagtgccctgggtcagagcttcatctttatgacggttgtgtattttggtcccctgacctgctccatcatcactacaactcgaaagttcttcacaattttggcctctgtgatcctcttcgccaatcccatcagccccatgcagtgggtgggcactgtgcttgtgttcctgggtcttggtcttgatgccaagtttgggaaaggagctaagaagacatcccactaggaagagagagactacctccacatcaagaatatttaagttattatctcaaacagtgacatctcttgggaaaatggacttaataggaatatgggactgagttccagtcttttttaataaaataaaatcaagcaaaatcacatattctaaaaaatgcacttggacttaaacaatcccgaggggcagttacggaccgtttggcagggcaaagaggataaaagggggggtaaccgagggaacgcgggtgtggaccttggggtcggcccgaaccggaaggtgcgttgtgtataagaataagaaagacaagacan

SEQ ID NO: 21397 - DNA, 1073 bp, Homo sapiens
  misc_feature 1, 2, 3: n = A,T,C or G
nnngccctgtcgcccaggcttggagttcaatggcgccatctccacgtactgccacctctgcttccccggttccagcgattctcctgcctcagcctcccaagtagctgggattacaaagcacccaccaccacgccctgctaatttttgtattttccatagacattgggttttgccatgttggccaggctggtcttgaacttctgacctcaggtgatctgcccaccttggcctcctaaagtgctgggattacaggtgtgagccactgtgcccggccacatacatctttcaaaaagaaatactagtgagaagggccatccactctccgtacatcctctcctgtgatttgctgtgagacgtatggctgcctttgggaagctccttgtatgagaggggacagaacctgagtctgagaagcagagctcagaccctaagggagaatgggccactgccccagggagctccctgaggttgacgggcaactggataacacactctgctaaatggaagttaatgactgaaagtgaatcatgtgcttgctgtaaggaaattatgcaaacttcactgtagtgagttctttcaggttctcttgggtatggggagacatggaccagaataagccttctctagcttgctcagagtgccaaggtcctcagtgtctgggtgaaggatatgacaataccctcctctctcccttcttggcctcaggatgtccctttggcttgatctagagcctgtctgaattaaagtctctgcccctcacctcacctctagattaaagttgtctcccagtgaggaaacactctccagaaggcatgtggggggagtagcctgggtgctgcaaatgggatgaccccctcctcactcctattgcatcttctcctgcccctacccccagctgccctgtcaaaccctgttcctgaccgatgaggagaagcgtctgctggggcaggaaggggtttccctgccctctcacctgcccctcaccaaggcagaggagagggtcctcaagaaggtcaggaggaaaatccgtaacaagcagtcagctcaggacagtcggcggcggaagaaggagt

SEQ ID NO: 21398 - DNA, 1767 bp, Homo sapiens
  misc_feature 1, 2, 1767: n = A,T,C or G
nnactattgctttgattttggagaagctgggaagtaaggaggtgaggtgaatactctgataattaacacgtgttagagaggaaagttgtgtgaagaggctgccaaagtaaacagcacgaatgaatcttcttgtactagggctgctgcaaaccccaggtagacaaatgacagcccaggctcctgaaccatcaggaacccaggagtctacccaactgtgaggagggggcaggccttcgtcaataagggtcccaccatcacgggctaataatctttctcagtttaggtgatattgaggtattgaaactgttagaaatctgacagatttgaccaagatttggagacgtccacatattgggaaggactgagtgtccctagccactctcctctgggataacgcggacgtcattagtttgcgaagtgggtggggagaacaggaggattgactctaatttggtgtgtagtgggggccttgatgtccttctgcctctgtccacatttccccatgtgactcattgcaccctgcattgctcacagggatcattagttctcccggtagacagagcacctctgcagcctctgctctgctgccttgtgaatttcctacacagacttggttagttacaatttggaaacagtttttttgggtttttttcctttgttttaatcttctcacaatgaagctgctattggtgacagggacaggggagcaggaagccaacccagggaaacatgcgagtttcctgcacaccacttagtcacctgccctcactggccaaccccctactgctgttcccagtcagtctggtttttagaggcatcgtggcaatagaatagctggatacactaatctctacaaggtgtcaggcaggagattcaccttccccagtcccaggggacaggagagaaatctgtaaagggacagatgcaccatctttatttcaaaagaaaaagctccctcagattgtgttactaggagtctcttttgtgacatttactgacctttctccccaatcttaccttcctattggctactttttaaataaaaataaacattttaggctaatatgacaaaaatgagataaaatcttaaaaacattgtactagtgtacagttactaaaatgtgcttactacaaaacagtaaaatatttcactctgtaaatcatcactaagtagttattctgtcctgttgattatgagcctccaaaaatgtttaatgcttgaaggatggtttgggaggcagggaatccttttcttaaaacaactttaatgaggcatatgttacatatcataaaacacccatttcaagtgtacatttcagtgattttagtaacttccctcagtggtgtagctgtagctattactcagttctagatcatgtttatccccccaataagatcttcatgctcagttacagttaacctgtgcttaccccagcaacactaatctacttctctataaattgcctttctggcagtcaatcatggaatcatcatagtggccgtggtctggcttgtactagaatgtttgaggttgtcagcagtacgtctggactgtcgatatgcggggaacggtgtgtggccattgctgcgggcttacatggtcatctgtctacgactcgcgtgctatggacgtggtcaaaccatcgggagcgtctccgcgtcgagttttgcttgtgtaggggcactggtgcagtttggtgggagaggccggtccccggggaaactctggagactttgcgagagccgctctagcgccccctggtggcn

SEQ ID NO: 21399 - DNA, 626 bp, Homo sapiens
  misc_feature 626: n = A,T,C or G
gacccacgcgtccgacagggtctgatctagggagaggccaactctgatacccctatgtgcgctgctaggagctaaggacattcagagagacatggcctggaaacagacaccactcctgcttttggtctacatgatcacaacatgcagtgcccgggacagaacagacctgctcaacgtttgcatggatgccaagcaccataagacaaagccaggcccggaggacaagctgcatgaccagtgtagtccatggaagagaaatgcctgctgctcagtcaacaccagccaggagctacacaaggacaactcccgtctgtacaatttcaattgggatcactgtggcgagatgacgcccgcctgtaagcgtcacttcatccaagacgcctgcctgtatgagtgttcccccaatcttgggccttggattcagcaggcaggccagagctggcgcaaagagcgcttcctggatgtgcccttatgcaaagaggactgtcaggagtggtgggaagcctgtcgtacctcctttacctgcaagagagactggcataaaggctgggactggacctcaggcattaacaagtgcccagacacagcaccctgccgcacatttcagtactatttcccgacaccan

SEQ ID NO: 21400 - DNA, 1943 bp, Homo sapiens
  misc_feature 1941, 1942, 1943: n = A,T,C or G
cacgcgtccgatacattttataatactcgttgttcatctcaaatcttcagtttctttctgttttaattctaacagctctgtcaggattgccacaattccagcctttggcactattatggaaacagtaattcaaagagagttgctggaaagagtgaaaatgcagttggcttctttcctggaagatcctcagtatcaagaccaacattctttgcatacagagatcataaaaacatttggtagagttggccctaacgcagaacccaggttccgagatgagtttgttataccacatttgcataagttagccttggtgaacaacttacagattgtggattctaaaagactggacattgctacgcatctttttgaagcctacagtgcactttcctgttgtttcatttcagaggatttaatggttaatcactttttacctggtctcagatgtttacggactgacatggaacatctctctccagagcatgaggttattttaagttccatgataaaagaatgtgaacaaaaagttgaaaacaagaccgtccaagagcctcaaggctcaatgtcaattgctgcaagcttagtgagtgaagatacaaagaccaagtttttgaacaaaatgggccagttgacaacatcaggtgccatgttggccaatgtatttcagagaaagaagtagaagcaggaaagaagcccccagtaaacactaagatggacctcaagccgactggttccttgtacttgaagtacttgccttttttgtttcctcagttttatgttcttgcattataattttatcctaacctccaaagatatttgcactgcttttaattactgctgtatatttgttgattttggagttacaactgtggtgatagaaaattgagttgatggtctgtaccaagtcccttgtctatgttcttgtctttcagaataatttttatataaatatatatatagtgaagaagttttttttaatttttggatgggatattcgcaaatatctgtattatacactaagctattacaatggtacttaaaataatgtaaatttgaagtcattgttataaaataataaagtggagattacttaagtatttaaattatgaaagaataatgcagactttttattgtttcttaactgactagaaagagccaccagcattactctgtgccttttggacatcagtttgtgtgttctgtaggaattgtgtgcattccattcacacagtatttctttaggatgctgtgatgatttgaattacaaatcctacagtcaatagctaaagacgaaaccttcatttcagaactctcatgaatattctttaagtgctatttaaacctccccagcacttagatgcatataatggacttacctgaggaaagacagcacataggcatggggagaggtaaccaaggtgaattttacaaactggtgtatagtagatttaaatgctcaaaaataaatgtaactgagaagagttaataattgtgagatttttcccaaattgagatacagaagaaaatatagtttgaatctgaaatttaacacttatttatgtaaaacattttatttaagatattttctaatgattttaattttagagagtaccttttcattctgtgtgttacagagaagtactggaaaaggttaaggacacttgggggctacttttttccctctaaactaagaagaacttggtggattataagctaggtagttatcaacctcgtcccttaaggtaagggacccccgtgttgaggttattcaccagagggtaggagagggacagcccggaatgcagtgcgcaaagaaggaccccacagaaaaggggcacaaaaagcgggtgcaggaataggcttcaaaatatgtaaatcgtttcaagcagagaacataatacgaacgacagacatcgagagcaataataaaggtgtactacagcnnn

SEQ ID NO: 21401 - DNA, 1277 bp, Homo sapiens
  misc_feature 1, 2, 3: n = A,T,C or G
nnnaaccctaatcgcccatgtgtaccatactttaggggagagagggcccagtgtttggacactgttgatttaaaaaatcttattttcaggatcataattacggagcccctcctcctccgacacctcctgcttctccccctgtccagacgatcatccctcgttctgacctgaatgccctgccgtcgcctgtagaggaacgctgtggagacagcccgaactctgaaggagaaactgtacctacctggtgtccttgtggtctttctcaggatggcttccttctcaactgtgacaagtgcaggtaagatcctgttccatctaaatttaagtctgggttgctgggattagggtttcttacaagtagggaaaagctcaaagtattctttcttgtgtttgttaatgtagatgattccttagtgctccttggctcgaattctctgcactaggtgaggattgctgacaacaaggaatgagagattgatgttaaagctattgaatttgatatgaaatttaatgtcctggaaacatttggtaggtgggagggagggggtagcatatgcagagacacttcgcccatgtgtgctatgatgtgatgcatgctgttggaaggactactttaagtttattttccctctttaggggaatgagcagggggaaggttattagacttcatcggcggaagcaggacaacatatcaggtggggatagcagtgcaacagaaagctgggatgaggagctttctccttccactgtgttgtatacagcaacacagcacacacctacaagcatcaccttaactgttagaagaccaaacccaagaagcggaagaagagtccagaaaagggtcgtgcagcaccaaagacgaagaaaatcaaggcatttcgagagggatcccggaagtccttgcggatgaagaattctccctctgaagcacagaatttagatgagaatacaactgagggctgggaaaatcggataagactatggactgaccagtatgaagaagctttcactaatctgtacagtgcagatgtacagaacgcgcttgaacaacacctacattctagcaaggaatttgtgggcaaacctactattttagacactattaataagactgaattggcctgtaataacacagttattggttcccaaatgcagttacagctgggaagagtcactcgtgttcaaaagcaccggaagatcctgagggctgcaagagatttggctttggacactcttataatagagtatcgtgggaaagtcatgttacgacagcaatt

SEQ ID NO: 21402 - DNA, 1615 bp, Homo sapiens
  misc_feature 1, 2, 3, 4, 5, 6, 7, 8, 9, 14, 16, 24, 25, 26, 34, 35, 36,40, 46, 47, 48, 51, 57, 64, 81, 82, 99, 100, 112, 114, 116,117, 128, 145, 155, 169, 183, 187, 193, 195, 198, 210, 229,234, 1614, 1615: n = A,T,C or G
nnnnnnnnnagggncncccttttnnnggaagaannncacnttttcnnnaangggcgnggccttnaagccccccccaaaccnnaacggcaagggctcccnnaggggggtttantntnnaaaagccgaangtttttcttccaaaaanaccccaaaanaacacccaaacccntaaaacagccaaanaaancttagngngantttaacgcgccntttaactcttttttgaaantagcnagtcgtcttaaaccgttaaccgaacacgactcgtacgtaaattgtaggcgaggtgccctgagtcaggcggagctgacccaggggtgggaacgatggcagctgcccaggacccatgtgcttggcccaggctatgtcctcgtgagaggtactggggtccacggatatgtgttgtggggcagacagtcactgtgggatgtcttcaaagtcagcagttacagaattagtttactttgaattttgttgtctaaatagctcctgctttattttttaaattaaattttttgtttttactatcacaggctggcctaactaatacaaaataggtgatgaacctctggttttaccataatgcaatgtgccacggaaagtttgggggaggtttttaatgtaattgcactctggttaattggctcgtaccaagccctgccttatgacttgtggaaagcttcaaggagttccactgatgcaaaagggtcttttcctagcttcctggtctgatcagtgctatgagatggacagataagtgtgaatgttttatacagaaaatggaaatgatacatttctcttgttaggtgttttcataaaatgtagcattttttttcttatggaaataagagtttcaggtgtctccccacctagggcaaattcatgcacattgtcatgttataccaccattctggaaatgatttctgtggatttgaaattgcacttttaattttatatatgacagcatttaaatgcaaacactaccatgaatttaatgtataaaatgttgtcaaaccaagggaaaaaaccacagttcaccatgtggagtttactttttttatatgaatgtttgttgtactgtgtctaagcataacttccctaatgtcattacttttacataccagatttgactgaccactaatgtagtactggggataacttaatatcctatgttgtgtcaagactctttgaagactttcttgaattgctttcgtaaaggtctgaacactgttaaggagaaagctgagtatcaacttgcctttctgatagaaatgtttcttgtgccagttttattgttgagatatactatttttttccttttttaattcagttttttaaaaaaacaaatgtattgtggcttccagttaccaggttgtctaggtaatgacagtaaactgactgtagaatgataattgtggtatagtgaccaatagatgccaaacagcttgtggcctcactaaaggtggggtcgcttagtcccgggtaaatgagtgactcagaaacaagaattcctggaaaggcacatgccgaagggacataattaggacatatggtttttcctggaggagactggggaattctcgggacttattttaggggtggactttgaggacnn

SEQ ID NO: 21403 - DNA, 545 bp, Homo sapiens
  misc_feature 516, 545: n = A,T,C or G
actgtgaaggtgtaggcggtttttacctgatgcttcagttcccttccaactttagtataagccaagaataatcaaaccactacatctggatcagagacaaatgacctcccagattggctagttttgtaaggaacttcagttgaaattgaagcagtcatcagctgcttctcaaaccagctacactacataaggaggagcccaagggaaactgcaggacaacaggtccactgggaaacttcagggggccaagctgtcaaagacaagcacagaaaaattcctgcaatgtgcgttagaccttgaggcagcttttaatggcaaaagtcagtacaacccatttcctttttctctaaatgagaggaaagtagaataggttccatcaggaaagagtcacacccaggccatgacaaactcatggaggatcctgtcaatcaaattcctttctgctgggcagaaaaagtatgtgggagcttgttagtaaggtgcattcccaacctatcctgaggatgtgggactcangaagcccaacaatctgccctatttacaan

SEQ ID NO: 21404 - DNA, 5289 bp, Homo sapiens
ccgccgcggagtgacgtccggagggggcgggcctccgcccccgcctgtcggctcctggcccgcggttccaggccgcgattggtggctggagggttgcacgtcgcgccggctataaaggggagggcttgtgacgcaagggcgcctcggcgcgtgtattggctccttcggctgcgggccggctcggctacgcgctctgctccgagccgctcactgcatggtagagtctggtgcccccgccgccgcctgcatcgccgccaccgccgctccgccacgaccaccgccgcctcctgccctgcagccaccgccaccgcctgtgtcgccgccgcctcgggaccggctgtatgattaggccacaatcttcaatgagtaaacatattcctcaattctgtggtgttcttggtcacacatttatggagtttctgaagggcagtggagattactgccaggcacagcacgacctctatgcagacaagtgaactgtagaaactgattactgctccaccaagaagcccccataagagtggttatcctggacacagaagtgttgaattgaaatccacagagcattttacaagagttctgacctggatggggtaaacctcagtgcacttcttttctgttggcctcagtattactggattgaagaattgctgcttcttgttaggaggttcatttcacttatcattacttacaacttcatactcaaagcactgagaatttcaagtggagtatattgaagtagacttcagtttctttgcatcatttctgtattcaatttttttaattatttcataaccctattgagtgttttttaactaaattaacatggctcgaatgaaccgcccagctcctgtggaagtcacatacaagaacatgagatttcttattacacacaatccaaccaatgcgaccttaaacaaatttatagaggaacttaagaagtatggagttaccacaatagtaagagtatgtgaagcaacttatgacactactcttgtggagaaagaaggtatccatgttcttgattggccttttgatgatggtgcaccaccatccaaccagattgttgatgactggttaagtcttgtgaaaattaagtttcgtgaagaacctggttgttgtattgctgttcattgcgttgcaggccttgggagagctccagtacttgttgccctagcattaattgaaggtggaatgaaatacgaagatgcagtacaattcataagacaaaagcggcgtggagcttttaacagcaagcaacttctgtatttggagaagtatcgtcctaaaatgcggctgcgtttcaaagattccaacggtcatagaaacaactgttgcattcaataaaattggggtgcctaatgctactggaagtggaacttgagatagggcctaatttgttatacatattagccaacatgttggcttagtaagtctaatgaagcttccataggagtattgaaaggcagttttaccaggcctcaagctagacagatttggcaacctctgtatttgggttacagtcaacctatttggatacttggcaaaagattcttgctgtcagcatataaaatgtgcttgtcatttgtatcaattgacctttccccaaatcatgcagtattgagttatgacttgttaaatctattcccatgccagaatcttatcaattcataagaaatttaggaagattaggtgccaaaatacccagcacaatacttgtatatttttagtaccatacagaagtaaaatcccaggaactatgaacactagaccttatgtggtttattccttcaatcatttcaaacattgaaagtagggcctacatggttatttgcctgctcactttatgtttacatctcccacattcataccaatatacgtcaggtttgcttaaccattgatttttttttttttttaccaagtcttacagtgattattttacgtgtttccatgtatctcactttgtgctgtattaaaaaaacctccattttgaaaatctacgttgtacagaagcacatgtctttaatgtcttcagacaaaaaagccttacattaatttaatgtttgcactctgaggtgcaacttaacagggagggcctgagaaaagaatgggagggggctattaattatttttagcaaaatgttgcctttgtcttgtgcaaacatgtagaatatgctctttaatttagtaaaatatttttttaaaaggtagagatgctttgttattgtaatcataaacttcctgaaattcttgtaatttttttcccatacttatcagaagtgtgtttaccaacttatttttgtttgaaagtgtgattttttttttccttcccaacctctcttgcaaaaaaaaaagaaatgggtttctgctaatgaattgagcagacatctaatattttatatgccttttgagctgtgtaacttaatatttggatacttgacaatttgttttattatgtaattgataaaatggtgatgtgtattaatgttagttcaaccatatatttatactgtctggggatgtgtggttatagttctgtgggagaaataattttgtcagtgttcaccagcttgtaaaaacttagtgcgagagctgaaacatctaaataaataatgacatgcatttatcatcattgagattggtttgcttaaaattaacttattttgtagaagacaaaatgaattgcacttcacttaatgtgtgtcctcatctttttacaaataaatgaaggattataaatgatgtcagcattttagtaaacttttagacaaaatttgttagggtcattcatgaaaactttaatactaaaagcactttccattatatactttttaaaggtctagataattttgaaccaatttattattgtgtactgaggagaaataatgtatagtagaggacagccttggtttgtaaagctcagttccactagttcatggttttgtgcaacttctgagcctcagttttctcctttgcaaattaataattacatacctttatagattttgaaattaatttaaatattagtatttggtacatgaaggcttaatgttaagtttcctttaatgatccacaataatccctttgatcacgttaatctaaatctagatgtctttgtctaattttttttgaatagcagttataaatgtaaaggactcaaagtttaagtaaaaagtgatactccaccttgtgtttcaaagaatttagttccacctcttcataccagtttaacacttaatatatttcattggattttagacagggcaaaaggaagaacaggggcctctggaggcccttggttatttaaatcttggattatttgtgatagtaatcacaaatttttggctaatttttaacctgaggttttgttttttttttaaaggaaatgcagcctagtcttgagaacataattttatataatcaattactaaatgttaaactattaccacacagcccataaaacagcatttgcgtttattgagagagaggatgtgccatcatgattaatgaaaactatcttttgagtttgaaaagaaattaatttgcagtgtttggattgtatatatggtgctaaaaataaattaatttactttataaaccttatctgtacattatacgatgtgatgaaatttgctttttatccaaatattttgtatcttgtaaatatggctaattataggaatgcctataatacatcttagattccttatatctaataagagttcaaagagttatgagttgaagtcttgaatgcaggaaactatctgatagtgttctaaaatttggttacttgggtttggatacccttagtgggatgatgtaaatagaggctagctacctaggcttgtctatagcaaccataatgttgatgtaagtaatgcggttactgaatcataagaaaatgccatctctttttagttgaaggaaaactctggaagtaggtgccattggtcattctgcagtgcactgcaaccattgtttcccctagtgccctcttttccctagggcattgctctcctattcccacgccttaacacagctctatacctagaagcagccagcccaggcatgcagtcacatttaatcacatcccccttctagagtgcttcaaaatgatgtagtccctcaacttggctaaagaatctcaatctcttgaaatttatttttttaatgtcatattcatctggtaaatatctactgtttgccaggcatttaagaatatggcaaagaacataaaagatggtgtcaccagattttggtcaccaatgagtacccgacccattgccatgattaagagagaatgctttctattggagtttcaggaaatataatttgagaatactttaaagggaagtggaagtataagtgaatgatatttttcttttacatgtaaacaatgaagttatttcaaagttaagttttaaacaaaatacatgaagtagtgtctgccatacatgttaatattctacattcttgcttccttaaattaatatgtttgtgtgtatatatgtgcctcacacctgaattgaaaattaaagactgggtttaaaagattgacaaaaaaacaaaaaacaaacaaacaaacaacaaacaaaaaacaccaacaaaacacacaacaaaacaacacaaacaaaaaaacaccaacaacaaacacaaaccaacacaacaacaaacaacaaacaacgacacgaaggaccgacggcgcggcggccggccgccacacgccacctcgccgcgggcaccccccccctgacgccaccaccccaatcctagcttgtagatccaaagacaaaggcagagcgcgccacatacgcatgtagtgattatgcatacatctaaaccaacacaacaaacgagaaggcatgcctgcgaacaatacacgatcaaaaaatagcactagacgcaagcccagcgactgagatgagcaaaacacagcgcgtgcatagtacaggtgcgtggataaaatcacttgaaaccagcacagcgcaaactcagaaggagctagtgagcgtggcaagcaagaaaagacaggcgaaggacaggcccacaaccacggagcaaggagacgaggagtgaaaaggaaagaaagagagcggagcgacacaagacacgacgcgcccaggtgcgagaggagcagtggaggcaagagacaagcaaccgagacaggaagcggaaaagcggcggcagcaaaggaaaacgaacagagacaggaagaagcggcaaggagcgcaccgctgcagacagcgacgacaacacacaccgggagcgaggacagtcgacgagccgcga

SEQ ID NO: 21405 - DNA, 262 bp, Homo sapiens
tcagtattcctcagggactccagcacagggtgcatgaggagttctccaaagttaaaaactccctcgccgagaagtcctgctagccccagcgtgaaggctctctcctgctgctcagacactggtagatccttgatgtcaacacagcccaaaaaccgcagagcatctttgtagtaggacgcgtggtttccgacccgcgtaccatggcgtggattaaaaggaaatttggcgagcggcctccacctaaacgacttactagggaagc

SEQ ID NO: 21406 - DNA, 1105 bp, Homo sapiens
  misc_feature 1, 2, 3, 4, 5, 6, 7, 8, 9, 10, 11, 1070, 1071, 1097, 1098,1099, 1100, 1101, 1102, 1103, 1104, 1105: n = A,T,C or G
nnnnnnnnnnncgtgtgtatcttgcctctctcttttatggagcgtctgcgtctttgcctttgactcgttttttctccaatagtttgtgcgagagccatgctgttttggagatgctactttgttatccggctgtgaggtcgaatcgttgtctgtgaagtaaggactcatttatttaatttgggctgggaactttttgaaatttaattgtggaccaatgttttgtgaaagctaaagagggcaggggttaaaatagggcttgaatttctcattctgtatagaccagcaaacttccctgtgcaaggcaagtttacatcacaaatccaagaatgtttgcatcctaaatgctagtttgcttcagcccctagttaacctcaggacttggtttgcatataaaaggtagacagctgatatgttttcatgaataaatattgtcagccagaaaaggttggtgtcaggtaatgcatatttttttaagctttgttttatatttatttttcatttagtttttattgggaatggttttcaaagaactctcagttctgcctaggtgtttttgggggagccctgttttccatagtgtaattccatttaagaggttgtctaaaagtctttttaattaatagaaagattttaatatccaagagtagtcaaattaaggatataaactttccacaccttcctgtcgtgacagataaaagcacagaaaggacaacccttgaaatcatgtaacgttggtcatttcaatattttgtacctgttttaaattctgttagtgtatttacttcattgtaaatatttttgagggtacctttgtattttgcttttgaccttggttctgtgatttggatgtcaacaacttccctaaaaagcaccagtgtgttaggttctaatgtcatgacccaatttgtgttattcatctttaatcctgttttcagtctctatgtgtacagcagtatttttaataaagaattacagagataaaaaaaaaaaaaaaaaaaaaaaaaaaaaaaaaaaaaaaaaaaaaaaaaaaaaaagggggcgcgctaaactggtgtacaaaaaaaaaagtnntaagggggcccctgaaccacattcannnnnnnnn

SEQ ID NO: 21407 - DNA, 1438 bp, Homo sapiens
  misc_feature 1, 1436, 1437, 1438: n = A,T,C or G
naggatttatggtgtctgtctatggccacagccaaccagaatgagtgggtcatcttataacctttctggagctccatgaggacatgtatagaatgctgcaccttcagccagctctgctctgatctttgcagatctttaagttgtcactgtttctacggctagacaaatatgactggtggtctagactacccatagttcatcctcctcacataacttatttgaagttgtcagggaatgtcattacactctgatttttaaaattatgcagtattttccagttctcagagaggtcatggttgtacccagggaagtgtgttgcattaactaaagctaaaattatcagaatcctatttacataaagcatattaaaatatctgctccttaattttctgaaggaaatagatgtaagtttctgctacttgaaacctacagaaccgacaaaaattagggtgctaaaaaaatgacagtgaaatctcatcgtaaggcagctagttctaatttgcatttgaatgtataacaaattgcatcacttttcacaaacttaacacctgcctggagtaaaaatctgatttgacccctctgctcatgtttcatcatatttgtagctctgcatcatttagcatttttatgactttttttgctttatataaattattgtaaaatccagattgtttttaccacatgatgacgtgactcaggattaaatcctgagctacagtttcaaaaggaaaatcatttttttcttatgcaaagatggtaaaacactgttgtcattttttccagtattcaataagtagcctttgtacaaatttaaaaccaaaaactattctgttgtttttcttcacctactagccttagtttttaaccaagtatccaaggatgtcaacttgacatccttcccttagcatgccaacaagccattagactgattcttccacctacttttatgaacctccaggaagaaaaacacttgccaaaacattaagagaactttgattctgccttaagagggtataaaactaaaccatttgaaggcacagcccataagactatacttgattttgccccaagattctgacttctggctacatttcacctgcagttacctgggctatcggccgtgatacattttttaattcatttgttttccaccattatatttttatacttttcagttagatatacttctgcataaagagtatatatacagtgtaggataaaggcatatcgtacatggcaatgctgttaaacatggtaagactgaggttctgcaggattaaagtcagattaagggtacagaaagcacaccttgatactgaggccatttagagcaattgtttatgagtggttcagctcccaccagtggcctgttcaataaatgctgccccgtgggagtctttacccaggggttgtgaaggccccttggaaccttctgnnn

SEQ ID NO: 21408 - DNA, 628 bp, Homo sapiens
gaacattgctcttcaaagaagatttaatgtcctttgcccggttagcatacttaagagtgttatatgtgtcatcgtagaatacagaggaaggactaacagcagctatcattatagtttgacagtttcctccaagagaatcctttaacaagcgagtaagcttactatttctgtaagggatatgctgattctttctctttgaatctgctaaggcattgatgacattcccaagagctaaaagtgatctattaatatttgtgccttctacaaatcgggcccccttagcaccggaagtacttgctcgctcagatcctgccaggtcaatgagtgacatcttggcaatacggacattttgattgatacttgctgttttgtcttgttgtcgcaagtaaatttggaaaacagcatgagaacgagaagatgtggcattcatatcagtgggatgttgtgtcctgtttttgtttccattatccaataaatgcaaaatttcttctgaggatttgggctggtgtaaagtaagtccatgaacgaccacccctttttgggtatcttcccggacagcaagtggccctgaatttactaagagatcacaaatctgttcattatatacctccagatatgaaactgcagt

SEQ ID NO: 21409 - DNA, 467 bp, Homo sapiens
tagaattaattaaggcaggcacaaagaaataatggatgaaaatgttccaaatttagcaaaaggcataaacctacagatctgagtagctgagcaaaccccaaacacaataagccaaaataaatcaggaatggccatattagtgtcagataaagaagactttagagcaaagaaaattaccagagacagagagggctgttacattgtaataaaagtgtcaaacaaccgagaagacaacaatcctaaatgtgtatgcagaaaataacacagctgccaaaatacatgaaggaaaaactgtcataactaaaaggaaaaagacaaatctacaattacagttgcagacttcagcacgcctccctctcttactgatggggagaacaactagacagaaatagcaaagaggtagaactcagcaacaccatcaaccaacagatctaatgaacattgctaaagtgcttcacccaacagca

SEQ ID NO: 21410 - DNA, 3897 bp, Homo sapiens
  misc_feature 3897: n = A,T,C or G
gcgtccgcagaaaactcttgattttctctgggaaaaaagaagcgaagtagtaatttagtgggcgtgactataaatattcatactggagattgggtacgaaaagatagtggagttggagcagggattgattcatattatgaatatctgttgaaagcctatgtcttgcttggagatgacagttttctggaaagatttaacacacactatgatgccataatgaggtatattagccagccacctcttctacttgatgtgcatatccacaaaccaatgctgaatgctcggacttggatggatgctttgcttgccttcttcccaggcttgcaggtgttaaagggggatattagacctgctattgaaactcatgaaatgttatatcaggtgattaaaaaacacaattttctaccagaggcatttaccacagatttcagagtacactgggctcaacatcctttaaggccagaatttgcagaaagtacctacttcttatataaagctacaggagatccttactaccttgaagtagggaagacacttattgaaaatttaaataaatatgctagagtgccttgcggatttgctgccatgaaggatgttcgtactggaagtcatgaggacagaatggattctttcttcttggctgaaatgtttaaatatctttacctgttatttgctgataaagaagacattatttttgacatagaagattacatctttacaacagaagctcatctgttacctctttggctctctactacaaatcaaagcatctctaaaaagaacacaacctcggaatatacagaactggatgacagtaacttcgattggacttgtccaaatactcagatcctctttcctaatgacccattgtatgctcaaagtattcgtgagcccttgaaaaatgtggtggataagagctgtcctagaggcatcatcagagtagaggagagtttcaggagtggagctaaaccccctctgagagccagagatttcatggccactaaccctgagcatttagaaatcctgaagaagatgggggtgagtttgattcacctcaaagatgggagagtccagttggtccaacatgcaatccaagctgctagttcaattgacgctgaagatgggttgaggttcatgcaggagatgattgaattgtcaagtcagcaacaaaaagaacagcagctgcctccacgagctgtacaaattgtttcccacccattttttggcagggtagtattgactgctggaccagctcagtttgggctggatctgtctaaacataaagagacaagaggatttgttgcaagcagtaaaccatccaatggttgttcagagcttactaacccagaggcagtgatgggaaaaatcgcactgatacaaagaggacagtgcatgtttgcagaaaaggcacgcaacatccagaatgctggagccattggtggcattgttattgatgacaatgaggggagcagcagtgatactgcccctctgttccagatggcaggtgatggaaaggatacagatgacatcaagatccccatgctgttcttattcagcaaagaaggaagtatcatactggatgccatccgggaatatgaggaggtagaagtgctcctctctgataaagcaaaagatcgagatcctgaaatggaaaatgaagaacaaccatcctctgaaaatgattctcagaatcagagtggtgaacagatttcatcaagttctcaggaggttgatttggttgatcaagagtcttctgaggaaaattctctaaattctcacccagaatcattatctctagcagatatggacaatgctgcaagcatttccccttctgaacagacttctaatcccacagaaaaccatgagactacaaatcttaatggtgaatgtacagatttagataaccagcttcaagaacaatcagaaactgaggaagattccaatcctaatgttagctggggtaaaaaggtccagcctatagactccatattagcagactggaatgaagatatagaagcatttgaaatgatggagaaggatgagctatgacttgctaaacaatctgttggtaggtatttaaaaagaaaaggtaaactgtgtgtggttaatagacatcctaatactaagcaggctttctaatgggaggctttaagtatggtgatgaacaaccacgttctgactggcgtagttatcgtaggaatctggagcatgctgtgttagaattgaccttgtttaaaactgtcccatcaaaaatggaaatccacagttcccccttcaaatgcagcactgcaccaccctgcaacacctcaggccagggaaagattactgagcattcctgcgaaccagatttctgttgtctctggatagacaagaaacaaaattcatttagtagtggagtggggaataggagtttggatagccttctaattaaaggaagctcgcctttcttggttttgggggttagaggctcttttgggaagatgcatccgagtattgtggcattctgattatgctgccttcacaaaacactctaagtgacctaagtggttatgaagcaaatgcatttatggtgaaaacagtctttgctcattgctttctcttgtttcatttagtgacaaatgatcaagatgacttgattttttttccttcttaacaatgtcttttttatttaaaccaaaggtgaagccagtgtactttctcagtgagttctctgcataaagactaatcagtgggaccaggtaaaaaggtcatataatacattgtggagattgcttacttaatacttctgaaaaatggagtaagggagaaactgtaatgttgcaatatgaacctcccattgggccttccatagggaaagctgtgactactctgaaatggaacctagcattatatccttgtagggtagattataaatcatttccagttcatttctcttagaggtgattacctctagccatcagccttactccatcccatgtttggtatgcaatttgagccacaaggctcgtatcgccaacagctatatacattttgttccatttttctgtcttacagagccatgataaaactgtggttagtgagttaaaattcctggagtaactactgtttttctcctttgaaacttaggtttctaaagttgcacctaaggaatctgtcacattttctgttgaatcatggtttttgtttttgtttttaacagatattccttctgatacggacttgaaaattagtgtatggtgacctgtgtttaaaaaaaaaagtacaatacaactacatatagctatatagcttaatgagacttccacccccccccttttttttttgggtttgttgttgttgtagtagtctggtgctggccacatttaagtcttaaaaatttttaaattttgttgttgatgtttgtagacagccctgttgttgaaatcatggctttattcattttatttattttttaaacttgcctgaatttgttctaaaggaatatttaagagacataattttcttctctttaccataacattacacaaaaacgttttttcttaaaaaacagggtgtgtgaaggtacctgattgaggtgtagtggagcttgttaaaaacaccaggggctgcttctgagtatcgtatattccagggacacgcttgtgtaagtccgccgcgaaccctattcccttccggaagagaaaacccaggtacagatattcctgggaaataaatggagccgcgacaaacccttcgggagcacttgggggcgaaaatatgttgaaccctttggctgatatctcaagacaccggttgttcccctgagtggggacacgaatatacattgcggaagagtgtgtgttaccagccagacactatcgcttcatcgtgggagcgctaccccacaggtgtaatacn

SEQ ID NO: 21411 - DNA, 3198 bp, Homo sapiens
  misc_feature 2990, 3032, 3037, 3071: n = A,T,C or G
gtccgcccacgcgtccgcggacgcgtgggttggacactgagccaagcagacaagcaaagcaagccaggacacaccatcctgccccaggcccagcttctctcctgccttccaacgccatggggagcaatctcagcccccaactctgcctgatgccctttatcttgggcctcttgtctggaggtgtgaccaccactccatggtctttggcctggccccagggatcctgctctctggagggggtagagatcaaaggcggctccttccgacttctccaagagggccaggcactggagtacgtgtgtccttctggcttctacccgtaccctgtgcagacacgtacctgcagatctacggggtcctggagcaccctgaagactcaagaccaaaagactgtcaagaaggcagagtgcagagcaatccactgtccaagaccacacgacttcgagaacggggaatactggccccggtctccctactacaatgtgagtgatgagatctctttccactgctatgacggttacactctccggggctctgccaatcgcacctgccaagtgaatggccggtggagtgggcagacagcgatctgtgacaacggaggtgagaagcatcccctccccctacattgctgtctccctgacggcgcccagcccgaggagtgggcactcggctccggacactgtaactcttgctctctaccttgctcacggggcctcaggcttcagtgcttacctcgatgtctcatacctctgcagcggggtactgctccaacccgggcatccccattggcacaaggaaggtgggcagccagtaccgccttgaagacagcgtcacctaccactgcagccgggggcttaccctgcgtggctcccagcggcgaacgtgtcaggaaggtggctcttggagcgggacggagccttcctgccaagactcctttatgtactgaaggacttaagagtgaaaaattgaggcttttcctaacccattcaaactacaataaaaaatagccttcttgcagaattcatattttgtgcctttgagataactccttagaataatgatatcaaaatcatgatttgaaaaactgattactttaaaataatgaaattagttaaaaattaaaaatttaaaaaaaattatcaaataaaaatgctctcattttaaaaagcaaaacaataaaattcccattatcttcatacttaaagtcctgaaatgtcatttatataatttgaatgtttcccagtttggaacttaggcaggagggatatttccttgaattatcaaggatattccatacagacttttaaaatgtcagtctcattaggagatggcactgagactttagcaaatagtgtagtatggatgcaggacaaactacacaacttattataaatgcattacagatatttacatagtggaatcctgcttgaatgccagaagttgctactgggtaggactcataactattttacaaagttttcttacgcacatctactacttttaaaattttatgtttaacaatttattctattttaaaatatgtactgtattttgaacataactgcagaataaaaatagataatggcacattagaaaactaagtatcccacagatgattggataatgagaaaaatgtacctacaatcatctcatcagaaacaagctacatcatggaatgttagttatccaagcctgcacaataatgacattttaaactgcaatcatctattggccagcatcacactgaaggcatcgttaaacattcaagcaaagattgctggcataaactattaaaagacacacacacacgcgcacacacacacagatacacacacactctctctcattcatgcacacttcccacattataattacattgttctaaagatagatactgatttttttttccacgagaaacattatcaaaatttgctactaaaagatgacagtgctttcacaagaatagtacaagttagctcgcaagtacaagacaatgggggtaaacagtcttaaattttctaagtagtaattttaggcttttctggcaaccataccatacttaattatgcataaactttgcagtttgtaacctgaaatctgtaaaaacaacaacaaaaaaaccaaaaacaagagctaatttcaaaaattattagatatttgataaccctgtatcatacattatataatttcatatttttagcctcaaaacataggtgtaaaatattgaatttaagacttgaaaaataaaatcatttttgaaatgctgaaaattctaaaatttgtttacttaaaatcttaaataaaaaaggaaaatgattataaatgaccttgatttagcttaacaatgtgcataaaagcactgtatgtctttaccatgttttcactcacttaaaaaaaagtgttctttaatgtttttccttttgcataatgtgcaaaataaaaggcaaaaagattaaaagcaaatttctatctttctcttgcctagtgcttttatgactccgttaacattacaaagtcaacagggactatgcaaaactttggtataaatgataatactactaccgtcacagttgagggttaaggggtggtcaaaagaaatggaagtgggaagaaagattcagtaacacccccatttattaaaacaccagcaaattaaaagtgaaataaatcacaatgaattataatacaatttacacattgagcacagaaaaattaataaatctaataatatttataaaaaaagcaaaatcagtctttttccagagactaaaaaccgtttttcagtctgatcaactgctgctacaccaactttagagccaaatttaatttcaagtaaaaaaaaaaaatttacaaccacagatttcgcataaatggaaactggtctttccttgatttccctttgaagtcactaatgagtatctaaaactgttgtactgcaagggtttttaatcaacttcctgggggctgtgatggggagggaaggagcatanacgaatctggtgaagagcaggctctgactttctgtccgctcntgggntgaggacatggaaagtggctacagctctctttgnggagaggtagactgactcttggggaatggtgctaccgactatgctgatagctttttggtatgggggctactcggactgagaaaaggctttctgactatcatcttatcaagcagtatgaagccccgaa

SEQ ID NO: 21412 - DNA, 3194 bp, Homo sapiens
  misc_feature 1, 2, 2698, 3188, 3189, 3190, 3191, 3192, 3193, 3194: n = A,T,C or G
nnccggttgagatccaacactccttcgaacgttgttggacaccatgttgaattattcccccatcggttgtgaaaaactgtgctacattcaggcttacccattgaactcagtatatattttttttccttcctgtcttttgtctggcaggataccattcttgttgctcttctgtgtaatgaagtttaaatgcttgtttggaaaactttatttaacagtttagaaggcttgatagaaagagtgcattagtctgaagagtatacattggataggaaagaatttccttcttttgtttctccaaatctttccgccttatttagcttgagatctttgcagcttggttcatggattctagccttgcccgttgcgcagtatatactgatccagatgataaaccagtgaactatgtcaaaagcactctcaatattacatttgacaaaaagttttgtacttttcacatagcttgttgccccgtaaaagggttaacagcacaattttttaaaaataaattaagaagtatttataggattaaagtgacttcatttgtatacatttggaatctaaaccagcttaaaaacagtttcctcaatgacttagatacacagtataactgatgctcttctggaataccacatgagacatggtcagaaacagtgcttggaaggacattacacaagaaattcagagtaatgctttgaagatttccccccttttgttttattcctgaaggaacatcagtacccgatcttgaagaaattcaagattcaaaaagaattttaaatacaccaacatgagacatcagtagtcagttggttttcagtaaagcttgttccaagttgttctcaacttaggaagtaattttggtgtgatctagcaaaagagtaggaatcagcgatacaaccactttggaagtttatagtataattgaaattattagaagaattcagcaggttacagacatacttaaactgggattaaaacctcatagtcatttttcttaattgcccttaatattttgacatatagggatacataaatttaaagaatattttttctcagttttttcagatattgccatactgaacctcattctaaactggtgctgtggatagtctttccctctcccctcctgttttagtttaaggaaaggtttccttcatggaaaagcacttttaattttgagaatttcacatttaaaataagccaaaagcctgatgttcacattgtgcttttaaactccgtaacagctgaatacaacataacatagtctcccttgaaattccctccctttttcagtagaggataaatagggtgactccagctgttggaatgagaatggggatacccccaaaataagattctggtgaagaaaaagtcttgtactaagttcccctttaggtgtagccaagtctataatataattatgatcatgaatagactccagaatccacaaagagaagagggcttggatgtcaaaaattcttccattgtggggtaggtggtcggggatgggagaaagggaaaagtcagggaaaggggagaagaaagaaaaacacatttggccttaaaatagcatgcattctcccagaagcccatagtaaagaaaatgacagatcgtggtcagcagactcttatcaaattggtatgtaaaagatttcttcaagctccattttgcagagaccaccacttagagaatcaaaaaattcctgttttgatacttctaagttaaaatatatgttacagtttatctggtacttcatttttcttaactaaaattactttttactttaagcttgaataaaaatcttcattggtaactgtatgtaattaagtggcaacttctctttacctcagtatagttaaaaaccattcatattttaagtgattcatgtataccctgaagccgttaatacaccccagtctctatggtaacatcactaaatgtgggcatagaaactccacagctgtttacaaatttggttacagtgtgctatggtgcatttgtaacactcagatttgtgcccattcaggggcaatttggcactcagattctactctacttcacctaaccacccctagatctgagttttcagagtgcttctgaagtacagtttaaaaacactttttaaaaagtggagtaaaagtgaggcacattttacaagaacataactcctattaaaacggagtaacaactatgcaaaggtttctatagcagctaggtgagtttgttttccgggtctgtcttaactggcagcttcctgtacatactggtacttatttgctgtaaacgtctgtttcatacatttgccatgcagtgactgtgctcgaaaggtgaaatcaatggtaaagaagcctaggattttatggtatgagaaactgatcgcaggattttctgatccatagctattaattgaaaacttctgatagtgctgtaggctctatagtaggcttaagagtgagtcttatactatgaagccagccacaagatactaacaaatgtataaattgaaaagtaccaatactttttgcacatagatcaaaatagagtggagaatttgggctccaaaaatcaggttagtaggctcatttccatgtgcttaaaaatgtttttgttgttatgcattgattaagggctagagcaaatataaaattaaatgtctttttcctccaaatacattaaaatggttctttttcctccaanataaaaaaaaaagaaaaaaaaaacaaaagaaaaacaaagacacagacaaaaaacagaaaaaaaaaaaaaaaaagaaacaaaaagaaacaaagaggggggggggggaaaaaggaaaaccacgggaggggggcggcaaaaggcaacacccggcgggggcaacaggtgcggccccacaggggggggagaaaaagacggcgagtgcgcggcgaaaaaaaaagcagcgcgagcgaacacgtcatggacgggctccgggacagacaccaaaggggcggcgaacagaccaccacccagcagaacaaacgctgcggcatcaagacacagcgcctggtgacacaccacgacgccgcgaagaacgccggggtcaaaacttcgcgagccaccagcgggcgacgacggagtgaaatagacaggagaacgacggccgcagccagcagagacgcacgcacgcacacgcgcaccagacgaccacaacagcgagtcgcactccacnnnnnnn

SEQ ID NO: 21413 - DNA, 482 bp, Homo sapiens
actcatatctatatctgtttttagtctgttttaaaatgttgatttggctgaagcatatgaaagaaatccagtcttttacaaatatatagatggaaaagggctagcccttacagataattgtggatattcttctttaatactatccagtagtagtttctttaaggttggttgtgaagtgtaatctgaaaccacaccaaagaacttttctaactcctccattaaaatccatttattggacaagcgtggtggcttacgactgtaatcccagcactttgggaggcctgaggcaggtggattgcttgaactcaggagttccgggcctgccggggcaacatagtgaaactctctctctacaaaaaatacaaaaagtagccagacatggtggtgcacaactgtggtcccagctactcaggaggctgaagtggaaagatggcctgagcccgggaggtgtaggctgctgtgagccaagattgcgccagtgt

SEQ ID NO: 21414 - DNA, 777 bp, Homo sapiens
  misc_feature 777: n = A,T,C or G
accacaactgggtttagcaattcgggtaggcacagcaggtccggcttggccctgcctgctttgactgccttttcgggagttttaaacctcctacactcggaatgtagccctgattgtggtttctctgcatagcaagttcggacttaagcggaataagtatcggcttatttcgcctgcgataaagatgcttaattctgcgttcgaaatattctgagcgagtcctgggttagggatttcttagagtaacaagtgcatgcttcgattttaagtgcccctgtgaatgtgatttcttagctcttgcaagtccatatttggtcgcaaccagtactagcatagccatgcctgcgactccttagtcccagtaactttcggtttcataataacttaccctgctttacttatgcctgagttttaaatatagaagtccgggcacgtaggtgaagaagatattttaggagtagcaagtagcggtttagcagtgtctgcagtcccttagttagaagtcctggtgagaccgagcagatattgatataggcctgacagcgatattacctctgtgaaaccacattgtttagaagtgtttgcattttcttctttgtagagtccatttttccatgttttgcttagttttgaattttcatttgatgaatcttcccaaatgtattgtttttattgtgtgtgcgtgtgtttttcagctaacttgccctttaaaaaaaaattgttcctaatttttgttttgctgaccctcagctttatgctgtctgttcgcgctgtgan

SEQ ID NO: 21415 - DNA, 4146 bp, Homo sapiens
  misc_feature 3169, 3170, 3171, 3172, 3173, 3174, 3175, 3176, 3177, 3178,3179, 3180, 3181, 3182, 3183, 3184, 3185, 3186, 3187, 3188,3189, 3190, 3191, 3192, 3193, 3194, 3195, 3196, 3197, 3198,3199, 3200, 3201, 3202, 3203, 3204, 3205, 3206, 3207: n = A,T,C or G
  misc_feature 3208, 3209, 3210, 3211, 3212, 3213, 3214, 3215, 3216, 3217,3218, 3219, 3220, 3221, 3222, 3223, 3224, 3225, 3226, 3227,3228, 3229, 3230, 3231, 3232, 3233, 3234, 3235, 3236, 3237,3238, 3239, 3240, 3241, 3242, 3243, 3244, 3245, 3246: n = A,T,C or G
  misc_feature 3247, 3248, 3249, 3250, 3251, 3252, 3253, 3254, 3255, 3256,3257: n = A,T,C or G
cacgcgtccgcccacgcgtccggtgtgttcagtgaataagtagaatataaaaaaatataaccagtattttacttcaaaagccaaaaagaggcaataagaaaagacactttgtggtggcctttatgtgtgcattaaaattggtttctgtaaaacgtgtaataagttgagtatctacgaagagtatcaagttctgaagtttaatttttttattatcctcctctcttcttagtaacttctttctgtggcaaaaccacaattctttaagattcctattgttcaggctaaggcaaatttttttgtttgtttcttcagtttaatattttgattttgtgtttttacgtaaatatttatattccttgaaagcaatttttgccaaggtagttcagtttaggaatatgttgttctaaaatatgtcttagaatcctgaaagcatagattttgaaatgtttttttaatgaaaatgaaggtcagagagaataattgccctgaccacatttgcctttcagtaggaggaggctgtgaaatagtaaaattataatcgtttatgccatgataaatacaagattggtaaataaatacattgattggtaaattatgagaatcaaaatgataaaaagagcctgcttttttccctaaccaatatagctatcttaagtatccttaggtttctgtgaagaaccatttcccatgttttcttggcaaaataatgctgtattccatatgtacatgtgaaatgatgttttaaattgataaaagcttaaataagatctacctatacccagtattttcatgatattagaacaaatgggtttttggttatattttatatttgtcaatataatttttgtattcacattctgttacactctgcctattcattgatatatgatattctgtaaatattgtacaatttgatcttttttatggtttaaattagttaattacatacaaattgattggcttatcacaaaaatcatttcatcagtaaaccttgttaacattttgtactggtgacccacctcttaggactttggtcttatccacgtgtatgttgttttcatttggtccaaataatattttatttgtatgggtatcttctaagactaaataggtagttgtgttctttatttttaaaatttctttttagagcaaatgttatgggttcttacccaaagagtcaaaaactatttcttaagaaagagcagagttattcatgactgttctttatacactaaaagcatgcatctaatctaatagtcctcttattatgcttttagttgtatgagtctctttctatgaactgaacacaaaactcaggaattggtggcttaattttagatcagtgcttgtactaggcttagttatatgaatctttataacacataattactaactttgtagccatatatgtaattgactttgaatgttatttacctgaaattaatcttccttcacacatggaccgtaaacggttcccagttgtctgagagcctcatgagggtttctaggatttatgaccttatgaccagtttttttcatttaccaagattttattttcctacatgaaaatttaattgagtaataattattcacatgtgcattttctttttagctgttaaatgtactatgccatcatccaccatttagtaaaatgtagctggcccaggacatgtaaaaaaaaaaaaaaacaacaacaataaatagggcatgtgaaatgttaagttacagcaatagatattttatttgtatttcatgttagtacttttttgttttatatcacttataaaggtacagtgtactctttgtcacagctcagttggtaaccgcattccattgaaaagttggccttgtaaaatacaactctcatttaatattcatgcttttgtgcctttaagaaaatattttttgtcattttttgtgttacagaactataatgtgattcaaggtgtttataggcttgtcataaaagggtcatttctgtgtgttactttctttttatatagctatagtatatttaaacaataatactatcttttataggggtttgtctatttacctattctttactcagacattgatgtagacttgtcagattattctgagtattgttaacagtgccttttcgatggaatcacactttttggctgtcaccttgtgccatatacacacaaaattttgtggaaggcagttttaactttctgaagaatatctgtcaaaatttaagaaaacaaatgtataaaattccattttttccagtgtttagcatttctagtaagcagtgaggttgtttgacatacagtgatgatggcattattgataagccatacatgagactgcagattatattgaatcatattaaatgtacagaaataaaatattagatttatatcaaattttccaatttgaaccagtggggaaaatcccacagaaatcagtaagtttacatttcaatttctatcttatttgactaagtggaaagagattctttaaaatgtataacctgccattatgtaatttggtttcattttattctacctgttgtgtgagtttagtatatttaatttactttttgttactctttacatactgtttatttttgttagtttttaattgaagatggactgttgaaattgtataggaccagtgtcttattaatatgattaatatatttagaagagccacgtgaaacccatgacaaaatgaatgtgaatattctttctaaaaatttagaaaatgttatctttttgcatttattatgtaaaactgttttacagtatcaaaatttttcacttaaagaaaaaaaaatgccatgaaacatttgaactgatgagccacagaacttcagttgaaatttttttcactttttagcatgctaaatatacatctgagtttaaatgttctgtttaatggccattcataaattcaagcactaccactggtcagttttgtgtgatagaataaaaatatgttacctgcagtgtaagtacagcacactgtcaaattcttttccttaaggtgcacagtaaatgtacagatagttataggccactgttttgtaatgtagtacatttctaatctattattcctaacctattataactgtttgcagaaagaaaagaatttttctaataatctgtaaaattatgctaacttctacaagtaggcttcnnnnnnnnnnnnnnnnnnnnnnnnnnnnnnnnnnnnnnnnnnnnnnnnnnnnnnnnnnnnnnnnnnnnnnnnnnnnnnnnnnnnnnnnnatgaacgaggacaagcgccattcacagggcacattcaccagtgactacagcaagtatctggactccaggcgtgcccaagattttgtgcagtggttgatgaataccaagaggaacaggaataacattgccaaacgtcacgatgaatttgagagacatgctgaagggacctttaccagtgatgtaagttcttatttggaaggccaagctgccaaggaattcattgcttggctggtgaaaggccgaggaaggcgagatttcccagaagaggtcgccattgttgaagaacttggccgcagacatgctgatggttctttctctgatgagatgaacaccattcttgataatcttgccgccagggactttataaactggttgattcagaccaaaatcactgacaggaaataactatatcactattcaagatcatcttcacaacatcacctgctagccacgtgggatgtttgaaatgttaagtcctgtaaatttaagaggtgtattctgaggccacattgctttgcatgccaataaataaattttcttttagtgttgtgtagccaaaaattacaaatggaataaagttttatcaaaatattgctaaaatatcagctttaaaatatgaaagtgctagattctgttattttcttcttattttggatgaagtaccccaacctgtttacatttagcgataaaattatttttctatgatataatttgtaaatgtaaattattccgatctgacatatctgcattataataataggagaatagaagaactggtagccacagtggtgaaattggaaagagaactttcttcctgaaacctttgtcttaaaaatactcagctttcaatgtatcaaagatacaattaaataaaattttcaagcttctt

SEQ ID NO: 21416 - DNA, 2687 bp, Homo sapiens
actcctaggggcttgcagacctagtgggagagaaagaacatcgcagcagccaggcagaaccaggacaggtgaggtgcaggctggctttcctctcgcagcgcggtgtggagtcctgtcctgcctcagggcttttcggagcctggatcctcaaggaacaagtagacctggccgcggggagtggggagggaaggggtgtctattgggcaacagggcggcaaagccctgaataaaggggcgcagggcaggcgcaagtgcagagccttcgtttgccaattcgcctccagaccgcagacatgaaacttgtcttcctcgtcctgctgttcctcggggccctcggactgtgtctggctggccgtaggagaaggagtgttcagtggtgcgccgtatcccaacccgaggccacaaaatgcttccaatggcaaaggaatatgagaaaagtgcgtggccctcctgtcagctgcataaagagagactcccccatccagtgtatccaggccattgcggaaaacagggccgatgctgtgacccttgatggtggtttcatatacgaggcaggcctggccccctacaaactgcgacctgtagcggcggaagtctacgggaccgaaagacagccacgaactcactattatgccgtggctgtggtgaagaagggcggcagctttcagctgaacgaactgcaaggtctgaagtcctgccacacaggccttcgcaggaccgctggatggaatgtccctatagggacacttcgtccattcttgaattggacgggtccaccgtgagcccattgaggcagctgtggcccaggttcttctcagccagctgtgttcccggtgcagataaaggacagttccccaacctgtgtcgcctgtgtgcggggacaggggaaaacaaatgtgccttctcctcccaggaaccgtacttcaggctaactctggtgccttcaagtgtctgagagacggggcttggagacgtggcttttatcagagagagcacagtgtttgaggacctgtcagacgaggctgaaagggacgagtatgagttactctgcccagacaacactcggaagccagtggacaagttcaaagactgccatctggcccgggtcccttctcatgccgttgtggcacgaagtgtgaatggcaaggaggatgccatctggaatcttctccgccaggcacaggaaaagtttggaaaggacaagtcaccgaaattccagctctttggctcccctagtgggcagaaagatctgctgttcaaggactctgccattgggttttcgagggtgcccccgaggatagattctgggctgtaccttggctccggctacttcactgccatccagaacttgaggaaaagtgaggaggaagtggctgcccggcgtgcgcgggtcgtgtggtgtgcggtgggcgagcaggagctgcgcaagtgtaaccagtggagtggcttgagcgaaggcagcgtgacctgctcctcggcctccaccacagaggactgcatcgccctggtgctgaaaggagaagctgatgccatgagtttggatggaggatatgtgtacactgcaggcaaatgtggtttggtgcctgtcctggcagagaactacaaatcccaacaaagcagtgaccctgatcctaactgtgtggatagacctgtggaaggatatcttgctgtggcggtggttaggagatcagacactagccttacctggaactctgtgaaaggcaagaagtcctgccacaccgccgtggacaggactgcaggctggaatatccccatgggcctgctcttcaaccagacgggctcctgcaaatttgatgaatatttcagtcaaagctgtgcccctgggtctgacccgagatctaatctctgtgctctgtgtattggcgacgagcagggtgagaataagtgcgtgcccaacagcaacgagagatactacggctacactggggctttccggtgcctggctgagaatgctggagacgttgcatttgtgaaagatgtcactgtcttgcagaacactgatggaaataacaatgaggcatgggctaaggatttgaagctggcagactttgcgctgctgtgcctcgatggcaaacggaagcctgtgactgaggctagaagctgccatcttgccatggccccgaatcatgccgtggtgtctcggatggataaggtggaacgcctgaaacaggtgttgctccaccaacaggctaaatttgggagaaatggatctgactgcccggacaagttttgcttattccagtctgaaaccaaaaaccttctgttcaatgacaacactgagtgtctggccagactccatggcaaaacaacatatgaaaaatatttgggaccacagtatgtcgcaggcattactaatctgaaaaagtgctcaacctcccccctcctggaagcctgtgaattcctcaggaagtaaaaccgaagaagatggcccagctccccaagaaagcctcagccattcactgcccccagctcttctccccaggtgtgttggggccttggcctcccctgctgaaggtggggattgcccatccatctgcttacaattccctgctgtcgtcttagcaagaagtaaaatgagaaattttgttgatattctctccttaaaaagtgtcactcatcttttctagaattttatactgaaatcacatgcctgacaaaatacctgt

SEQ ID NO: 21417 - DNA, 622 bp, Homo sapiens
  misc_feature 1, 9, 591, 613, 614, 615, 616, 617, 618, 619, 620, 621, 622: n = A,T,C or G
ngctttggntgctgttaacatggcaaaggggttgcaaggagaggcggagagatgaaactcggggaaaccttgatggtaccaagaatcggcagaagaatcagccccataaattttaaagactttcctcaatcgggatactgttcattaagattccacataagatgataaaatcatagcttctcgttctctacgatttggatatatgggtctgccatggagtggtattttcagttcctcccactccagccaagttaagtcttctgagggatccagccattgcaaagcaacactgatggccaaatcatagtgtgccatatcatctagaaaggtgagttgccgtcttccttttgggtcaaattcattttcccgaagtctgatgccaatataatctcccaagagctttttcatttccttctttatgagccttctttccatgttaaaggcttagccagctgagcaggtatctgcagctaacactacacttagacccagcttctctgagtctagaggctgcaatcgtggtacaggtctctcgggctgttctattaagtgcctgctcttaacaaattcccctttgagaatcgctcaccnaacggagaccggttccagtgcnnnnnnnnnn

SEQ ID NO: 21418 - DNA, 307 bp, Homo sapiens
acatgagtgtattccgtttattaatgaatatatgtgcacagcaggcctgagttgctcaaaccctgcacatgccaaagacaggcccttgaccagctcctgagagagaacctctaagcccttggaatatgccacctgataagagtgtttgtttatgctgaggtcttgggccacgcagtattggtttggcttctgggatggtaaagggagagtagctggcgtcactcatgtgggagctgcgtacctagacgagagaccccagtaaaaaccctggacaccaaatcttgggtgagcatctctggttggcagt

SEQ ID NO: 21419 - DNA, 2040 bp, Homo sapiens
  misc_feature 2039, 2040: n = A,T,C or G
actatagggagtcgacccacgcgtccggtggagtgaaggtcgcaccgcggcgagatggggtttctccatgttggtcagtatggtctcgaactcccgacatcaggtgatccgcctgcctcggcctcccaaagtgctgggattacaggtgtgagccaccgcactcagcctccctgttttgaaggattgacttctaaagacttggtacgtgaggaaaaaacacggaagaggaaggggaaagcaaaggagtcagggatggctcttcctcagggtctactgacattcagggacgtggccatagaattctctcaggaggagtggaaatgcctggaccccgctcagaggactctatacagagacgtgatgctggagaattataggaacctcggctccccggatatctcttccaaatgcatgttgaagacgttgtcgtcaacagggcaaggcaatacagaagtgatccacacagggacattgcacagacaagcaagtcatcacattggagaattttgtttccatgaaattgagaaagacattcatggcttcgagtttcagtggaaagaagatgaaacaaatggccatgcagcacccatgacagaaatcaaagagttggctggtagtacaggccaacatgatcaaaggcatgctggaaacaagcgtattaaagatcagcttggatcaagctttcatttgcatctgcctgaaccgcacatatttcagtctgaagggaaaattggtaatcaagttgagaagtctatcaacaatgcttcctcagtttcaacatcccaaagaatttgttgtaggcccaaaacccatatttctaataagtatggaaataattccctccattcttcattactcacacaaaaatgggaagtacacatgagagaaaaatcttttgaatgtatacagagcttcaaatcctttaattgcagctcactcttaaaaaaacatcagataattcacttagaagagaaacaatgtaaatgtgatgtatgtggcaaggtctttaatcagaagcgataccttgcctgccatcgtagatgtcacactggtgagaaaccttacaagtgtaatgagtgtggcaagacctttggtcacaattcatccctcttcattcaccaagcgctgcatactggagagaaaccttatgaatgtgaagaatgtgacaaagttttcagtcgcaaatcacaccttgaaagacataagaggattcatactgaagagaaagcatacaagtgtacggttcgcgatgacgctatcgtgtatattgcatatctgggagaacatactatacttgacactggagagaaaccttacacatgtaatgaatgtggcaaagttttaaatcgactatcaacccttgcacgccatcatagacttcatactggagagaaactttacgaatgtgaagaatgtgacaaagtttacattcgcaaatcacacctggaaagacataggaggattcatacaggagagaaacctcacaagtgtggtgattgtggtaaagcctttaattcaccttcacaccttattaggcatcagagaatccatactggacagaaatcttacaaatgtcatcagtgtggcaaggtctttagtctgaggtcactccttgcagaacatcagaaaattccttttggagacaattgtttcaagtgcaatgagtatagcaaaccatcaagcattaattgacatcagagtcaaatcagcattgacctgagtttgagttgacttaacattgatttcaagcattaatcgacattaaactgtttatgttaagaggattgggccaggcgtggtgtctcacacctgtaatcccagcactttgagaggccaagacaggtaggtcacttgaggtcatgaatttgagaccagcctggccaacagacgggagccacttttcccagcctgtatgttcttttatttatttatttatttttgagatggaatcttgctctgtcgcccacgttggagtgcagtgatgtgatctcggttcactgcaacattcacctcccaggagaatggcatgaaccgaggann

SEQ ID NO: 21420 - DNA, 724 bp, Homo sapiens
  misc_feature 1, 2, 3, 4, 5, 6, 7, 8, 719, 720, 721, 722, 723, 724: n = A,T,C or G
nnnnnnnngctaagcaaaagattttataatgaagaaagatgagtaactagcctctcaatcttccatgactggcaggctgggccaggagagaagatggaacatgcggccaggcaggaattcacatgaccctaaagctgccggtggagctctcaaaagtccctagatccactgcgtccgtctctaggtggagcctggacaagggcatccttcacacacttcccaggggctcatatacaatgaagatgagaactctgctgcccggaaggactgacattcttcggatatcctacaaacccttcctgaagctcacttttggatagatatgggctgtaccaaagacacttattattctaacatgcatcaagtaaagtaaaacaaggagagaggctgcggtgtgtgggtaggggatgcaggagaagctgtgtaaggtagtggacagctgtgtggctctggggatgagacagactagaccaggcaagtgcttcaggcaggtgccccgtcgggaggcctctggagttactcatcttgcagcctcgggctactcaccatcagggagccccgcgagccacctgtgttttttgttttgtttttatttatttataatttatatttttgagacggagtcttgctctgtcaccaggctgcagtgcagtggcaccatcttggctcactgcaacctccacctcctgggttcaagcgattctcctccctcagcttannnnnn

SEQ ID NO: 21421 - DNA, 1637 bp, Homo sapiens
  misc_feature 4: n = A,T,C or G
ttanttctgacttgagaatctttttcatgaatgattttaaagaaaaatttggattttaaaggtattaaaatatttttgttttgtacgagagtttgttgctctgtatgactcctgtatgcattgtatattgcaatttattactgtcagagatttgtagacagtttcttattttcatattgaatcatgttacttttgtaattcaagtaagcggctgggttaattcatgatgtttgcccttttaataaaatataagggtagagttcattttgaatgcaagttgcctttattataaatttgagtttgtcttggttataccttgcatgataacctagctagatttctagcatttgctgtatttattaaaattattatttttttggtaaaacattaatagtttaagcagcatcatttttttaaaaaatgtaattgaataagtgtgaatgcagaagcaaatattgtctgccctgttaaacttggtgcccattaacagtgtttacactgttcatcgtgcctgttaatgtagttttagttactggagcttttttaagactagatttggttttgagttacatttttaagaatgtgggaatatatttaagtttaatgtagtcctagtgctcttgaaatggtgcccctttcatttggtacatgattttttttcaaatcatatcttcaagtactatagtattctcttacagaagaggagttttatagtctgatggtaaatgtcttcattttacctttttaattgaaatgtcaagtttcctgttacactatggaaaccaagaaacatcagacatcattgcgtgtacagaccttttgcatgggtgagtggatgaaatggagaacagagtgagtgctgtgaacggtgtgaaatagaagccaacttctagtatgctgtcttcatctctgcaataaactaaacgtaaataatgtaactttgtataatttagtagtatgtacttggattgtttctttttgaaaagtgaggatttgtattttctcatctattctttttggtgttaattaacttgagggatttcttttttaagtttttaatatcaaaaattgctattgtatagtttgcctaaaaggaagttggagtgaatatcatctttgaaggacactcaaatttataaggtagaagcaatttcccagatataggctgaacagaaacatttactttgccagaaggagcctttaggagtatatgtgggctaatcagaggttaataatgtcctcatctcctactctccatttaaaaaacaaacttcattgtagtaaattcaaataggaaaaaatgggggagtagttaagcaaaatcaacagtcatcctactatgttgaaagaaccaatgttaatattttgataaatatcatttgtccttttactttgctaaatatgtatatttttataaaaatgggctcatattgtgcataccattttgtaacctgcttttttcacttaacaatatattgggaacatcttttccaggtcatgcatagtcttctgcatcatttttattggtttattattctgctgtatgactcaatcataattcatttaatcttctattggatattttgactatttacatcttttcacagttataaacagcacttcactgaatcccatgt

SEQ ID NO: 21422 - DNA, 663 bp, Homo sapiens
  misc_feature 1, 2, 3, 4, 5, 548, 549, 550, 551, 552, 553, 554, 555, 556,557, 558, 559, 560, 561, 562, 563, 564, 565, 566, 567, 568,569, 570, 571, 572, 573: n = A,T,C or G
nnnnnagcgtccggcgacggcgatggattggttgccgtggtctttactgcttttctccctgatgtgtgaaacaagcgccttctatgtgcctggggtcgcgcctatcaacttccaccagaacgatcccgtagaaatcaaggcgtgaagctcaccagctctcgaacccagctaccttatgaatactattcactgccccacattctcccagtggctctaccagcctcacccatcaaaccagtgaatttctcaatcttgcctcacagtgactgcagcgccaagcggcatccaccaagcatcaagttggagaaaagggaacccaagcagtagagagcgatattggagtcttttgttcattcaaatcttggatttttttttttccctaagagattctctttttagggggaatgggaaacggacacctcataaagggttcaaagatcatcaatttttctgactttttaaatcattatcattattatttttaattaaaaaaatgcctgtatgcctttttttggtcggattgtaaataaatataccattgtcctacnnnnnnnnnnnnnnnnnnnnnnnnnncaatttcttctcccgtctttccctttcatcctcgatctgatgggtcttaattactttgaagtgctccatgtcaacacagccatttctggt

SEQ ID NO: 21423 - DNA, 1579 bp, Homo sapiens
  misc_feature 1, 2, 1577, 1578, 1579: n = A,T,C or G
nnccgatttcttcctgtgtttgagaatgaacatttttaaattttaaagttgtacaggttttttgcttttccattatttttatccttgtttggtaacttctatgaaaatatatatatatatatttttttgccatttaactgttgtatgttactctgtgtctgtaccatatagaaaaaaaattgtttttgtttttggttctctatgtgatatcagttaacaatgtaacactagctttacctgtcaaattctgctaggtcttctctgaaaacgttgtttttaaaaatgatattgcttggtaatagtgcaatttctatccttttccctcccccctcaacttttaagttcttttctttataattttgctgccccctccctgatggtttgggtttttgtttttgtttttgtttttttttttcatggagctactatgccatcctccctctgtgaggcagagtgactgtcagtgttttgttatgccatgccttgagctgtgggtgtttggcgacaataaggtggttgaatagattggctgagcacacttccacccacctagtgttctcagaggggttatgtgattgtttcaacctggagtgggttgcacccttaatgctttcctctgcaactaaaccgcccacatatatgttcattgaaaaaagtaagaataattctcagcactaacccagaagtagcaaagcagtcagtgatggtgaacattagaggtcaaacatgagttagatgtttgtgggctgacagccatcgtggctatgaccagtactatttacaaagcatgaattcactacaatgctcaactgtttgtttagctttatctcacttggggaatttattcctgtctgctgcattgtaggtagctgggtaggatatatttccacttgctttttaaattagttcttcacctccattgacactcgttttttggttttctccctatagtgtgggttggtgctagacaccagtctgacccacagaatgggagttatttcatccatctttcctccatccttccaaaaaccacatatctacacaaggaaaaatttaatacatctaggaattttttttttaattacaagctatttaaagagatgaatgtggccaaagttttacacaattgaaaataaagtaaaacagacggcatgtgtttaaacctgagtttatcaggcatggcaggaagttgcaggagagagaggcagtgacccaagccagtgcacttgatgttcatggacatatattttttttaaataataaattaaaacattttaaatagaagcataaattgagttgtttgttggcgctgagatactgcccactgtgaaacaaagctttgactagttttttgtttgtttactttcttcaggggggaggggggcaagtttgggtaggaaagaaagcataaatgaacgtgaccctgaggtgaagaggtatatgaacagcctttgcaatgtacccctgcccggacaaccgaacgcaaatacacaaccacacacacctataagcacgttgaaaccaacaactgccgtcccggccgttatactattacagtgaacactggacaactaccnnn

SEQ ID NO: 21424 - DNA, 1259 bp, Homo sapiens
  misc_feature 1254, 1255, 1256, 1257, 1258, 1259: n = A,T,C or G
cgtccgggcctcgggagcgcgcgcggtcgccgggacttctccccctcctagcccgcaacgtgcgcgcgcccgtatgcaaataagttcgattcaagagaattttgtgccgggagccgcgcgtgcgcagagggaaagcggaatctacaccttcccggccagcggtagcaactgcagaactgcaggagactatctttctagacaaggcagttgaggaggagggagcgcttgagggggactggcctggcgtgcactccgcacctcggggacattattgcgcgtggaacggctgcttttggaagactattgcccagaagaaaagatgtttggttttcacaagccaaagatgtaccgaagtatagagggctgctgtatttgcagagctaagtcctccagttctcgattcactgacagtaaacgctatgaaaaggacttccagagctgttttggattgcatgagactcgttcaggagacatctgcaatgcctgtgtcctgcttgtgaaaagatggaagaagttgccagcaggatcaaaaaaaaactggaatcatgtggtagatgcaagggctggacccagtctaaagactacattgaaaccaaagaaagtgaaaactctatctgggaacaggataaaaagcaaccagatcagtaaactgcagaaggaatttaaacgtcataattctgatgctcacagtaccacctcaagtgcctccccagctcaatctccttgttacagtaaccagtcagatgacggctcagatacagagatggcttctggttctaacagaacaccagttttttcctttttagatctcacttactggaaaagacagaagatatgttgtgggatcatctataaaggccgtttggggaagtctcattgacacacatctcttcaagccttgctggcagcaataagaaagcagtgctgaaaagccagaggagcagggcagagcctctgcccattccactcaggagtggtgaccgggggttcccggtgcaacgggccccccaacattctgccttgccgtttggaacccaaggttaaaatggccccctttttgggaaaggggttggccctttgccacggaaccaaaaccagatacttggcacggatcgctcggggaagtgttctgccaactccaatgtgttgatccccccacggctatttataaagggcccgcgcggctagaccatatggtagtcaacaatagtggccccccacgacagattgttaatatttattacagttgtatgnnnnnn

SEQ ID NO: 21425 - DNA, 927 bp, Homo sapiens
  misc_feature 1, 2, 3, 927: n = A,T,C or G
nnncgaccacatcatatagggagtcgacccacgcgtccggcatggcaaaagcttccccactcagatatctggtggttgattcctggctgtcatctggaacctcagctgggattattagccagaacctccgcaggccctcaccttgtggcctagactttctcacctcatggtggagcctaacagcaagtgtgcaaaagagggctaggcagaaattgtatcaccttgtcttcttggaagtcatactgcatccttttggccatagtcttaggtctgcccagatctaaggagtgagaacgtagactttccccctacctctccttgggagaaatgtcagtgtcacatttcagaagaagatgtgggatcaaaaatcttgttgccatcctgttggaaaaatccagtgtaccacaaggtgatagatggtaaacatctaaccgaaagctttagatagacttctttctagtaaaatataacataatgaatattatttcattcttactttgtttttgatctttcatacaagtaaaaaatgtaaaatactacacagatttataagtgtgcttaggaatcacttttatgaaagacacttgtgaggataaatataatacagtgcacagactatggctgtattagtctgtctgatgctgctaacaaagatatacccgagactgggtaacttataaaggaaagaggtttaattgactcacagtttggcatggctagggaggcctcaggaaacttagaataatggcaaaaggcacctcatcacagggtggtgggagagagaatgagtgcccagtgaagggggaatccccatataaaaccattagatcttgtgagaactaactcactatcatgagaacagtattgggggaactgtccctcatgatttaaatggtttttctcatgacacgtggggattatgggaan

SEQ ID NO: 21426 - DNA, 880 bp, Homo sapiens
  misc_feature 1, 2, 880: n = A,T,C or G
nnatatcttgccagaatctctcttatgatacttagaaagttttcatgtacttggagctaaattagtccccaaaccaaattcattattttcttcttaaaaatgtcttttacttccttgaatctgcttctgtatttcccatgtaaatttacaatgtattttgtccagttactgaggataaatacctctacttttgcacctaggacatttagggaggccattgtttactaaattcatttggatggctggtcttctaaaggaactaaaatctagcatctcctcttcatacctcctgccactgtctttcattttccatacctggagttctgatagtagatttttaacgagcttttcccgtctctgtcttctacctagatccagtatatttctgcagtctggtatgtttttccccctaagaacctcagctgagaaataaagcaggttaacaaagctgtatgaaatgtcactggcagttaaggaaattctagttgaaacaatgggtttgctaatttcactgacgattagaaaaggtaatagaaattagaaaccaacattctcagatacttcaggtgggaatctggtgaagctgtttggcactagatttcaagagccctagaggcattcacacattggacagctatgaggacatgtcctaagtaaacaaatctatgtaccaaaaaactgtgattcacagtatgactctaatagggaaaactgatcatctgaaagcccaacagtggattaataaaatggtcatctaatcacaatgctgaaatgatggacagccatttgaattgatgtttacaaaaacgtttttagggccgggcgcggtggcccacacctgtaatcccagcattttgggaggccaaggcgggtggattan

SEQ ID NO: 21427 - DNA, 1681 bp, Homo sapiens
  misc_feature 1, 2, 3, 1677, 1678, 1679, 1680, 1681: n = A,T,C or G
nnnccggacgggtttcgccaggttggctaggctggtctcaaactcctgacctcaggtgatctgcctgcctgggcctcccaaatactgggattataggcaggagccaccgcacggggcctgcattgtatttcattgtatgactatggtataatttaaccaagatccttaatggatgtgttttatgtatgtactatataaaataggtcatcacgtatattatgtacttttaaaaacctattttcctcccagttagataaaaattccttgagtccaggaactatttgattgaatatgtatcatcataatcttgcttgatttttgacactcacttaaaacaatttgaatcgaacagaaaaaaagctctagtttcttttttaaaaattttaattctagtttctttttgaatctcacgtattgtctctcttctttcagctctggatgagggggatattgccttgttgaaaacttatggtcagagcacttactctaggcagatcaagcaagttgaagatgacattcagcaacttctcaagaaaattaatgagctcactggtattaaagaatctgacactggcctggccaccagcactctgggatttggctgcagataagcagacactccagagtgaacagcctttacaggttgccaggtgtacaaagataatcaatgctgattcggaggacccaaaatacattatcaacgtaaagcagtttgccaagtttgtggtggaccttagtgatcaggtggcacctactgacattgaagaagggatgagagtgggcgtggatagaaataaatatcaaattcacattccattgcctcctaagattgacccaacagttaccatgatgcaggtggaagagaaacctgatgtcacatacagtgatgttggtggctgtaaggaacagattgagaaactgcgagaagtagttgaaaccccattacttcatccagagaggtttgtgaaccttggcattgagcctcccaagggcgtgctgctctttggtccacccggtacaggcaagacactctgtgcgcgggcagttgctaatcggactgatgcgtgcttcattcgagttatcggatctgagcttgtacagaaatacgtcggtgagggggctcgaatggttcgtgaactctttgaaatggcagaacaaaaaaagcctgccttatcttctttgatgaaattggatgctatgggaggggctcgttttgatgatggtgctggaggtgaccactgaaggtgcagaagaacaaatgtgtgggaactgaatcaaatcaagactttggatgtgttttgatccctcgaggcaattattaaaagggcttggttggccactaacagaacctggatacttgtgggatcccagcactgttgagggccggggagaattggctagaaccacatcgggtttagttgggccgatccagaggggtcggacccacatatttaagattcacgctcgttcaatgagggtggacagagatttccgatttgacggtgagcccgatgtgtccaaatagcctgggcggagattaaaaggtggcaaagggtgttgtttgccccaaccggaaatggcgcaagtggggaacggcgaaggcaagttgcacacaggccgtggaaaaagcgcggcggacatggccctatgtgcccaacagggaggggctccccaaannnnn

SEQ ID NO: 21428 - DNA, 919 bp, Homo sapiens
  misc_feature 1, 2, 3, 4, 5, 6, 919: n = A,T,C or G
nnnnnnacccgtattctaacattaccttccttagaacaggtacagatctagtactaaatttgaagacagaaactccatttaactacaaaagcctaaatcacataactactaaatctgtttgcacaatcaaacccatcacaccccacccaaaatcaccaacacaacattttgaacatgttaaattttattaaaaatatttaacatcgtacaaatattccaatacagttatggtacatgaacactgtaccaaaagcatgatttttattaaactgatgattaaatggaaaaggtcttgcaaatgtccctattttggtatttcttatgttactatatccatatcagcaatttatgtttgcaggagccttcagtccaattatagaaatagtcttagaacatagtacctaacattataatgggattcactaagtacaagtctacctacattatcgaagaggctagagaagtcccttttgcccaaccctcatatgtgagaaatcaagaaaagcaatgttcatgggatcctgacaaatctactatataaagtgagagcccttatttaaatttgagcaatttaagtttttccccagaatgtctcctttgttggttccacaaaatgtattttgtttttagtgtttaaagtcaacaaactggcattgcattttccttaacttacataaactcatcagaattacatgaatattcctactgcttaccttaaaacttcctaaggagcatgctatttagtgctaagttttataccctgatcctttctgtcactgacacatgcataaaatgttaccttaacacaaccctgcaatcactacaattcttaaaagtattacataatttcattctagtgttgtacaactagtctatagcaaacttacaagtaagggtttatattcatgacactgactan

SEQ ID NO: 21429 - DNA, 858 bp, Homo sapiens
  misc_feature 766, 808, 858: n = A,T,C or G
acgatattgcatttagcattttaaaaaatatggttgtttttccttgagttgtgagagtttcattatatgttatggatacaagttactttattaaacgccactttttcacttggcacagttctccaaattaattgtattagtagcagagtcattattcgtattagatttgggtgtgaaagaaagaggacttaaggatgacttgaaagtttctggatggctggggatgttaattattggagaaaaggacttcaggaagaccaggtttgattaagagggtgaacagtgggtgttgctggtggtggtagtgattaggagtttagctttacaacaaggagagtttgggatgcttatttgtaatacaaagaggagatgtccagtaagtactgtagtttggacttcactgggtagggatttcaggctactatgctttttaactcatatttgacatctatgtataggtaaatgtctttattttctctaaacaatgtgaatgcctagcacactgcttgacatgctagaagtgtttaatgttgaatatgttgaattgaattgaaatgtaaatttcagttctgttttctataattatatattttactctaataatagtttctggtgtttgaagtatacattattttctttcaactgaacttgaatataatataattctatgaagtcatgagaaattttggtaaccttccttaaggaataatttttggaaatgtatagacattaaaaaaatagagcctgcacctgaaactggctactnttccctgaagcctgtattcctgaccactgtgaaaagtgccanccttgatcctagggcttcctgtccttaatgggccattggttgctagtgcn

SEQ ID NO: 21430 - DNA, 563 bp, Homo sapiens
  misc_feature 1, 2, 3, 73, 74, 75, 76, 77, 78, 79, 80, 81, 82, 83, 84,85, 86, 87, 88, 89, 90, 91, 92, 93, 94, 95, 96, 97, 98,99, 100, 101, 102, 103, 104, 105, 106, 107, 108, 109, 110,111, 112, 113, 114, 115, 116, 117, 118, 119, 120, 121, 122: n = A,T,C or G
  misc_feature 123, 124, 125, 126, 127, 128, 129, 130, 131, 132, 133, 134,135, 136, 137, 138, 139, 140, 141, 142, 143, 144, 145, 146,147, 148, 149, 150, 151, 152, 153, 154, 155, 156, 157, 158,159, 160, 161, 162, 163, 164, 165, 166, 167, 168, 169: n = A,T,C or G
  misc_feature 170, 171, 172, 173, 174, 175, 176, 177, 178, 179, 180, 181,182, 557, 558, 559, 560, 561, 562, 563: n = A,T,C or G
nnnaaaaagataaagaccttgctgaatcttacaacagaagagatatttttaaagtcaacaacactatcccttnnnnnnnnnnnnnnnnnnnnnnnnnnnnnnnnnnnnnnnnnnnnnnnnnnnnnnnnnnnnnnnnnnnnnnnnnnnnnnnnnnnnnnnnnnnnnnnnnnnnnnnnnnnnnnacccctcaacctggacaggcgccatacagctaccagatgcaaggtagcagttttacaacatcatcaggaatatatacaggaaataattcactcacaaattcctctggatttaatagttcacagcaggactatccgtcttatcccagttttggccagggtcagtacgcacagtattataacagctcaccgtatccagcacattatatgaccagcagcaacaccagcccaacgacaccatccaccaatgccacttaccagcttcaagaaccgccatctggcatcaccagccaagcagttacagatcccacagcagttaaaacagagccaatgagcagcagtgaaacagcttcaacgacagccgactgtcatctacannnnnnn

SEQ ID NO: 21431 - DNA, 609 bp, Homo sapiens
  misc_feature 609: n = A,T,C or G
gggcaccttttatttatttttgtttagttttattccttagtttcactcagccacttcaaaattagaatttctctgttgtaggaatgctagccttatagatctgtgaaatgatctagttgctttatctatagttgctggagaattgagtgttttgatcaaaggtagcctatttagctgtaaaactgtctagaattatttcattcctaggataaaggaaaatttgtgtccaaaatatctctaaaggtattacactgtattcctttaatcttaatgatacacttttttttcttataaatgtaggcacattatacactagcggtcttcagtatgataaacagatcaactaccaatttcattgccattactctttgaaatagtcctcattgagagttcttgaaacctgtgtctaataacaaagtaaaatataatcaaaaatttcacacaagtagaagaaaaaacattgacaaatctcttgggagaccacatacttatttttaacaagatgaatgaaatatattcaacctgtaaaatagtttgcaaatgttcatgtgctatattacattgcgtggagttcttattacagatgcaatttcctacaacattaaatcn

SEQ ID NO: 21432 - DNA, 760 bp, Homo sapiens
  misc_feature 1, 2: n = A,T,C or G
nngaatttaggtgacactatagaagagctatgacgtcgcatgcacgcgtacgtaagcttggatcctctagagcggccgcctactactactaaattcgcggccgcgtctacaaaagttcaaagtattgagggtgataattgcaaaattgaaacagagcatgggactagtatcttgcagtctgttaagggtcaaaaattgcatgttcaaacaaaaggaggcaaagtgatcttgtctgggaacagtttatggaaatatagatattcatgcatcagataaaagtgctgtgaccatagataaactgcagggaagttctgttactgtatctaccgaagatgggttgctgaaagccaagtatctttatacagaatcatcatttctgtcttccgctgctggggatattacattaggaagtgttcatggttgaatttccctgaaagcagacactctgaaatggaaatttgagcacagcgaatttactagggaggcctcttgggaccaatgccatgtaaaggaagaaagccagatttccatgggagaagttggactgtgatacagtttcagtaacccacacggagagctctgaagctgggatggtccctcagagttgtctcaagttggggtgagaggagctggacgtttatatccccaatcattagatgcaagctgccccaggaaggagtatgatcttgggccgaagtgactcctttttgctaggtaattcccaaagagggctgacagctgagggctgtctgccagcagt

SEQ ID NO: 21433 - DNA, 1097 bp, Homo sapiens
  misc_feature 1, 1096, 1097: n = A,T,C or G
naactccgggtctcgtcttcactgctctgtgtcctctgctcctagaggcccagcctctggtcctgtgacctgcaggtatgggaatccacagctaagacgccgggacaccctggaagcctagaaatggacaacctgaggtatggagtgtatcctgtcaagggggcaagtggataccctggggctgagaggaatcttctggagtactcttatttgaaaaggggccgttgacatttagggatgtggtcatagaattctctcaggaggagtggcaatgcctggacactgctcagcaagattgtataggaaagtgatgttagagaacttcagaaacctggtgttcttgggtatgatgtctctaagccagatctgatcacctgtctggagcaaggaaaagatccctggaatatgaagagacacagtatggtagccacacccccagaaagtggggtattgaaatttcctactataattatattgctgtctaggtgtttcttccagtctgtcaatattgctttatatattggaaccttagtgtgacatacacacagacacacagacgtgcacacacacacaacacacacaaaaatgggtcataggttcccagtttaatagaatctagttatgggtgttaagatggtcttttccttggctcctcgtgtgcaagcttgggactttaagaggtacctttatgttacggatactggacagggttttgtgactttaaaggatggtagcctttggttagtaatatatttggccccttgtggccctccatgtgggttaatatttgcgtggcatggtctaattctattttggcaccatcggaagttgaatcattaatggttgtggcccggtgaacggcaatgggctgggtaaaagttaaaaactcttagaagtaggtctaggggagtctggaaagttttctgaaacaaagagacttactaattttttttgttgttctatttgattcttgcatctttgtcccacattttctctctttgtttctctctgtggctgttttatttttactttgatatgcttttacttctttcttatgttgttttctgtatctatacaggcatattctttgtggtann

SEQ ID NO: 21434 - DNA, 1331 bp, Homo sapiens
cactaagactttggccttttcataagcacaatgtgcattttatggagaagattttacactttgctctatttagaaagaataaatatgagcagtggtttaggttttatgccctggacttaatatatttctgattcctgttttgagattaaattctcatgtaaatagaaaaatacttattatttctcataaggccaagtgtgttattagtttggatttttgaagatgaagcacaaacttttgattttatctttgtctgtctcttgtcagcgccactcgttgtctctcagtatgacctggacttgcccctgcacttaccctcgtcctgctgaaccatctccatgcactgtccgattccatcagtgattcgggctcctcccaaggctccctgaaaagggcatggaggtcaggacgttaggcacattccggacacaaaggcaacccatactgtagagtgggcagctgtgtttccacttccctaatattccagtggtgtcctaaaactgaaaggaacactttccctttttaggggtctgttcttcatgtctcagtgcctctgatctagtgaacacaactgtcctgaatgtgaaagaacttgctaaatttctagtttcttgttaggtggctaaaatacatttataagacttccttactcacccatgactgctgaagtttgaattcttagcagtacgattcgttttcttgtaaggtgagcagcttaggaaagattggccatcttcctgtgcaaaagagaggcaaagcttaatttctactcaaagcatgcttgaatttggaatcagggcttccactcttccgaagttggagtgtcactgcgacaggcatgtgtcccgaagggctcgtgtctctgctatactcaaagtttaaatggagcccagcaagccagatgtcctttacttctaggttccctcaacagtttctcctccgctttagagaccgcattgaaaatattcttgttctgctgttgtgttttggctttggaatgatgtgatgcagctcaatgggtcccacccccaacttgatcaaagtaagaaacagctgggaaagtcagtgcaaatacaagttcattgtcctccttgcagggattctgattcagagggctcaggtggggcctggaatgtttgttaacatgactcagatgtgcagtcaatttggggactcactgacagcattgaccttacagtttatgggatgattctttctgtttggtgatgaagaaactgaggcacacagagtctgtaacttgcccaagttccccttgttgtaagtcctggagccagatctcaggtggaccagtgcttctctcccccggacgc

SEQ ID NO: 21435 - DNA, 1178 bp, Homo sapiens
  misc_feature 1, 2, 3, 4, 5, 6, 7, 8, 9, 10, 11, 12, 13, 1162, 1163, 1164,1165, 1166, 1167, 1168, 1169, 1170, 1171, 1172, 1173, 1174,1175, 1176, 1177, 1178: n = A,T,C or G
nnnnnnnnnnnnncggaagtcttctagaattaattaacgcggggtgtaaaaataaacagtgttctcttctctaccccaaagccactactgaccaaggtctcttcagtgcactcgctccctctctggctaaggcatgcattagccactacacaagtcattagtgaaagtggtcttttatgtcctcccagcagacagacatcaaggatgagttaaccaggagactactcctgtgactgtggagctctggaaggcttggtgggagtgaatttgcccacaccttacaattgtggcaggatccagaagagcctgtctttttatatccattccttgatgtcattggcctctcccaccgatttcattacggtgccacgcagtcatggatctgggtagtccggaaaacaaaaggagggaagacagcctggtaatgaataagatccttaccacagttttctcatgggaaatacataataaaccctttcatctttttttttttcctttaagaattaaaactgggaaatagaaacatgaactgaaaagtcttgcaatgacaagaggtttcatggtcttaaaaagatactttatgtggttgaagatgaaatcattcctaaattaacctttttttaaaaaaaaaacaatgtatattatgttcctgtgtgttgaatttaaaaaaaaaaatactttacttggatattcatgtaatatataaaggtttggtgaaatgaactttagttaggaaaaagctggcatcagctttcatctgtgtaagttgacaccaatgtgtcataatattctttattttgggaaattagtgtattttataaaaattttaaaaagaaaaaagactactacaggttaagataatttttttacctgtcttttctccatattttaagctatgtgatttgaagtacctctgttcatagtttcctggtataaagttggttaaaatttcatctgttaatagatcattaggtaatataatgtatgggttttctattggttttttgcagacagtagagggagattttgtaacaagggcttgttacacagtgatatggtaatgataaaattgcaatttatcactccttttcatgttaataatttgaggactggataaaaggtttcaagattaaaatttgatgttcaaaccttaaaaaaaaannnnnnnnnnnnnnnnn

SEQ ID NO: 21436 - DNA, 4018 bp, Homo sapiens
  misc_feature 1, 3962, 4013, 4014, 4015, 4016, 4017, 4018: n = A,T,C or G
nagcggccgctcgtgatctagatccctatagtgagtcctggctttccctttcggacatgcgcgctcggagcaaggcgccctcgcactcagcttaccgcgcatgtacgttgccaggggtaacgcaggtagccaaagtggcttgtggagtggcgaccgttagtgaggcggttgctgagacagacgctgaggcgggtaggaggagcccgagccgtaagggaagccgtgatgagggccgtgttgacgtggagagataaagccgagcactgtataaatgacatcgcatttaagcctgatggaactcaactgattttggctgccggaagcagattactggtttatgacacctctgatggcaccttacttcagcccctcaagggacacaaagacactgtgtactgtgtggcatatgcgaaggatggcaagcgctttgcttctggatcagctgacaaaagcgttattatctggacatcaaaactggaaggcattctgaagtacacgcacaatgatgctatacaatgtgtctcctacaatcctattactcatcaactggcatcttgttcctccagtgactttgggttgtggtctcctgaacagaagtctgtctccaaacacaaatcaagcagcaagatcatctgctgcagctggacaaatgatggtcagtacctggcgctggggatgttcaatgggatcatcagcatacggaacaaaaatggcgaggagaaagtaaagatcgagcggccggggggctccctctcgccaatatggtccatctgctggaacccttcaagagaggaacgtaatgacatcctggctgtggctgactggggacagaaagtttccttctaccagctgagtggaaaacagattggaaaggatcgggcactgaactttgacccctgctgcatcagctactttactaaaggcgagtacattttgctggggggttcagacaagcaagtatctcttttcaccaaggatggagtgcggcttgggactgttggggagcagaactcctgggtgtggacgtgtcaagcgaaaccggattccaactatgtggtggtcggctgccaggacggcaccatttccttctaccagcttattttcagcacagtccatgggctttacaaggaccgctatgcctacagggatagcatgactgacgtcattgtgcagcacctgatcactgagcagaaagttcggattaaatgcaaagagcttgtcaagaagattgccatctacagaaatcgattggctatccaactgccagagaaaatcctcatctatgagttgtattcagaggacttatcagacatgcattaccgggtaaaggagaagattatcaagaagtttgagtgcaacctcctggtggtgtgtgccaatcacatcatcctgtgccaggagaaacggctgcagtgcctgtccttcagcggagtgaaggagcgggagtggcagatggagtctctcattcgttacatcaaggtgatcggtggccctcctggaagagaaggcctcttagtggggctgaagaatggacagatcctgaagatcttcgtggacaatctctttgctatcgtcctgctgaagcaggccacagctgtgcgctgcttggacatgagtgcctcccgtaagaagctggccgtggtagatgaaaatgacacttgcctggtgtatgacatcgacaccaaggagctgctttttcaggaaccaaacgccaacagtgtagcttggaacacccagtgtgaggacatgctctgcttctcgggaggaggctacctcaacatcaaagccagcaccttccctgtgcaccggcagaagctgcagggctttgtggtcggctacaatggctccaagatcttctgcctccatgtcttctccatttctgccgtggaggtgccgcagtccgctcccatgtaccagtacctggataggaaactgttcaaggaagcctaccagattgcttgcttgggtgtcacagacactgattggcgtgaactggccatggaagcgctagaaggtttagattttgaaacagcaaagaaggccttcatcagagtacaagacctccgatatttagagctcatcagcagcattgaggagaggaagaagcggggagagaccaacaatgacctgtttctggcagatgtgttttcctaccaggggaagttccatgaggccgccaaactgtacaagaggagtgggcacgagaacctcgcgcttgaaatgtacaccgacctctgcatgtttgagtatgccaaggatttccttggatctggagaccccaaagaaacaaagatgctaatcaccaaacaggctgactgggccagaaatatcaaggagcccaaagccgccgtggagatgtacatctcagcaggagagcacgtcaaggccatcgagatctgtggtgaccatggctgggttgacatgttgatcgacatcgcccgcaaactggacaaggctgagcgcgagcccctgctgctgtgcgctacctacctcaagaagctggacagccctggctatgctgctgagacctacctgaagatgggtgacctcaagtccctggtgcagctgcacgtggagacccagcgctgggatgaggcctttgctttgggtgagaagcatcctgagtttaaggatgacatctacatgccgtatgctcagtggctagcagagaacgatcgctttgaggaagcccagaaagcgttccacaaggctgggcgacagagagaagcggtccaggtgctggagcagctcacaaacaatgccgtggcggagagcaggtttaatgatgctgcctattattactggatgctgtccatgcagtgcctcgatatagctcaagatcctgcccagaaggacacaatgcttggcaagttctaccacttccagcgtttggcagagctgtaccatggttaccatgccatccatcgccacacggaagatccgttcagtgtccatcgtcctgaaactcttttcaacatctccaggttcctgctgcacagcctgcccaaggacaccccctcgggcatctctaaagtgaaaatactcttcaccttggccaagcagagcaaggccctcggtgcctacaggctggcccggcacgcctatgacaagctgcgtggcctgtacatccctgccagattccaaaagtccattgagctgggtaccctgaccatccgcgccaagcccttccacgacagtgaggagttggtgcccttgtgctaccgctgctccaccaacaacccgctgctcaacaacctgggcaacgtctgcatcaactgccgccagcccttcatcttctccgcctcttcctacgacgtgctacacctggttgagttctacctggaggaagggatcactgatgaagaagccatctccctcatcgacctggaggtgctgagacccaagcgggatgacagacagctagagattgcaaacaacagctcccagattctgcggctagtggagaccaaggactccatcggagatgaggacccgttcacagctaagctgagctttgagcaaggtggctcagagttcgtgccagtggtggtgagccggctggtgctgcgctccatgagccgccgggatgtcctcatcaagcgatggcccccacccctgaggtggcaatacttccgctcactgctgcctgacgcctccattaccatgtgcccctcctgcttccagatgttccattctgaggactatgagttgctggtgcttcagcatggctgctgcccctactgccgcaggtgcaaggatgaccctggcccatgaccagcatcctggggacggcctgcaccctctgcccgccttggggtctgctgggctgtgaaggagaataaagagttaaactgtcagaatgtgtttcttgcccagatgaagtttgtgttttgtggggggggccttgtgtaaccacggaattcctatttatggcatttcatgccttgtaaatagcaccaggnagatgaggaagagaatgtacatatattttctaaggaaaaaaatctgttacnnnnnn

SEQ ID NO: 21437 - DNA, 4832 bp, Homo sapiens
  misc_feature 1, 2, 3, 4, 4828, 4829, 4830, 4831, 4832: n = A,T,C or G
nnnncaaccgcctcgcccgaagccctccctcgttactgtccgcataccccggcggcgccgccgcggaaagcggctccccctcctcttactccgcgtcctcttccctctttcccccgccggggcacgcttgttgcaccgtcccgcggcctgcgggagccgctcgccccggacttgagctcgcgtacgacccatttcctgtcgccccccggagcccgcaccacagcccggccggtctagaccccggcagaccccgctggccgcacaaaatgtcggcccggacgccattgccgacggtgaacgagcgggacacggtaaatcatacgactgtggatggatatactgaaccacacatccagcctaccaagtcgagtagcagacagaacatcccccggtgtagaaactccattacgtcagcaacagatgaacagcctcacattggaaattaccgtttacaaaaaacaatagggaagggaaattttgccaaagtcaaattggcaagacacgttctaactggtagagaggttgctgtgaaaataatagacaaaactcagctaaatcctaccagtctacaaaagttatttcgagaagtacgaataatgaagatactgaatcatcctaatatagtaaaattgtttgaagttattgaaacagagaagactctctatttagtcatggaatacgcgagtgggggtgaagtatttgattacttagttgcccatggaagaatgaaagagaaagaggcccgtgcaaaatttaggcagattgtatctgctgtacagtattgtcatcaaaagtacattgttcaccgtgatcttaaggctgaaaaccttctccttgatggtgatatgaatattaaaattgctgactttggttttagtaatgaatttacagttgggaacaaattggacacattttgtggaagcccaccctatgctgctcccgagcttttccaaggaaagaagtatgatgggcctgaagtggatgtgtggagtctgggcgtcattctctatacattagtcagtggctccttgcctttcgatggccagaatttaaaggaactgcgagagcgagttttacgagggaagtaccgtattcccttctatatgtccacagactgtgaaaatcttctgaagaaattattagtcctgaatccaataaagagaggcagcttggaacaaataatgaaagatcgatggatgaatgttggtcatgaagaggaagaactaaagccatatactgagcctgatccggatttcaatgacacaaaaagaatagacattatggtcaccatgggctttgcacgagatgaaataaatgatgccttaataaatcagaagtatgatgaagttatggctacttatattcttctaggtagaaaaccacctgaatttgaaggtggtgaatcgttatccagtggaaacttgtgtcagaggtcccggcccagtagtgacttaaacaacagcactcttcagtcccctgctcacctgaaggtccagagaagtatctcagcaaatcagaagcagcggcgtttcagtgatcatgctggtccatccattcctcctgctgtatcatataccaaaagacctcaggctaacagtgtggaaagtgaacagaaagaggagtgggacaaagatgtggctcgaaaacttggcagcacaacagttggatcaaaaagcgagatgactgcaagccctcttgtagggccagagaggaaaaaatcttcaactattccaagtaacaatgtgtattctggaggtagcatggcaagaaggaatacatatgtctgtgaaaggaccacagatcgatacgtagcattgcagaatggaaaagacagcagccttacggagatgtctgtgagtagcatatcttctgcaggctcttctgtggcctctgctgtcccctcagcacgaccccgccaccagaagtccatgtccacttctggtcatcctattaaagtcacactgccaaccattaaagacggctctgaagcttaccggcctggtacaacccagagagtgcctgctgcttccccatctgctcacagtattagtactgcgactccagaccggacccgttttccccgagggagctcaagccgaagcactttccatggtgaacagctccgggagcgacgcagcgttgcttataatgggccacctgcttcaccatcccatgaaacgggtgcatttgcacatgccagaaggggaacgtcaactggtataataagcaaaatcacatccaaatttgttcgcagggatccaagtgaaggcgaagccagtggcagaaccgacacctcaagaagtacatcaggggaaccaaaagaaagagacaaggaagagggtaaagattctaagccgcgttctttgcggttcacatggagtatgaagaccactagttcaatggaccctaatgacatgatgagagaaatccgaaaagtgttagatgcaaataactgtgattatgagcaaaaagagagatttttgcttttctgtgtccatggagacgctagacaggatagcctcgtgcagtgggagatggaagtctgcaagttgccacgactgtcacttaatggggttcgcttcaagcgaatatctgggacatctattgcctttaagaacattgcatcaaaaatagcaaatgagcttaagctgtaaagaagtccaaatttacaggttcagggaagatacatacatatatgaggtacagtttttgaatgtactggtaatgcctaatgtggtctgcctgtgaatctccccatgtagaatttgcccttaatgcaataaggttatacatagttatgaactgtaaaattaaagtcagtatgaactataataaatatctgtagcttaaaaagtaggttcacatgtacaggtaagtatattgtgtatttctgttcattttctgttcatagagttgtataataaaacatgattgcttaaaaacttgtatagttgtctagatttctgcacctgaatgtatgtttgatgctttgatttgaaaatgttcttccctgttatttacattctggtgggtttttaaaattcttacctccatcatgcaattttgaaaattgtgtccagaattaaaagtgcatagaaatagcctttacaattgtagcatggacctttaaaaattgttttaaaatcttatttaaatttaaaccagaagctgaaaaatagatcagctttattatacacaaaattattactgcttatctttgctcttttccttgttatcccgcaaggtttagttgagaagatacaaaatgtttacagtgttggcacttagagtttttaaattcaagtacatgaaattcagtaatagcattgccttgagctaactaggaagtaccgggaaaaaagttaaatctacatcaagtttcttttgaactttgaagtgttttctgacccactgctaactgtagcaacaaaatttaaaagaaaattcagaataccgcggtttaattgcgggaatataataatattgggactgtttcacagcacaaactcatctttacaagcgttgatcaatgcatcagttaagaaataatgccacctcacgaattaactggcattgggaaacatttgcctcattctcctgctatcctcttcattcacccctgccactgtaaatatctatgaagtactttaagagacttgcgagcaaaacatactatttataacagtatatgattgatttatgcttatgtggttgttcagtttgttcccatgtaactcgtttgttttaaatattttgccagatttcttgtatttattccacatcattatgcctataatgtgccgctttgtgattgggcatttgcctacttttctttcataattagtgatatatgcgatgtaaaaccactagtaaaggtacattttaatacttgttattttatactgaattagccttggaggttgactgtgcaatgttatttactgttgtaattactgtaataccaacatatgggccccatctgcacactcctgaaaaacagaaagtgtattcaaattttatcagtttaaagaaaataaagctgtgataaatactgtaattccaacctacattagaaggtctaagtgtaggtgatgtgccattccataatggcttccagactagggtgaattttatgttctgtactgtactgtgatgtagctttcttctgtaacagttatgttttaaaattaagtgagttttttttttgccttagcaaagggtggtgtttgaaaaaaaaaatgtgtagcccctttttaacctagtgttcattcaaaaaaaaattgatgcaaatctttattcactttcactggtgcacactgaaattttacttgaacagttctcataataaagcacttgtcttttgctctttatcagaatgtgaattacctgttttctggtacaaaagtattctgtatgaggagtttattgtatgtgttctaaatttagttggcaaagggtgaagctgtgaaggttttcaagattattgaaactatgaaggtttcttgtcattatgacaagaaagtttaatctttttataggaattcctgtcactgaaatacgtttttaaaaaaatagactcatgtgttttccacggtagaaactgatatttttttacattttctcactgtggccaactcttctgtgtttgtagaaaggaatttgacttcaatatcttttatgaactaaaaatgaaatcttgatactcactttagatttttcattttatgtgttcatgacaacataaatatttttcaaagatttagaggaattttgcaatgtgtttgcataaataaataccagtttatgttcacccgctatgtgataccannnnn

SEQ ID NO: 21438 - DNA, 537 bp, Homo sapiens
  misc_feature 536, 537: n = A,T,C or G
acctattaagagccaagtgtagctctttacatgtagtaactcatttatctttacaagggctctctgtggtagataccataatccccattttgtaactaatgaaactgaggatcagagaggttaagtaacttggcaaggttacatagtaaattctgggcccagatttacacccaggcagtctgacttcacagcccttgctcttggcagatattaaaatgccatgcagtaaatacaaggaataatgtgaatatgaagaaagaaactcctgaatgggggtgggatggggatactgttgttagagaagggagagaaaagtggagtagagaaggttctccttagaactgactgtttgatctaagctgggaaggaagagtaggaatcattcacatggataaaggagagaagggcatcctaggtagaacatatgctgaagcacaaaagaacctagaatacttacataacagatcaggatgtctagagtttgtgtggagtttatgaagcgaggtttggggaagatgagactgtaaaggaataann

SEQ ID NO: 21439 - DNA, 1142 bp, Homo sapiens
  misc_feature 1136, 1137, 1138, 1139, 1140, 1141, 1142: n = A,T,C or G
tcgggagtcgacccacgcgtccgaagcttccaagaaggttttggatactagaagtattaatctatggcttttctcccagtaaaaccataggcctgaagttcacattgggtctttaaatcttttagatatatactggtcatttcagaaaattcttcatagtggtattggccttatatttaactttttttttattttttttttgagacaaagccacactctgtctccttggctggagtgtggtggcacagtctcagctcactgcaacctctgcctcccagttcaagcaattcttctgcctcagcctcccaagtagctgggattacaggcacccgccaccacgcccagctaatttttgtatttttgtagagatggggtttcacgatgttggccaggctggtctcaaacttctgacctcaagtgatctgcccaccttggcctcccaaagtgctgggattacaggtgtaagccactgcgcccggcctttttaactttaaacatgttttagaattcacctaaagatcaaaatatcatggattgaacctcatcaattgatagcagtgagtgactgaagcttccaaatcaagaaaagccggcaccaagaacttccattctaatctagagctgaccagtttgagctgattctctctttgaagagtccttcttgattgcagtgcagtactggcatttctgaatggatgtaagtggagtattttagtctaaaggcttttcaaattacttgaatttttttaaaaattgaggagctttatttctatttacccttccatttttgtatatcaaatttccattgtcattaaaaactgtatcttgaaactttgtgaactgacttgctgtatttgcactttgagctcttgaaataaatgtgatttttgtgtgattatctggtttccagttttaaacattaactgtcaccttttattcttaaacttgaaagtacagaaatcattaaattattaagttgtacaaaaaagggggccctaaaaacccgagggcaagtaccgtcccgtttggacgggcctaggagcgttaagaggccgccggtaacgcgctggacggcggtttgggcaccttcggggtggcccccggagccgaatcaacgtcggtacccgcggaccagnnnnnnn

SEQ ID NO: 21440 - DNA, 3918 bp, Homo sapiens
  misc_feature 1, 2, 3918: n = A,T,C or G
nncgtgctgggccagagcggagccgccagcccgtaacggtcgccagtgtgaggggcgggagggaaagaagaggggtttaaattagattttttaaaacacagagcaagcgccagaggcgtcggcatcccaggtgtcgccgcttcctgctgcacagggctcggcgtacaggtccctccctcctcaagccccctccccttctcccgccctaccctctggggctctgcggcgcttaagaggcggccgcagcggcggatccggcggctgctgcagcccgggcggctgccgagaaggagggaggggaaacacaaagccggctacgcgctgcgagataacaagagtaatccacagacttaaaacatgagctcagatgccagccaaggcgtgattaccactcctcctcctcccagcatgcctcacaaagagagatattttgaccgcatcaatgaaaatgacccagaatacattagggagaggaacatgtctcctgatctacgacaagacttcaacatgatggagcagaggaaacgagttactcagatcctgcaaagtcctgcctttcgggaagacttggaatgccttattcaagaacagatgaagaaaggccacaacccaactggattactagcattacagcagattgcagattacatcatggccaattctttctcgggtttttcttcacctcctctcagtcttggcatggtcacacctatcaatgaccttcctggtgcagatacatcctcatatgtgaagggagaaaaacttactcgctgtaaacttgccagcctgtacagacttgtagacttgtttggatgggcacacctggcaaatacctatatctcagtaagaataagtaaggagcaagaccacattataataattcccagaggcctatctttttctgaagctacagcctccaatttggtgaaagtcaatataataggagaagtggttgaccagggaagtaccaatttgaaaattgaccatacaggattcagtccccatgctgcaatctattcaacacgtcctgatgttaagtgtgtgatacacatccatacccttgcaacagcagctgtatcctccatgaaatgtgggatccttccaatttctcaagagtctcttcttctgggagatgttgcctattatgactaccaagggtcacttgaagaacaggaggagagaattcaactgcagaaggttctgggaccaagttgtaaggtgctggtactcaggaatcatggtgtggttgcacttggagaaacattagaggaggcttttcattatatttttaatgtgcaactagcctgtgagattcaggtgcaggccctagcaggtgcaggtggagtagacaatctccatgtactggactttcagaagtataaagctttcacttacactgtagcagcgtctggtggaggaggtgtgaatatgggttcccatcaaaaatggaaggttggcgaaattgagtttgaagggcttatgaggactctggacaacttggggtatagaacaggctatgcttacaggcatcctctcattcgagagaagcctaggcacaagagtgatgtggaaatcccagcaactgtgactgctttttcctttgaagacgatacagtgccactctctcctctcaaatacatggcacagaggcaacagcgtgaaaaaacaagatggctgaactcaccaaatacttacatgaaagtgaatgtgcctgaggagtctcggaacggagaaaccagtccccgaaccaaaatcacgtggatgaaagcagaagactcatctaaagttagtggtggaacacctatcaaaattgaagatccaaatcagtttgttcctttaaacacaaacccgaatgaggtactagaaaagagaaataagattcgggaacaaaatcgatatgacttgaaaacagcaggaccacaatctcagttgcttgctggaattgttgtggataagccaccttctactatgcaatttgaagatgatgatcatggcccaccagctcctcctaacccatttagtcatctcacagaaggagaacttgaagagtataagaggacaatcgaacgtaaacaacaaggcctagaagatgctgagcaggaattactctcagatgacgcttcatctgtttcacaaattcagtctcaaactcagtcaccgcaaaatgtccctgaaaaattagaagaaaaccatgagctgttttccaagagcttcatctccatggaagtgcctgtcatggtagtaaatggcaaggatgatatgcatgatgttgaagatgagcttgctaagcgagtgagtaggttaagcacaagtacaaccatagaaaacatcgagattactattaagtctccagagaaaatcgaagaagtcctgtcacctgaaggctccccttcaaaatcgccatccaagaaaaagaagaaattccgcactccttcttttctgaaaaagaacaaaaaaaaggagaaagttgaggcctaaataaagtctttttataattattattataacaatgtgacattgcacatctaaataccacatttaagttgatcattaatatgcaatggtagatcagattgggggatgtagcaaactggactttaagaactggaaagaggttttacaaaagaaaaactttcagattcatctctcattttatatgtccagaaatggctttgaattttaagcaattactagttttaattagctctgccctcatgaagtattattataattcaccataaacagctatctgtctgaattacttcaggccttctccataatatctgttagaaagaaattgccagtgagcaagtgagaatttttatttctcaatacctgcttcacttgataatcatattataattttttatcatgattattgactatatttttggagtcccattgtttcagtgggcattaacagaatgctttaaaaacttctaagacaagaatctatagcattagtatacactggcacataattttttaaaaagttttaagaaaagattcatttggaattttattcacagtataaaatttcctcacctgaagtaactttgtttgccaaaaaagttgttttaataaactataatttttgaaaacttccttttttattagtttagaaagccccttatttttcaacaaaggggattttgtacacataacatgggttatttagtttaactctggcaaaaaaaaaaaaaaaaaattttgtatgttgatgtttgtataccgttcagtataaaagtgtcctaagcatattagccaatcttttcacagtagagcatacttaaggctgcttggtactgagtatacttaaatataactccagaatccagggacttggtgttaaaacaggattagagcatgtaaaggtacatctagattcatatttgaatcttaaactgtatttttctcttagtattgctaatgagtaaagaaaagtctcataaggtagccaaatgaaaaagaatgaaagggaaagtgaaaaattaaggggacaaaagatgggatgtgaaaagaagaattctagtttgatggtgactcatattcacgataggatacaaagtgtgatttgttggaaacatgtcccaaatttctaaaattctgcttctctgccaaaagcaatgtctttcttggttgatatttgagttttaaaagggtcaaatctttctaattttttgtatctttagagggcagcactagaagaaatcagcaggtctaatcccaccagtaagaaaactaccacttcttgatttttacagatttaaaaaaatcttttcagtgacctttctttttaatgtaaatacaaatttaaacctcccttcccatgtgtccgtctgcaaccgtccagacgggcacacccaggctcgggggggcgccactcacgggggggcccgggaaaaaacgcggacaccn

SEQ ID NO: 21441 - DNA, 1412 bp, Homo sapiens
  misc_feature 1, 1411, 1412: n = A,T,C or G
nggtcagcatgcgttcccggtatacaacgctagtatgtccagcaaaggctccgtggttctggcctacagtggcggcctggacacctcgtgcatcctcgtgtggctgaaggaacaaggctatgacgtcattgcctatctggccaacattggccagaaggaagacttcgaggaagccaggaagaaggcactgaagcttggggccaaaaaggtgttcattgaggatgtcagcagggagtttgtggaggagttcatctggccggccatccagtccagcgcactgtatgaggaccgctacctcctgggcacctctcttgccaggccctgcatcgcccgcaaacaagtggaaatcgcccagcgggagggggccaagtatgtgtcccacggcgccacaggaaaggggaacgatcaggtccggtttgagctcagctgctactcactggccccccagataaaggtcattgctccctggaggatgcctgaattctacaaccggttcaagggccgcaatgacctgatggagtacgcaaagcaacacgggattcccatcccggtcactcccaagaacccgtggagcatggatgagaacctcatgacacatcagctacgaggctggaatcctggagaaccccaagaaccaagcgcctccaggtctctacacgaagacccagacccagcaaaagacccaaacccttgacattctcgagatcgagttcaaaaagggtccctgttgacggtgaccaacgtccaaggatgggcaacacccaaccagaactccttggagctcttcatggtccctgaacgaaggttccgggaagcatggcgtgggccgattgacttgtgagacacgttattgaataaaccaggtctagaaacccagaggccacttacccggcataaaatcagcttcacgaccgagggcataaaaggcggtgatgcgacggatccgtctgacagagtagatagccggcccacaagagaaaggtcacggagtcgggccataaagggagggagccgacgatcgtgcccctctgtcggcgctcgtatcatcgtctccagagcaaggtcactgccaaatagacccgtgtactatttgatttttgccttagtgattaaaggaggaacatatgtggaaacaatcatcagatctgaatgctacctcgtctgcttcctatttttgtcatctaggatgggtcacaatattcttgagcctatttcttcatcttaaatctcagtatagaagttcccaaggttgttacgagattgagaggccacgtaagcattgctttgtgcatgctacagctctttttgcacaaaagtcgttataattgttgcaacccacaaataaaaggaaacgcatttttgtaacaaccttggcaccatatttctcctacttgtagaatactattcacann

SEQ ID NO: 21442 - DNA, 566 bp, Homo sapiens
  misc_feature 566: n = A,T,C or G
acctacattattaaagatagtcaagaactctaacccaagcatatgggcattaaagaaacttattaagccttcttctttgcaggagccaaaggagacaggggagccccaggttttcctggcctcccgggcagaaaaggggccatgggagatgctggaccttgaggacccacaggcatagaaggattcccagggccaccaggtctgcccggtgcaattatccccggccagacaggaaatcgtggtccaccaggctcaagaggaagcccaggtaaagggtttacttttaaacagcataaaataacaaaaatcatgtttgacctcaaaagttttcaaccttctactcatgttaccttgttgcttcttctttccctgtggtcatcttcattcccccactacctgtggttcccatacccagcagttgtcaaggtaaggtagcctgtttgagggatgcatagttaataaattaacgaacctggctggacgcagtggctcacaacccgtaatcccagcactatggtaggccaaggcagatggatcacttgaggtcaggagttcaagactagccn

SEQ ID NO: 21443 - DNA, 136 bp, Homo sapiens
acaagtgttgaatagagaccacattctggttgaagacactaagccatcttatttcagcctgaatctagtaatcagaagctcactaactcttgatgcctcctgcttgctagttagataactccaaagattagagagt

SEQ ID NO: 21444 - DNA, 3973 bp, Homo sapiens
  misc_feature 1, 3972, 3973: n = A,T,C or G
naagacgattaagttgggtaacccagggttttcccagtcacgacgttgtaaaacgacggccagtgaattgtaatactactcactatagggcgaattgggtaccgggccccccctcaagtttttgttctttttttgcactcctttttgtaagtctttattttttagttgctcctcccatagtaatgcactgaaaggcataacagtttatattgtacaaagcatttgaagaaagtacctcaacttgctgattatttcaaaatgagattacaaacaaaaagaaaacaaatctggttcctcaataaagggcaaaataactgaatacagtctgttatttacttctctcttttaacataaggttgggaacacttcattttacaaataggattaacatgaacataacatcgcacaagcttgcagacaaccagcataaaatatggagtacagtttttaatcagaagaatcatgcttccatgaaagaaattataatcgtttatacaattgaatcgatttcagtattacaaaaactaagttgcatctattcgtatttagttcattaagaaggaaaacaaaacaaacaaacaaaaaggaatgttaagaaaagccaaacaccatttggcactctcatacacaggtcgggtcaccttggtccttgaaattcggaaaggggtgtgcctcagacgtcataaagtagtggctgactggaacagtgctattttaatcaacaaacaatagtttgccaacaaataaatacatgatacacgcaacacacacaaaaaaataaacattaaaaacagtgacatgattgtctaaaattaagatgttattacaaggatttggcaaacaatttattagtggtacagcggtactggtgatgaataggttacttcactgacttaacctctttgagtgttaacatccatagtttacaatatacacataccctttttccctagttttaaacaatgtacttaagaaggcaaaagggggaacaagtactccctgttatcagtttctataataattgactgtgcatttcatccaactacttctgtcttcaaagggttaaattacataaaactttaacgaagaaaaaaattaaatctgtaattaaaagcaactgttcccaatcatgtcaggtgatcttgtacaaaagagaattcagtttctatggagtgttcattcatatcaatgctgccatctcaactgcccttctcacccacccataccctaaggtggggtaaactggaagatgccttcagcccaccaagttttttgttttcactgaatcactttaagtcgcattgattgatcttccagaagtcagcagctgcctttgctgtgcaaaacaaaatatcgagaataaatagtttcttttttctttcttttcttttttaaatcattcagtttaaggtcactagactttagatgagtgaccctgcaggtttataaggcattctgctcagcagtcttgtaaatagtcctatatgaaagagccatgctactgttggacttggtcccactctggtcaaccttgataacgtcatacgtggcttatggactggatagcactggattccgccgcagccctggccatactgtgccacacgttggaagaactgtgggatgtagaatggagggactccttgtcagacagtgacagcatcatagcatatgcctgcgatttggactttctgtgtaacggctgcttaagttcctctggcacatgggaagtactaaaagaagacagctcagcttcagaatattgattatcttccattttcctcattttgaggctatctgtgaagtgccttatatgatctagagcagaaagtccacttttatattcttcctctttatacctcactggggatgtcttgcaactcatctccagggcactggtttcttcatagtcatcctcagggtttccttcatgtaaattacttgtcactggttcctttcctgtttttccagtaatatcattgtcttcatcctcctcatctaacaacacctcatcttcaacttcttcatcatccagcaagtctgaattttgactggtcaccaaagccttttcatctttaaaatgactgccattcattctctcctccacattcctgggagattggctgccatggttgctgttcccaatgaaatttcgaatttctgtgaagtaagcatcttctttgtcatccagaatcgcacctgtactttccagttcagaatgaggcgacgatgttgctgtaccggacatgttcccattctcatgtttctttaggtgtctgtctaaattggtttgttgaccaaaacacctatcacataagtgacacttaaatggcttctctttattgtggatgttgcgaacatgcctttgcaagttagaagatatgctaaatgatctgtcacagtatttgcatctgtaaggctgctctcctgtgtgggttctcaagtgccgtgttaggtttgcagaccttggaaaaatcttgccacagtatctgcaggtatagcgctcctttcccttccgcagaaggttctctggcagggcattgggaggcgccctgaagttgaacatagagggcactgactgtaagagctcactggcctcaggtttcagggcactgaagctctctagcttttctgccatgttttcaatagctgacatccaagttctctgatcaggcagttggaattgtgggtgaaacaagaatcctggagaaggcctcaagtatttctcttttaaagcttcaagtgggtcagttagttttcttttctctactctgtaaatagggtccataaagaaaggagtgggtcttgcatgctgcaaggaaccatctgaagcaggtcttgattcgacgttgcttcctttttttcccccaaacacgtggttttttcgaggctcagtcagctttgtcccactggctctactcctactgcccatacttagatccaggggctggtcttggcttgtggcaggtgtcactggaggcttggaggggactggagtcaagggcttctcatcctttcgcttagtggtgagatcaaagggggactcagagctgcccttctgcagtttctttacttcacctggtgattggggttccattttcaaaggtaacgatctcaagtctctatcaggaaatgggtacattgattgagagaatgagataaagggcttcacactgctgtggatgtgcttgtgttgtttgaggcccgacgaagtggcaaacgttttgccacactccgggcatgcatgggcccgggcaccgacatgctgagagcgaatgtgccgctgaaggttgctagggtccgtgaaaaccttggcacagttttcacattcatagtgctttccactgtcatgtgacatctggtggcgaattaaattggacttccagttaaatgccttgggacactgatcacacttgtattccctctcttcagtatgtgacagcatgtgtttctccaggctttgcaaatcaggaaaaacttggtcacattccttacactcctggatcgtgtgtatctcttggagatcattctcgctttcgagtttttgctgaaagtcctcttcaaccattgaaaatgctgagtgaggagtactgcatggaaacttttggtgatctgctagttcagccttagattcaaagagctggtcacagtcttcgcagcgatattgccgttcttcgtggatatccggcgccatagtttcatggggatagtcttcgctcttcatgaacagcagaagctcctctcccggcgcaatgtctgcaactactctatagaatatctgatcatttatctggcatgcaacaaggttgtgctgatcataacagccagcgaatctaatgtacttgagccagcttccaacatctggttgactggcatctatgcagaacttcacattgtaaaattcgtctaagatcgaaggccggacgacccaccccggagacgtgtccagaccgcacccggacgcgtgggtcnn

SEQ ID NO: 21445 - DNA, 561 bp, Homo sapiens
  misc_feature 1: n = A,T,C or G
natcatatacatgttcttgtggcaacagtcttagttgcttgttctgaattagtgcacttcttaatttaaaatcacgatacattttagaagtttcataagctctgtgtactgccatcacagaagtaaaaagtctagggcttccaggaaccaaatttgtaaatataaattcaaaacgagtactgttacattttgttagtatatagagagcttcagtttggcctcgtaatttagagttagcagtccttgttgtaatattcaatatgcaattgtaaccgacagaaacattgactcttgataatgccaaagagtgccagagaattcttaaatttgttaccaagagtctacctctatctccattatttcctttggtgtcttcaatggaatctaaacaatcaataaggacttctccaggtcttgttttcatttgctgcgcggacaggtcgaaacggacatcccgatcctcccaaagcgcatccagcaccgacatggtgaacaaggcccgtggcaggatctctccacagccgtggaggcctagctgcgtgtctctggctccccccgcgt

SEQ ID NO: 21446 - DNA, 846 bp, Homo sapiens
  misc_feature 1: n = A,T,C or G
nagtgggactcagctggggtgatttcgccccccatctccgggggaatgtctgaagacaattttggttacctcaatgagggagtggaggaggatacagtgctactaccaactagtggataaaggccagggatgctgctcaacctcctaccatgtacaggacgtctccccattacaactacccaatccgaagtgtcaactgtgtcaggactaagaaaccctggttttgagtagaaaagggcctggaaagaggggagccaacaaatctgtctgcttcctcacattagtcattggcaaataagcattctgtctctttggctgctgcctcagcacagagagccagaactctatcgggcaccaggataacatctctcagtgaacagagttgacaaggcctatgggaaatgcctgatgggattatcttcagcttgttgagcttctaagtttctttcccttcattctaccctgcaagccaagttctgtaagagaaatgcctgagttctagctcaggttttcttactctgaatttagatctccagacccttcctggccacaattcaaattaaggcaacaaacatataccttccatgaagcacacacagacttttgaaagcaaggacaatgactgcttgaattgaggccttgaggaatgaagctttgaaggaaaagaatactttgtttccagcccccttcccacactcttcatgtgttaaccactgccttcctggaccttggagccacggtgactgtattacatgttgttatagaaaactgattttagagttctgatcgttcaagagaatgattaaatatacatttcctacaaaaaaaaataaaaaaaaaaaaagt

SEQ ID NO: 21447 - DNA, 1825 bp, Homo sapiens
gagtttcatttagtattttaataataataaaaaagacatacaaaatccaaacatttctttttacaattcagatacatatttttccccaagtgcaaaatactctatgaactgcatcatttgctgtttattgtcgattgtataggagatgcttactaaattggcagcagtggaaggcagatataaatacaatattttgaaatttcttctgcatttaacaaaaagcctcccacatggcgatgattattctgaaacttgagttcagctcacacagaagtataaagttttcagtttgttcaaactgctacaacctgtggtgtctaaaaaagctgatgacaactgggggttctattccttctaatcatatatttccttgtacaaataatggcacaaggatagggtgtgctacttttgagacgggtcaaatgtaaaaatatccttgtgttgttcgctcccacttttattgtgcttaagaaagaaacctggagggttaacattttctgcttatgctcagttatactttgtcttggtaccccttgtttgtggctgtaatattgaggttaagcagcaaatacaaaagttcgagtgctctataacgttttctgacattttgagatatgacctcataatccattccagagtcacctcaaacatgtatatagagaacacttctcatataaaaagtttctctagggccaaagaccaggactgtgttactgaactttcagcaacaaatctgagtctccaccacctcaaactgaccaaatcttgggggctgttaaagcagtcacagctcagtgccagcctttggggatttctaggcctggagcaggcagctcagatccaggatctggtcagttttcttctgactccaagagttgtctcaggttgtaggaataggcatggcctgataatatagaaagagggaggcagagaagtaaagaggaactgccatgttgctgaggatataagtgcctttctggtgtgcattacttggtgcgtgaagccctcccatttccaggctcagagcaggtgaggttttgtactaagatgaatggaagccccacaatactgtcgccccacaccctacacgctgcagagaggcctctgggttgcttcatgaagggatcctatttataccatctttccatttccctccaatggtaaaaacctctcttctgtctgacctgtaaagacctagaatgtccctgagcgttgactcctcattcaatccagttaacccctagtttgatgtcccagggccagcctcctccatagattcagcagcagctttgcctgggttcttaaccctccaacttggaggacctaaattaaacttggtggacaatagcaggtttttacctgctcaccaagatctgccttgacatcaattaagaagcctagtggtctatgccttccgtactgtggaactcatttgcaggtctcataagccatggaataaatggttgaaggatgtgtatttgtatgtatgtatgcatggtgtgacaggaaaggaagggagaaaggagaagccagaccctgaaggcataaattaagaagcatggtcaccgtttggctttccaagagacgcaaaacggctggcagagaggaatcagaaagttatcctaggctgggcgcggtggctcatgcctgtaatcccagcactttgggagactgaggcgggtggatcacctgaggtcaagagttcaagaccagcccgggcaacatggtgaaaccccatctctactaaaaatacaaaaattagctgggcgcggtggcgcatgcctgtaatcccagctacttgggaggccgaagcagaattgcttga

SEQ ID NO: 21448 - DNA, 3106 bp, Homo sapiens
  misc_feature 1, 2, 3, 4, 5, 6, 7, 8, 9, 10, 11, 12, 13, 14, 15, 16, 17,18, 19, 20, 21, 22, 23, 24, 25, 26, 27, 28, 29, 30, 31,32, 33, 34, 35, 36, 37, 38, 39, 40, 41, 42, 43, 44, 45,46, 47, 48, 49, 50, 51, 52, 53, 54, 55, 56, 57, 58, 59,60: n = A,T,C or G
  misc_feature 61, 62, 63, 64, 65, 66, 67, 68, 69, 70, 71, 72, 73, 74, 75,76, 77, 78, 79, 80, 81, 82, 83, 84, 85, 86, 87, 88, 89,90, 91, 92, 93, 94, 95, 96, 97, 98, 99, 100, 101, 102, 103,104, 105, 106, 107, 108, 109, 110, 111, 112, 113, 114: n = A,T,C or G
  misc_feature 115, 116, 117, 118, 119, 120, 121, 122, 123, 124, 125, 126,127, 128, 129, 130, 131, 132, 133, 134, 135, 136, 137, 138,139, 140, 141, 142, 143, 144, 145, 146, 147, 148, 149, 150,151, 152, 153, 154, 155, 156, 157, 158, 159, 160, 161: n = A,T,C or G
  misc_feature 162, 163, 164, 165, 166, 167, 168, 169, 170, 171, 172, 173,174, 175, 176, 177, 178, 179, 180, 181, 182, 183, 184, 185,186, 187, 188, 189, 190, 191, 192, 193, 194, 195, 196, 197,198, 199, 200, 201, 202, 203, 204, 205, 206, 207, 208: n = A,T,C or G
  misc_feature 209, 210, 211, 212, 213, 214, 215, 216, 217, 218, 219, 220,221, 222, 223, 224, 225, 226, 227, 228, 229, 230, 231, 232,233, 234, 235, 236, 237, 238, 239, 240, 241, 242, 243, 244,245, 246, 247, 248, 249, 250, 251, 252, 253, 254, 255: n = A,T,C or G
  misc_feature 256, 257, 258, 259, 260, 261, 262, 263, 264, 265, 266, 267,268, 269, 270, 271, 272, 273, 274, 275, 276, 277, 278, 279,280, 281, 282, 283, 284, 285, 286, 287, 288, 289, 290, 291,292, 293, 294, 295, 296, 297, 298, 299, 300, 301, 302: n = A,T,C or G
  misc_feature 303, 304, 305, 306, 307, 308, 309, 310, 311, 312, 313, 314,315, 316, 317, 318, 319, 320, 321, 322, 323, 324, 325, 326,327, 328, 329, 330, 331, 332, 333, 334, 335, 336, 337, 338,339, 340, 341, 342, 343, 344, 345, 346, 347, 348, 349: n = A,T,C or G
  misc_feature 350, 351, 352, 353, 354, 355, 357, 358, 359, 361, 362, 363,364, 365, 366, 367, 368, 369, 370, 371, 372, 374, 375, 376,379, 380, 381, 382, 383, 384, 387, 388, 389, 390, 391, 393,394, 395, 396, 397, 404, 405, 409, 414, 420, 421, 427,: n = A,T,C or G
  misc_feature 428, 433, 435, 444, 446, 447, 450, 453, 455, 460, 462, 463,464, 3089, 3090, 3091, 3092, 3093, 3094, 3095, 3096, 3097,3098, 3099, 3100, 3102, 3103, 3104, 3105, 3106: n = A,T,C or G
nnnnnnnnnnnnnnnnnnnnnnnnnnnnnnnnnnnnnnnnnnnnnnnnnnnnnnnnnnnnnnnnnnnnnnnnnnnnnnnnnnnnnnnnnnnnnnnnnnnnnnnnnnnnnnnnnnnnnnnnnnnnnnnnnnnnnnnnnnnnnnnnnnnnnnnnnnnnnnnnnnnnnnnnnnnnnnnnnnnnnnnnnnnnnnnnnnnnnnnnnnnnnnnnnnnnnnnnnnnnnnnnnnnnnnnnnnnnnnnnnnnnnnnnnnnnnnnnnnnnnnnnnnnnnnnnnnnnnnnnnnnnnnnnnnnnnnnnnnnnnnnnnnnnnnnnnnnnnnnnnnnnnnnnnnnnnnnnnnnnnnnnnnnnnnnnnnngnnngnnnnnnnnnnnntnnnagnnnnnnggnnnnncnnnnntttgccnnttancggtnaacccnnttggannccgantncccccccancnnaanctntnaaccntnnngtgagggcgggttgattttctcactttggactggtttttacttcccgacttctggactcatctttcaagaggactttagactaattgcagataattaagagaatatgccttctgcatcctgtgatacactactggatgacatcgaagatatcgtgtctcaggaagattcaaaaccacaagataggcattttgtaagaaaggatgttgtcccgaaggtacgaaggcgaaatacccaaaaatatttgcaagaggaagaaaacagtccaccaagtgacagcactattccaggcatacagaaaatttggatacgaacatggggttgttctcataataattcagatggagaatatatggctggacagctagctgcttatggctataaaattacagaaaatgcatccgatgcagatttatggctcctgaacagttgcactgtaaaaaacccagctgaagaccactttagaaactcaattaaaaaagctcaagaggagaacaagaaaatcgtactggctggatgcgttcctcaagcccagcctcgccaggactaccttaagggactgagtatcattggggttcagcagatagatcgtgtggtagaagttgtggaggagacaattaaaggtcactctgtgagactgctgggtcagaaaaaggataatggaaggcggcttgggggagcacgattggatttgccgaagattaggaagaatccactgatagaaatcatttccatcagtaccgggtgtctcaatgcttgtacctactgcaaaactaaacacgccagaggaaatttggccagttatccaattgatgaactagtagatagagccaaacaatcttttcaagagggtgtttgtgagatatggttgaccagtgaagacacgggggcttatggcagagatattggcaccaatctccccacactcctgtggaaactggttgaagtgattcctgagggagcaatgctgaggcttggcatgacaaatccgccctatattttagagcatctggaggaaatggcaaaaatccttaatcaccccagagtctacgcttttctgcacataccagtccagtctgcctccgacagcgtactcatggaaatgaaaagagaatactgtgtggctgacttcaaaagagtagtggattttctgaaagagaaagttcctggaataactattgctacagatattatctgtggttttcctggagaaacagatcaggattttcaagaaacagtgaaacttgttgaagagtacaaattcccaagcctgtttattaaccaattttacccaagaccaggaactcctgctgcaaaaatggaacaagttccagcacaagtgaaaaagcaaaggacaaaagatctttctcgggtgtttcattcttacagtccatatgatcacaagattggtgaaagacaacaagtgttagtaacagaagaatcttttgattccaagttttatgttgcacacaatcaattctatgagcaggttttagtgccaaagaaccctgcgttcatggggaagatggttgaagtggacatctatgaatcaggcaaacattttatgaaagggcagccagtatctgatgccaaagtgtacacgccctccatcagcaaaccgctagcaaagggagaagtctcgggtttgacaaaggacttcagaaatgggcttgggaaccagctgagttcaggatcccacacctctgctgcatctcagtgtgactcagcgagttccagaatggtgctgcccatgccaaggctacatcaagactgtgcgctgaggatgtccgtgggcttggctctgctgggtcttctttttgctttttttgtcaaggtctataattagaatacaactaatggaaacatctataaagaagaatacatttctaattaaaatcttcaatgaacaggaaagcgacatctccattctccaagggcaataatttgtactggtcatgctgcctccttctcagccactcttcttaatgaggctccccctgtctcacattgagttgggcccattggttatttgacctaaaacctaatcacggctaccatagcacatccttcaaattaaactgcttttggtttacttttagcaagaaatgcaagcggttgcatttttttctgtttgtttcaatctctaatctttaagtcagaacctaattgtacagtggctctggccatcttttcctcatgtggaagaattttctatctttaataaactttttctttgttttttttttccagatggagtttcgctcttgtcccccaggctggagtggtgcagtggcacgatctcaggtcactgcaacctctgcctcctgggttcaaacgattctcctacctcagcctccctaatagccaggggctacaggcatataccaccatgcccaactaattttttaattttttgtagagatgagtgtcactatgttgcccaggcttgcctggaactcctagcctcaagcagtcttcttgcctcagcctcccaaagtgctgggattacaggcgtgagccactccacccagcccagattaaatgtttttatttctacctgccatcattggtctttactaagtgaagtgacttctttctttaacaataaatggaattggtatactaannnnnnnnnnnnnnnnnn

SEQ ID NO: 21449 - DNA, 1823 bp, Homo sapiens
  misc_feature 1, 1821, 1822, 1823: n = A,T,C or G
ncgtccggaaagttaaactatttaacgtgaaatccattaactggaataattgagtttctttatttttacaataaattcactgagtaaataagttggagctggaattctgagctttgtgtttggactgtctggtctgtagctaaaggaaaaagttaggaggggaatatttatttaaatctatcagttcattgcctggtcaggtctctggcctataaacatgcaaaaaaactaattcatgttaaagtccttccagatcctaatttctaaagcaatcaggagagaaagcttttagaatggcacatcatatctcattgatgccaacatggttttgtccatggttctgactttctgtgaaggcaccagcttgcaatatgccatcccatttcaccttgcatgtgagacagcaaacaaaatccacaaatggtgtgaactaatatgctggctgctaccttgcataaattaatgatttgatcacacgggttcttcgtggggttacatctgtgaatagcctgttttccacatgtaaatttgtgccttacaccttgagttgtgtacacttgtaaactctttatgatcaactgttcccccttttgaaataagtgcagatatttatttaaccctcccttccccaccctctgccccacttccagccctctgaaagattggagtcaagcagatggaagaatgcagtggtgatagttgtcatgcgacagcctgagaacgctgggcagcaccacaccctccaattcacactgccttctagttgtgccaactggaaccaccctttggctgtgctgcgaagatggaccccagtgttgttgtgggtgtgtcaaatcccctttcatcctcaagagctccctgcttcccttagattatttcaatacggtgatatccttatttgctagcagaaaagggactaacgtcccattcctcttttctgctgcgtccactggctagagagcaggcggtgcgcggttgggcagacacctgggaggagtctccaagccatgtgcacagcacacacgtgcagtgcacacaaagaaatgacatggaaatagatgcaggcaggctggtccctgctgtgattaacgagtaactccaagtacaaggccgaccacaatggatgctgcaaaaacgttgactggggcaaaggattttttattttattttttattttgttaattatgtttttaggggatgggaggtggtgtgtgtttttctcctcttggttttcatttgctcaagcacacaaaagggacttttgtttactctatcatgaacaaaggaactgtccacatactgtaaaccatgagcagtgttgttgttgtttttttaaacagtatatttggtggtctctttgtctgcttttatttccagttcgatcttctgggtttagttttgtctttaaaaagaattcaaaaaaagactgacaatgacagttttgagttggatagtgaaaaagtggagcctccataatcagtgtggttgccttcagacctgagtacttagctgagggtgggtgagagccctttgttccctttttttttttttggcttttgtaatggaatccatgttcacatcctgtgaactctgtctcctgaaaccctgaagtatttcctagaacctgaaatattcgtttcttccttgaattttctctagaaatgcagaaattaggaaggtgatgggtctgtatccccctgcccccttctttcccatgcttgacttcccagagtacttgcactgcagcacccatcattggcgtaagcggctttcttggtccatgtttttaggcattaattgcctagctgtttatgagacccnnn

SEQ ID NO: 21450 - DNA, 1809 bp, Homo sapiens
  misc_feature 1, 1807, 1808, 1809: n = A,T,C or G
nacgaggggaactggaactttaatggctgttaaacaggtgacttatgtcagaaacacatcttctgagcaagaagaagtagtagaagcactaagagaagagataagaatgatgagccatctgaatcatccaaacatcattaggatgttgggagccacgtgtgagaagagcaattacaatctcttcattgaatggatggcagggggatcggtggctcatttgctgagtaaatatggagccttcaaagaatcagtagttattaactacactgaacagttactccgtggcctttcgtatctccatgaaaaccaaatcattcacagagatgtcaaaggtgccaatttgctaattgacagcactggtcagagactaagaattgcagattttggagctgcagccaggttggcatcaaaaggaactggtgcaggagagtttcagggacaattactggggacaattgcatttatggcacctgaggtactaagaggtcaacagtatggaaggagctgtgatgtatggagtgttggctgtgctattatagaaatggcttgtgcaaaaccaccatggaatgcagaaaaacactccaatcatcttgctttgatatttaagattgctagtgcaactactgctccatcgatcccttcacatttgtctcctggtttacgagatgtggctcttcgttgtttagaacttcaacctcaggacagacctccatcaagagagctactgaagcatccagtctttcgtactacatggtagccaattatgcagatcaactacagtagaaacaggatgctcaacaagagaaaaaaaacttgtggggaaccacattgatattctactggccatgatgccactgaacagctatgaacgaggccagtggggaacccttacctaagtatgtgattgacaaatcatgatctgtcctaagctcagtatgcaaaagcccaaactagtgcagaaactgtaaactgtgcctttcaaagaactggccctaggtgaacaggaaaacaatgaagtttgcatgactaaattgcagaagcataattttatttttttggagcactttttcagcaatattagcggctgaggggctcaggatctattttaatatttcaattattcttccatttcatatagtgatcacaagcagggggttctgcaattccgttcaaattttttgtcactggctataaaatcagtatctgcctcttttaggtcagagtatgctatgagtagcaatacatacatatatttttaaaagttgatacttctttatgacccacagttgacctttattttcttaaataccagggcagttgtggctcattgtgcattttactgttggcccattcatttcgtttttggaaattatggttttgtattttcatgtttatttacattcatttttgtttattcagggaaagctgatctttttttcaaaccagaaaaaaaaatgaactagatatgaagtagagttcattaaatatcttgctattgtcagagtttttaaaatatagacttaattttgtttttttaaattggaatacaataaagtactacctacatttgagtcagtctccactcttattgtgcagggtgagtacaagttaactataaataaactgtcctctctggtgcaactcacaaccaagatcaagattaccttaaaatttatttgtattttttagatgttttggttgtcaaactgtaggaaacttcacaacatgtaagtcttactctgtatgtaacaatccatcattcaccttcactactggtaataacatagagctgccattatccttgtannn

SEQ ID NO: 21451 - DNA, 543 bp, Homo sapiens
acaaagaatcaactttattgaacattcagggtcagtttctcttcttgctcttgcctgtgaccttggctggtgtgaggactggagctgctgcctggtacagggtggaggagatcttgttgatgtagtacagaccaaccatggagaagatgaagcaggtggtgacacagactcggtggatgaggccagatgcaaagagagccaacaggaggcacaggagaactagggaggcaagaagaacaaggagggcaacggtcagaatggaaatactaggcatctgcacatggagtccaggagaaatccggggctctctgaatcctggggaacctgcttagaagggtaagcgtgactacagcaggaggattctgattaccttaatgatacccagaacatggaggtaggaggttgagtgtggtggcttgcacctggaatcccagcacttcgggaggctgaggtgggcagatcacttgagcccaggagtttgagaccagcctgaacaacaaagtgagacccatctcttaaaaaaaaaaaaaattgaattaaaaa

SEQ ID NO: 21452 - DNA, 931 bp, Homo sapiens
acgcggggatcttggggctgctgggactcgcgtcggttggcgactcccggacgtaggtagtttgttgggccgggttctgaggccttgcttctctttacttttccactctaggccacgatgccgcagtaccagacctgggaggagttcagccgcgctgccgagaagctttacctcgctgaccctatgaaggcacgtgtggttctcaaatataggcattctgatgggaacttgtgtgttaacagtaacagatgatttagttgtctggtgtataaaacagaccaagctcaagatgtacaacgaacgattggagacaattccacagtcaactaatgcgacttatggtagccaaggaaggcccgcaatgttaccatggaaactgagtgaactggttgaccatgaagactttgtcgtgtacttaggaagtaaatatctttcgaacttagagaccagtgtcgggacacgaaagtactttatgtaactaagtgggctgttcagaagcttagaggtcattcccgtccactctctctctcccttactttagagagctagggatgccactgtctcagctagacagccttatttactttggacctgccgggaactgcctctgtcttagaacccggcgatcttcgccgtcgtccccctgtcctgctcccggcaccgttccgccttgccctgccttccgccccccctctcttacttggcccctccttccgacctccgtcccccggcccccgctctggccaccgtgcgctgcccccatcacggtgctgccccccccctcgcgtgcacggccccgtgccgcccccccaccgcgccccggccccccccaccccgccgcccgcccccgcccctcgcgtccccacttcttcttgcctgtttgtttctccgccccccccgcccccccccccccccccaccccccccccccc

SEQ ID NO: 21453 - DNA, 280 bp, Homo sapiens
  misc_feature 1, 2, 3, 63, 64, 65, 66, 67, 68, 69, 70, 71, 72, 73, 74,75, 76, 77, 78, 79, 80, 81, 82, 83, 84, 85, 86, 87, 88,89, 90, 91, 92, 93, 280: n = A,T,C or G
nnnaaaaaaggcccccccagggggggggaatttcccccaagggggggggggggccaagggaannnnnnnnnnnnnnnnnnnnnnnnnnnnnnncatttatcttggaaacagtagttaaactgaataaaaaccaaggggcaatataactgctactggttgagtcatacagtgatgtgtagtttggaaaagaagacgaatgatagatattgagcccctttaggaaatgttgccagtatttgaatttggctttcatagttatctcttgcacacgaagtagagn

SEQ ID NO: 21454 - DNA, 3842 bp, Homo sapiens
gggtggagtgtaggccagggggttggcggtgccgtgtcatggaggctcagtctctgagcagccattgaagcggaaggaactgcgggtgtgtgtgtgtatgtgtgtgtgtatgtgtgtgcgcgcgtgcgtgcgtgtgtgtgcgcgcgctagtgtgtggacaaggaggtgggggcagctgagttagagtcccaactcttggactccatttgctattctcttctttctcccccacacctatctggtggtggtagtgggcgtttatatttgcgttccttttcattcatttctaaatctcttaaaaattttgggttgggggtattggggaaggcaggaaagggaaaaggagagtagtagctgaagagcaagaggaggacatggagatgaagaagaagattaacctggagttaaggaacagatccccggaggaggtgacagagttagtccttgataattgcctgtgtgtcaatggggaaattgaaggcctgaatgatactttcaaagaactagaatttctgagtatggctaatgtggaactaagttcgctggcccggcttcccagcttaaataaacttcgaaaattggagcttagtgataatataatttctggaggcttggaagtcctggcagagaaatgtccaaatcttacctacctcaatctgagtggaaacaaaataaaagatctcagtacagtagaagctctgcaaaatcttaaaaatttgaaaagtcttgacctgtttaactgtgagatcacaaacctggaagattatagagaaagtatttttgaactactgcagcaaatcacatacttagatggatttgatcaggaggataatgaagcgccggactctgaagaggaggatgatgaggatggagatgaagatgatgaagaggaagaggaaaatgaagctggtccaccggaaggatatgaggaagaggaggaggaagaggaagaggaggatgaggatgaggatgaagatgaagatgaagcaggttcagagttgggagagggagaagaggaagtgggcctctcatacttaatgaaagaagaaattcaggatgaagaagatgatgatgactatgttgaagaaggggaagaagaggaagaagaggaagaaggaggtcttcgaggggagaagaggaaacgagatgctgaagacgatggagaggaagaagatgactagatcattctaagaccagattctctaatgtttctgggtgtgcaatagagtgatcacatctttgtttcttcatgtacgatagctatccctacagaagataatgtgtaactttttataggaaaagtgtggttttactatttttgccttatcattccaaataagaactagtctgttaatgatcatattgtatgtagagaaaaattttcattgactcccattgtggaattccctagcaatttatttagacttaattttttaaattcaagcttactgtattagtcatttttagcccataattaaaacatgatcacttttacacaggtgtagtatggtgcatttcattccttatttataaattaactgaaattacagtttgctataatataaaatgacaatagtctcttgagtggtaagttggttatttttttagaggtgatccaggaatctttagtttgaaggcagttaccttttttttttttttttttttttggactaagagtgtttggttgcttttttgtcacaagtaacttggaaaatagaagcagaatagtaaaggttctattcagcaacatagttcatggattttgtggaggttctattcagtaatatggttcatggatttagtggtgactgataagattttatttttgaaggaaaaattgcttatactaagtccagagacatgcaggtgagcccttttgtcaggctgcaaatcatgacatgccgatggttgtttattttgtttttaggtgtgcattctttttcttcttagcaattcctttatgatcaccttcccttcttgtttcactccctcccgctctctcaaaaggaacttgggaaacttgtgaaacccaggaaaacctttagtcttatacctcaactacctttcagtcctgtctgggttttaaataagtgaagtagaagaaattgagtattttctgacataagaatatattatcaatacagttttatgcagtaagctctccttaccataaatgtttcttggttgacaacatctaagacaatattagtgggatgaagaaagaaaagcaggggtgcttttggaagcagtgttagtgttcctcaaaagtcggaacaattgcctgttgatatattaataagacattaaagtcaaattttaatgttggcctctcaaatgatttggataccactctgcaaagtatttctaacctttaattcccagttttaaaacagatataataatagcatttaattggaatatactaggcagctggaaaagtatttgaaactaaattgacattaaaattaagatttgttttcaagtggatgtccattaaaagtagaaaaatatttgggataagtgagtgtgtgtttccttacatggctactaaataaaatataatgagtatacaagtatatctatctcctcttttgctatggaggctccatgttcaaggcaatggctttttaaatcttggctatctaaaattttttccctttgttttgaatatttgtaagtttttaagaagttagtgtcagcaaattaattgaagttatgcttctatactgggacatatttaaatactgagtatagtactgctgctactgcttctacaatgtaaaatgtatgacttggtgttttaaagtaaaaattatgatgttacttgtggagaaactaaaaatgttgtacaactgaccgaaagaaaacccttggggataagtttagtgaggggattggaatccccaaaaagataacatttttcttctgcttttaaaaactgaaattccctgttctagttcctaacaattctcattacatactatgccagattacaaaatacttatttttaaaatgaaatctatatattgactttcttatcaatcatcttactgtgcaatcaaaattagagtactttggtttgaaaacaacacttagagcctccagataacttttaagacttatttagctttgtgggtggtattttcatgcaaataagtaagggtgggttttatattttgtagaagttttcggtcctattttaatgctctttgtatggcagtatgtatatattgtgttaagttcctcaagaatctccttaaaaactttgaagttaatacttttgtgcaactgtgttttgaataaagccatgacagtgttaaaaacaaacaaaaaaatttgcagtactcctgattattcttttattgtttttgactgttccctgtttttttctgtgactgctgtaacttaaagtttttgaaactgaattgcttcaaataaattgaagatttgttataatgattataaaaaaaaaaacaaaaaaaaaaaaaaaaaaaaaaaaaaaaaaaagaaaaaaaaaaaaaaaacaaccaaaaaacggagggcgcaaaacaaaaactcagaagccagacaagaataccaaccaccatagacgaaagagaacaccaagggcacacaaagaacaaacagccgagcaagaaaaaaaacaaggagagaagaaaaagcacaatgcacagaggaaacatcctcggggggacaaagtaacacaaccaaacaagcacgcgacacaaagaagatcgtgaggccacaccacggcgcgaaccccgaaacaccaaaccccgcctaggcgagtaagccacggccgcccacaggtgggcgccagaccaaacagacggacacagaag

SEQ ID NO: 21455 - DNA, 836 bp, Homo sapiens
  misc_feature 1, 2, 835, 836: n = A,T,C or G
nnacgcgtccgccgggaaagcgcggaattcagaggcagagtgtttccaatgtttgaggtactttagaatgtttactttgggaggtcgaaattgttgactatggctaactgttcccaagaagagctagatgaagagtttgaacagtttatgaaagagctttcagatgattcttttgaaaattcagacaaaacagctagacaatctaaaaaagagatgaagaagaaagatacagtgccttggtggataactgaagatgattttaaagatgatggacttcttggaacaaatgtgagctatttgaaaacaaagaagacttctcagcctgttatggaaatagaagaggagtctgctgaaaagattcaatttcttaagagcagtggaacctctctcttaagtactgatagcttagaaacaaatgaactagtagtttctgagctcaaccatagtagtctcggagtgggattggacacattagaagaacaagaggagaaagaacaattttttgccaggctttgagaaaggcttgacatcttccattgacttattcgagattaaatacggaatcggattctaattgactcctacaaccacttgttaacaagctttacatagtaatcaaggccagcgcagaaactaaacttgatgacgaacattgagaatcgaatcgaaacatgaacgaactgggcaagacaactacaggtgaccgattttgacgcatgacgtattgtagggtgcacccggttggacttactaacagatgaggaagagccttccaaaggagagatccccagtcacgacacactcagctggtgcccacaccgggcagagcaaaacnn

SEQ ID NO: 21456 - DNA, 928 bp, Homo sapiens
  misc_feature 928: n = A,T,C or G
acacacacgtgcacatcaacactaggcttcctacgtctgtttgctgaaaagatctagaaataataaccaacctagtggaattgatcttccctggtttccagattgtcatcttgatacaacattttccacaaaagaagccagggtttttggagaaagactgattgtatgtccaatgcaaggattttaaaagatgagcctggtggtgcatcctggaaacctaaccagatagtaagaaaactgacactactttatgtcggaagtattgaggaaccaatatgaagaggcttccagtggccaaagatgtgacagttagagcatcagtgtggataataacaggaatggattgaaatgcatcgaatatgcttgtctctctgagtccataatactaaaaaattaattggtcacctttgaaggataaatagaagcccatatcattgttttgaaaaattgtaaatagaagatatgagcatttatcctgccttttccatgtactgtatcatgggggatcaagtaatagacggggaggtttttccttatagaagtatcccagctaatgaattaagaagggttgattgaattttaatatcaccacttcgtaacctcaaatgaatgaacagatcaagacattgagtagcagtgctgctgacatcacaaaagaaacacccaggcattattgcctcctgatgggagaatgcactaccttctatgaaattatcttgctaaattaatggaatctgtatctcatgtagcctctacatccaatttacaggagatcagaagacagaagaacatgttaaactacatcatgtgggtacagtcagcaaatttcagacgatgggaaactgcaggtcaaacaacccaggttcttcaacaaataaaatgcaagggaaaaaaaaaagatggaggaggatcctgtagattaagagan

SEQ ID NO: 21457 - DNA, 728 bp, Homo sapiens
  misc_feature 1, 2, 3, 727, 728: n = A,T,C or G
nnnatccccatgccaataacctcctcttgaaaatgtagtatcttcacgataacctaattatggttattaaaaaataagaaaataaaaagaacaaggtaagggtggctgctttgtcatagttgtctactccccccaaccctagtcctctgtgtctcccaaaattacctgtcctgcttccccaatttctaggaaattttggaaagttaggtgtgccagctttcgggatgtcctcagacagctctaaatcaaaggaccagccctttttttttttttttttttttttccgggaaagtcgatcttctccgtttctctggcattggctttatttcaagaatttctagtctggcccagtcattgtctttaaaaggagcaagtgaccaaaagaacaaattgctcaatgactaaattttcctgctaaaatcttaacgtatatcactaccaagaaccaaaactgagttgctgatagaattgttaaataagggtagccaccatcttctcacctggccatttcaaatcacaaggccagcgttagtgaacaattctgtcttgccaatttgaaattcaagtcttttctttcaaacattcctctttgaacttgttttgttacctagctgttttaagggcatcaggaatagaaagaccggggtttaattctcacataagacaagcttcttaaatcccaattttcctcaatttcattgaagttgaggtatctacccaattagcnn

SEQ ID NO: 21458 - DNA, 760 bp, Homo sapiens
  misc_feature 157, 158, 159, 160, 161, 162, 163, 164, 165, 166, 167, 168,169, 170, 171, 172, 173, 174, 175: n = A,T,C or G
acattttaatgaaagagttttaaaataggtaagtcttctaaaaacaataattactaagtccattttacaaatgttggtgggataaatgggtgggtcagattttcttaaaatcagaaacagactgctaaataacctactgaatacatctaggaaaacnnnnnnnnnnnnnnnnnnngagacggagtctcgctctttcgcccaggcaaaaacattttaaactttatggaagatatacttatcttcagaagtataaaaaacacattgataaaaattgttaggctgacataaaaatattcattaaaaagcttgtatgcaaaatttaatcatataataacttgaaacttttaaaatgggatcacttgttatctccacatgttctcttctcaccaatttctcacaaaatctaaaacacagatgttagaactgtaaacattattaacctagagactaatttcctaaaataattacattttgcagaatatagagtgaatagttgtttctttctcacaaaaactggattgtgtaatcctaatatgaaatcacccaaatctcatgaaaagtaactttgcaaacctagccttaaatttcctaattagataagggcattaacaagccaagaagagattcttggcaacacagatgttttgtcctctatgtgaaaaactgtcctaaatctttctttcaatgaagttattttgcaaagataggatacagaagcctccatatgattgctgcttctttttggtagcaattcacctgt

SEQ ID NO: 21459 - DNA, 1127 bp, Homo sapiens
accgggatgagatttaagaaggagtgaagagaaagtggcagaaagactatttgaagatatgatggccagaattttcttaaatgttatgaaaaacattgatctgcctaagaaacttgaagtccatgtggtataatttaaagagatgcatatttcaacacatagtagttgaactgttgaaagacaaagaaaaaaaatgtgaagacagcaagagaagagccactcatcacacaaaagtctcctcaaaaagatggctgacttcttatcaaaagcagggaggccagaaaagccaacaaatatttattgagtacatactatacagtaacactgctgttggccctggagataaaacagtcacaggtcagcccttgctcccatagggcttacactccagtggggacacccacaaagcatgaaaataaaagcagtaaaaataaaacagggcattatgttacagaggggtgggggaaaaggctctactatgttgaaggcagaaaaaggcctcccaaaagagggagcatttaagctgagatgtaaggacaggaaaatgccaaaatagggttacaaaaattgaggtttatacccccataagtgtataattatgatttgtcaatcaaaaatatttatattttaaaaagattggaggcctctaaaaaattgaggttaataataagttcacatttttaactaagagaaaaatgttacatagtaggttaggatttctttagcaatagaatgttactttagaactttggggccccgaggcaggcgtatcatgaggtcaggagatcgagaccatcctggctaacacggtgaaaccccatctctactaaaaatacaaaaaaattagccaggcgtggtggtgggtgcctgtagccccagctacttgggaggctgaggcaggagaatggcgtgaacccaggaggcagagcttgcagtgagccgagatcacgccactgcactccagtctgggcaacagagcaagactccatctcaaaaaaaaaaaaaaaagaactttggataaaataatctatcagtcatacctattatgctttaaatattctacctacagatggtgatatcctaaagagtgtaggatctagaccaatggtacttaattttccggacgc

SEQ ID NO: 21460 - DNA, 1197 bp, Homo sapiens
  misc_feature 1, 2, 1125, 1126, 1127, 1128, 1129, 1130, 1131, 1132, 1133,1134, 1135, 1136, 1137, 1138, 1139, 1140, 1141, 1142, 1143,1144, 1145, 1146, 1147, 1148, 1195, 1196, 1197: n = A,T,C or G
nnaagagacactgaggcactctctactcattataccttctttgtctctgtctgtctccggttggctggctctctttggagaaatttctttgtgggctaaagaagttaaaacatctacgatggctcataataaaatgaaagtcaaaaatataagatgaatgatctctcttgaaatattaaggcatattttctaaattattcatcttagaacattacttgcctttcggatacctttgggatatttcagccttggtgctaaaattgactcctgaactaaagctatttaagtcatgaaactctcatcaagtatcttgatcaaggcagtcattgagaaacgtaagttaaaagatcaatgttaaaactttctgcacatctatgtgttatcaaggcatgttaactgaaaggttttaggaagattaaaatgcagatgtaacggaataaagagaactcacatagcaacagtaggatttataaccttcacaacactctccaaacagtgaaataatctctaatattagctgttgtggtacttcctgcctatttttctggaatactgtgagcaacagagtgatgagagacctaatcttgcctggaataagtcagcaaagtaatctcctctcattatctgctttataacaaatgaaaaacacctggaactggggtggaccattcaagcactcacagaaggaaacataaatgtgtagaatagggagcggtggggactgaggcaaaataagagcacacgccttgtctagcgtaagtgaaacaaacaactttaagtacacaataaaacacaaatccagccccaggatcataaatttatgactcctaatctaagatcacagcttacttctttttatttaattaggaaaaggaatggattatattaggatgaaggtcaccatatacccagctctcctataaattacttagcatggtatatatgctaaacattagcaacctttacttattatcttgtttataaaactacattttgaccatgagattttttttatggcctaaaaagttttttttaatatgctaaacattagcaacctttacttatgatcttgtttataaaactgcattttgaccatgagaatttttttttaatagcatgacaagnnnnnnnnnnnnnnnnnnnnnnnntggatatgtgtcaataaatttttattggagtatattatgttagcgannn

SEQ ID NO: 21461 - DNA, 583 bp, Homo sapiens
  misc_feature 1, 2, 581, 582, 583: n = A,T,C or G
nnccggcggcgggggctgtggaggcggtggcagttactcggcctcctcctcctccgcggcgttaccggtgaagaagtcgaaaatggagcacgtccaggctgaccacgagcttttcctccaggcctttgagaagccaacacagatctatagatttctttgaactcggaatctcatagcaccaatatttttgcacagaactcttacttacatgtctcatcgaaactccagaacaaacatcaaaagatacttgaatacctaccaagtagaaggcactatgccagcactgcatagctttccttgaagaagagcaattactgcccttcaggagtgtataatctagtaggagaaataaaatatttacatgagttttacatgtaggaaactgaatgaaaagaaaacatttaaagttgatgatatgttatcaaaagtagagaaaatgaaaggagagcaagaatctcatagcttgtcagctcatttgcagcttacatttttggtttcttccacaaaaatgataagccatcaccaaactcagaaaatgaacaaaattctgttaccctggaagtcctgcttgtgaaagtttnnn

SEQ ID NO: 21462 - DNA, 702 bp, Homo sapiens
ccactaaagcaggattcagactacaatatagctgctaagtgttgtgttgtcgttccccctgcttaaaataaagttgtttcttaactatacctgtctgctattctcctgtagcagccagggacgcttggtctcatacatgttgattaaaattaaataccgacctgactggtgattcttgaattaaggtttattaatttgcagcatggtgacatggaccagaaggagagagatgttatcatgagggaattccggtcagggtcaagtcgtgttctgatcactactgacttgttggctcgcgggattgatgtgcaacaagtgtctttggttataaattatgatctacctaccaatcgtgaaaactatattcacaggtgagaagccagcatcttggctgtattgaaaaaaattcatacgtttttctactgtgatttgtatgaaaggtaacatcaaatcaaggaatagattcagtaaagtcagtagtgttcagtaagatgatgtaattaaatttgtactagggaaggttgatgagaacaaagtgggaaaacttgtaaacattgcccagattgtggacatagggtttttttccacaattgttggtcttaccttatgcttgagcttttagtgatgttcttgtgtccatgtgtttttcttggtgactttttcaatacagccaagatgctggcttctcacctgtgaatatag

SEQ ID NO: 21463 - DNA, 278 bp, Homo sapiens
  misc_feature 278: n = A,T,C or G
tttgttgcctcttggtgagaagaagctgtttctcctattatcttgacctttctaaagtcaaacctctttctaaacttatcaaatcatcctttgctggcattacattttccaggtatagatccttcaccttccttttgctttgtcacagaatgacttttttctcaaatcatagtagagtctctaagtatgcctttcctatagcaatactacacctacataaaagctgaacttacaatatgagattaaaagatattgcacaaaatgtgcaaggttcttgn

SEQ ID NO: 21464 - DNA, 1622 bp, Homo sapiens
  misc_feature 1, 2, 3, 4, 5, 1618, 1619, 1620, 1621, 1622: n = A,T,C or G
nnnnncttatgctagagcttatatcttcttttattttaaccttcacaatgatagttaagctgggggagcagaacctgtcaattattccccaccagtcttcattcttttctctgcacaagttctggtaaattattctaatgtgctctaaccagttccacccaatgttttttaatgcttatgagtttgcagtttttgtacttggtggtctctgtggttcacatttttttgtgttgtagtgtctcctgcctcggttggctcagaaaataaggcctaggaactgcaattagctcatgatttgtcaagttcagttagtaccaagctaagagtttacttacagatgacagcaagcagatgctctagtaattcgtcagacattgcagggatattgtgtagtcagatattaccctcttgtggaaagaactacctcacatcattatttatttcccttctgttaccaacagccaaggaattacttagtgtggctccctgcatcaatactgggatatgcttaaacaagggaatgccataagagttcccaattgcctcgtcatagcctgggccatagatttttgttactgctaatcttgcttcttaaagttcacacccagtgcaaaaaacccaatcagcaaactaaccccaaaatccaatatatttagaaatgtaagtgttaagagatgtgcattatgtacaaaattgaaaattggtgctaaagtggcaatgtcaatttaaaatttcttgtccagatctgactgactgactcaggagattatagttcctactcattctctttccttttatcagatctttcaaaagcgctttttaaaattgatcaatgtgcaattctgtttgagtctctacagtcctatcccttttggaatgaacagctacacaaataaatattcttggaacttcgaagttgtcttcaaactagctctagaaaatgtccctagttgacattagtgttggtctgttagaaggggaaattgatttgactgcttcatgttttgaaaagagcattaagagggatttgaggaaggtatatgtggctttcttttttcttaagtttgaattacacttgatttcctttgggttattaggcagataaacccttgtcattagtaatacttagcactgtccaaaatgaaaaatgactgccagtgtgttgcacatacataagaaaattacatcttactgcgaagtctttggtttgtttccttatttggtttgactttgacttactattttgctatggtcatatccttaatatctgcggtacatttcatatgtatatatggggtgggagcataattgccattcccatgtgtctcaaggaagcttaatgaggaaactaatgagttaatattaactcttctgaagaaagctgacattttaggagtattaagtcatctgtcgttaaggagcagcaagaatatattatgattgtatcacatgttccagaagagcattaccccttacatagaaagctccttggagatttcatgatgttggatgaacatcagtttatccttatacatccctatgagctataattatcctcatttgatacttgaggaaactgaagtgacttgctccaaagtgactacaaaaacattgcagnnnnn

SEQ ID NO: 21465 - DNA, 1224 bp, Homo sapiens
  misc_feature 1, 2, 3, 4, 5, 6, 1223, 1224: n = A,T,C or G
nnnnnnggcctggaggcccgcgccccccccttattgatgacactgatgccgaagatgatgctcctacaaaacgtaactccagtcctgcaccctcttccaacaaaaataacaatgctgttgacagataaacagtaactcagcgtaagtgacctgtggatcatcagtagtacccaagcatggtcctgaacagtgtattagcagagctttagtttatctcagtcctggatgggagagagagggaggagtaaaactgggcaagacaaagagccctggatcgttgaattgatagtttaatttctgctgttggctgttaataatttggattatttatgtttataaatgatacagatctgtttacaaggtttgtagatactttttttgttcctgttcatagatgggaagcttccttataactgatgcagagaaaaattagtccttcaaatactgctgtattttcaggaaaaaaaaaaaaaggggtgtttctattgaaactgtactaaatttttgcctacaatttaccttgttaaatattgtagataaattgctaatactaatagccaaatagataacactaatgctttgtttaaaaaaacgaaaaaaacaaaacaaaacaaaaaaacatgagcagtggtgttctaatgaagttatgacatctgtcctaattagtttcttaaatacatttactacttaatggttttgaagcaactgtttaatttttaaaatttttgaaaacttgctaataaccttttgttcagaatttagtagattgtttaatgcaggacatcaactacataatgaaagatgcttgaaatgcttttgttatttcaggcaaatcaaattaaatcagactatcaaactacaagagaaccttagtcttttttgtttttgtctaaacatgttagtttagtgatgtcttggtgaactgtgagtgaactgtattgatttttctaatctttagagaccttcacacagcatgagggctgttggcattttgaaaaaggttaataagtagaagcatacatgttttccttttgtttttgaaacttgtttgtaaacataaataaatatgcccttttattaaataaattcatggcaatgtttttttaaaagacatttcagcttctttactcagttctgcatatacagtgcatcagtctgttctctttgaccacaattggaatacatttcaagatggtaacagccccatgaagtaccgctttaann

SEQ ID NO: 21466 - DNA, 1489 bp, Homo sapiens
atcgggacgcgcgccattgtgttggtacccgggaattcggccattatggccggggtcagagtgtggtcaggcggctcggactgagcaggactttccttatcccagttgattgtgcagaatacactgcctgtcgcttgtcttctattcaccatggcttcttctgatatccaggtgaaagaactggagaagcgtgcctcaggccaggcttttgagctgattctcagccctcggtcaaaagaatctgttccagaattccccctttcccctccaaagaagaaggatctttccctggaggaaattcagaagaaattagaagctgcagaagaaagacgcaagtcccatgaagctgaggtcttgaagcagctggctgagaaacgagagcacgagaaagaagtgcttcagaaggcaatagaagagaacaacaacttcagtaaaatggcagaagagaaactgacccacaaaatggaagctaataaagagaaccgagaggcacaaatggctgccaaactggaacgtttgcgagagaaggataagcacattgaagaagtgcggaagaacaaagaatccaaagaccctgctgacgagactgaagctgactaatttgttctgagaactgactttctccccatccccttcctaaatatccaaagactgtactggccagtgtcattttattttttccctcctgacaaatattttagaagctaatgtaggactgtataggtagatccagatccagactgtaagatgttgttttaggggctaaaggggagaaactgaaagtgttttactctttttctaaagtgttggtctttctaatgtagctatttttcttgttgcatcttttctacttcagtacacttggtgtactgggttaatggctagtactgtattggctctgtgaaaacatatttgtgaaaagagtatgtagtggcttcttttgaactgttagatgctgaatatctgttcacttttcaatcccaattctgtcccaatcttaccagatgctactggacttgaatggttaataaaactgcacagtgctgttggtggcagtgacttcttttgagttaggttaataaatcaagccatagagcccctcctggttgatacttgttccagatggggcctttggggctggtagaaatacccaacgcacaaatgaccgcacgttctctgccccgtttcttgccccagtgtggtttgcattgtctccttccacaatgactgctttgtttggatgcctcagcccaggtcagctgttactttctttcagatgtttatttgcaaacaacatttttgttctgtgtcccttttaaaaggcagattaaaagcacaagcgtgtttctagagaacagttgagagagaatctcaagattctacttggtggttggcttgggctctacgttcacaggtgggggcatgttctcatcctttcctgcattaaaagttatgacacgggaatcagaatattataaaaatttatgta

SEQ ID NO: 21467 - DNA, 1082 bp, Homo sapiens
  misc_feature 1, 2, 3, 4, 5, 6, 7, 1082: n = A,T,C or G
nnnnnnncgagaagtcttctagaattaattaacgcgggggagtagccaggcaggtgcctcactggcttcttcagacgaggcttcctcaggtggatatatgactattaggggaaaagaggcttttgagacagcttattacctccttcccctttttgaactaagtacattgtctcagtcccagtatgaatttgtcccatttggggtatttttaaaataaaagatggctaacatggaatctggggcatagccttggcctttaattatggttgtaagcccaaataatggcagagaaacacagggctgtttttacaacagaaaactcaatataagttttatataagaatcctataaaatttgaaccagagctcctatttagttgttataatgtctcctaaagatcttaaatgcttctaaaagctaattattattccagagcaactttttccttttcccccttataaagtttttttttaaatccaaaatcttagatttctgtgccacagcaaaataaaatgatcaacaattaaagatctgtacctgccgggcggccgaggtactggagctgatgaacaaactgctgagtcctgtcgtcccccagatcagtgccccgcaatccaacaaggagaggctgaagaacatggcactctccattgccgaacggtatagggctcaaggaataagcgcaaataaatttgtggactccacgttctatcttcttttggacttgatcaccttttttgacgagtatcatagtggtcatattgatagagcttttgatatcattgagcgcttgaagctggtgcccctgaatcaggaaagtgtggaagagagagtggctgccttcagaaatttcagtgatgaagtaagttccttcttcctgagttgtggaattcctttttccccacttccaccaaaagctttttcttttcctgtacctaacagctttaagaattctagttacagtaactatccagactgagttttccagagtggttccctttcagataccttggcctggcttttctgtgagtgcatacatccccatcagattattgtctgaattcctaattgagaaaatacan

SEQ ID NO: 21468 - DNA, 1264 bp, Homo sapiens
  misc_feature 1, 2, 1263, 1264: n = A,T,C or G
nnactcaagctggcgacgaagggacctcgcgtcgccgcgccgggtctctagcagctgccgctgagccgccggacggacgctcgtcttcgcccgccatggccgagagcgactgggacacggtgacggtgctgcgcaagaagggccctacggccgcccaggccaaatccaagcaggctatcttagcggcacagagacgaggagaagatgtggagacttccaagaaatgggctgctggccagaacaaacaacattctattaccaagaacacggccaagctggaccgggagacagaggagctgcaccatgacagggtgaccctggaggtgggcaaggtgatccagcaaggtcggcagagcaaggggcttacgcagaaggacctggccacgaaaatcaatgagaagccacaggtgatcgcggactatgagagcggacgggccatacccaataaccaggtgcttggcaaaatcgagcgggccattggcctcaagctccggggaaaggacattggaaagcccatcgagaaggggcctagggcgaaatgaacacaaagcctcgaaatcagtgcgctccagctgatctcgttccgccggttccccttggccgccagttccgttctcctcacgggccgaacggaacaaggggtccagcttgcgggggaccctccccagcccattcctgctgtcaaacaaacaaaaccttgcaaagcgaacacacaaccaacacaacacgcgggacagcaccaaaaacgaataaacccgcagagggcccaacacactaacgagaacccagatcgcgggacacaaaggggccccacaaagaagaggcgacatacaagcacaccgcacaggccacacataaaaacgcgccgaagcgggaacaagcgccaccgctgagaacactcggcaaacagagaacactacactcaggaggaggcacacaaacatggggcaccacgaccgcacagacaggataaaacgccaaacgacaagaataaaacacacaagggcgcaacgggcgccacacagccggcaaaagcgccgcgaagcgaaaaacaccgacaccgcgagccacaaaccaacatcccagcgcgcgaccacgaataaagcgagagcgcacaaaagacagcccaccgcaccaccaagagcacgagcacacagaacgacagcaaggacagagacgcaccgcgagcgaccacgaccgcacacagccacgcaacagaccgaccgaccacacgacaccagcacagaacatcagaccgacacnn

SEQ ID NO: 21469 - DNA, 958 bp, Homo sapiens
  misc_feature 1, 2, 3, 4, 5, 6, 7, 8, 9, 10, 11, 126, 947, 948, 949, 950,951, 952, 953, 954, 955, 956, 957, 958: n = A,T,C or G
nnnnnnnnnnncccccactttgggcccagggtgggacccccaaaaaaccccccccaggggggggaaatttcccccagggggggggccccccaaagaatttttttttattattttttttcctttttncctttaggatcttgtttttatttgtaagcctggcttccaagaagtcatacctggaccagtaaaatgtagtagtcaaccaatgatcatttaaaagatttccttaaatgctttgcctatatgtcttctaccttttgccaaagaaatcttcatgagaagtcataccttcaaacttcaggaagcttacaaatagcactgattttcacttcctgcttacacagtgcctcaagatcagtcagaggtgacattctcctttcccaggtcatttccgggcatgtgtacagacttgcacattgtacagccttttaaatacccaggaatatgccagagctttccaaagttccctatagttggctagttctccagactttccttttaaattcctggccagattcttcctttgcctcaactgaaatcacagccttaggcaattgacattttgccaacagtttgctattgtttcagtaatgccctgggggtaagctttttcttcccccaactgagctgagttcagagtcaaatcaaatatccagccactctctctgaaaagagttttcccagggagctgcaagttgggacaaaatattaactgtgctctggggatagtgccttcaatggggctccagaagtggtcagctctctccattgtctgcaatactgccagcttttagctacaccactaagctggagagagagatgagaataaccccaagttaaaatatcgcagaccccactggtcttcccaagattcactagttttctcttggacagatgattttcaattcatactcctgcttaattgccagaattctaaaatggctgannnnnnnnnnnn

SEQ ID NO: 21470 - DNA, 1639 bp, Homo sapiens
  misc_feature 1, 2, 1637, 1638, 1639: n = A,T,C or G
nnactataggaagtcgacccacgcgtccgcccacgcgtccgcggacgcgtgggtgcgtcagaaggttctaacttttgtcatcactattaccagcattgtcatcgttatcgttatcttcgtcatcatcattaccaccgttatacctgatactgccataacaatcagaacattatgtacaggcacggcatatcttcccaaagatcttggccactatggactacgatctttatttttcttggagtggcggcaatcttgggagtaaccattggtcttcttgttcattttctggcagttgagaagacttactattatcaaggtgattttcatatttctggagtcacatacaatgataattgtgaaaacgcagcttcacaagccagcacaaatctaagcaaagatattgagactaagatgttaaatgcatttcaaaattccagtatatataaggaatatgtcaaatctgaggtcatcaaacttctgcctaatgccaatggttcaaatgtgcagttacagctgaaattcaagtttcctccagcagaaggagttagcatgaggactaaaatcaaggctaaattacatcagatgttgaaaaacaacatggcatcctggaatgcagttcctgcttccattaaactcatggaaatcagcaaggctgcttctgaaatgcttaccaacaactgttgtgggagacaagtagccaacagtatcataactggcaacaaaattgtgaatggaaaaagctccctggagggggcatggccatggcaggccagcatgcaatggaaaggccgtcactactgtggagcctctctgatcagcagcaggtggctattatctgcagctcactgctttgctaagaaaaataattcaaaagattggactgtcaactttggagttgtagtaaataaaccatatatgacacggaaagtccaaaacattatttttcatgaaaattatagcagtcctgggcttcatgatgatattgcccttgtgcagcttgctgaagaagtttcttttacagagtacattcgtaagatttgtcttcctgaagccaaaatgaagctctcagaaaatgacaatgttgtagttacaggttggggaacactttatatgaatggttcatttccagtgatacttcaagaagcctttttgaagattattgacaacaaaatttgcaatgcctcatatgcatactctggctttgtgactgattcaatgttatgtgctggatttatgtcaggagaagctgatgcatgtcagaatgattctggtggaccactagcttaccctgattccagaaatatctggcatcttgttggaatagtaagctggggtgatggatgtggtaaaaagaataagccaggtgtctatactcgagtgacttcttatcgcaattggattacatccaagactggactctgaaaaaaaaaaaaaaaaacaaacggaacattaaagaccactgtagggctatccttattctggtggctttcgggatcctttttattttgattgttgggtaaacctaaatcattttatttatatataaaaaatataaatgtctttatttaatattttattatatctaaaacactgtcacatgcatttcattaatctttttacccgggcggccgctcaannn

SEQ ID NO: 21471 - DNA, 2846 bp, Homo sapiens
  misc_feature 1, 2, 2845, 2846: n = A,T,C or G
nnctctgctccgctccttcgctcgcccgtctcctcgtggcccgcgctctcctctacccttcctcgcgtctcgccgctctctcgcctcttccgctctcgccctcagctgcctcgcctctctccttctcccctcgcttgccctccccgccccgctctccctgccgccgttccctctcctcctttcgctctcccgctccttcctccccgaccttctccccgcgccgtgctcgccggctcgtccgttcgtttctcgctgcctcgctcctcgtgtccttcgctctacctgcctcgtcctcctttcgctgttctcctagtgctcgcttccctctctctcggtcccgctttctcccgctttcgcggttggttgctctgtctgtcctctcgctgcgcggtctctcttgtccccgctcgctctgctcgccgtttgtcgtttgctcgtctgtcctgatctcgctgcagtcttcgcctctgcgtctttgtcgacgtcgtcaccggctcgttcgtctcctccttctttttcgtcctttgtgtctcttctctgtgttctcgttgcttgcttctctctctcgtcttcttctctccttcttctcgcttcttcgtctcttccctttgtctcgtccttctcttgtcttttgtagttcttgcttcttgccttctttctctgctgtttgctcttcctccttcttgtgcgtgcgtttgcttcgtctgccctttctgtgttcctgtccccctcttctcttccccgctctttgttctttgttgtttttgtttttttgctgtttattgttcttctgtgttgtgttatgtcgtctgtgtgtctcgtttttgtcttcttctgtgtgcttgtctcttttctgtgttttctcttttgctttgctgctctcttgtcgagaggagaagataaattcagaggacagtcagaaagagaaagaaaaaaggatcacttctactctgattcatcgtgcgcaaccggtcagaacctgggctttcccagcaagggccgtttcccttccgagcttgttacctactcatgagctttctctggttgccctgttatcaaccaaaggagcctgctgtgtggagaagatgaggctgcagatgaaaacccagagtctcaagagatgctggaggagcaactggtgaggatgttaacccgagaagtcatggacctaatcacggtttgctgtgtttcaaagaagggtgctgaccacagtagtgctcccccagcagatggagacgatgaagaaatgatggccacagaggtcaccccctcagctatggcagagcttacagacctgggcaaatgtctgatgaagcatgaggatgtttgtacagcgctattaattacagccttcaattccctggcctggaaagatactctgtcctgccagaggacaacctcacagctctgctggcctctcctcaaacaagtgctgtcagggacactgctcgcagatgcagttacgtggcttttcaccagtgtgctgaaaggcttacagatgcacgggcagcacgacgggtgcatggcttccctggtccatctggccttccagatatacgaggcactgcgccccaggtacctggagataagagctgtaatggagcaaatccctgaaatacagaaggactcactggaccagtttgactgcaagcttttaaacccctccctgcagaaagtggctgacaagcgccgaaaggaccaattcaaacgcctcattgctggttgcattgggaaacccttgggagagcagttccgaaaagaagttcacattaagaatcttccctcacttttcaaaaaaacaaagccaatgctggagacggaggtgctggacaatgatgggggtggcctggccaccatctttgaaccctgaatcaagcttttgggcatccttcctcggcctttcttgtcatctcttctttccctttgtagccgatctctaggcccttcttgcactgccacctcactttccaccactgtcagcctggaaagagatccaggtctggagctggagagaacaggccctgtgcaggaccagaagtaattatactaaagtatcaagaaagggagttagggcttaaactattctgtctagatgtcccagatagttcccattctacttggagatttggcttttccaagaaaagctagagcagagcagcccttctcccacaagccctcccacccccgtgcagccacatacctgtacagaatggtaactaagggtgctgtgcccaaccctgcgactagcaaggctcgcagcaagagcacagccctcaactacttgtgccagagtttctcttggaccactccaactcccactgagcccttttgctgctgggctggcaggaaactttccccactccctaaggggcatgtctgggttaggtgctaagtgctgaagagaacttggtcagttctctcaactttgctttgggcaagaatctggtcacctgatgggatccatggtacaggctactgctaaacttggcacagtatcaagtatagtacctccaaggaccagggctgggcagtctttagtgctaacatcccctttagagttcacacatcttgcccttccatgaatgacccctcagtctggctccccagcctcaaggtccactcaggcacaagagccacagtaccctagatagtgtcacatgacaccgttgtcatccaaggataatacagaccaactaggctacatctgtgagagcagttagcaaagccgctggtcttctcctaggaataagtcaaggggcttccacaatctcatgttaggcggatttcaaggtcagaaggttataactctcaaaggccatttccaaaagaatacatgccttcacann

SEQ ID NO: 21472 - DNA, 1020 bp, Homo sapiens
  misc_feature 1, 2, 3, 4, 5, 6, 7, 8, 9, 10, 1018, 1019, 1020: n = A,T,C or G
nnnnnnnnnngtgtgatgctgtgaaggaaaatggaaagggaatacaatttaatttgttgagctaattaaggcctaaaaagaaagtaatccttaaacttcataacacattaaaggtttttatttactgagctttaaatagttggactccacctctatattgacaaataatgtatagtgcttaatacgacattttttggtcatacactttgaggaaagtcagtcaaccataatcaccttgtttattcataacttttttaccaccttatggtatctcattagactatatcagactttaaagtactttttacaatcttctataaaattctgctttgtctacaacacagtcctgactctagcttaagcacaaaaggatttagtatgaaccaattcatacatttaatacttattaaactcctgacatgccaggcattgttgtaggtgctggtaataaagcagtttttaaaaagtccttattctcttgaagtttacattctagtggggtaaagggaatcaaaagatgttggtaagagaagtgagagaggaatgctatttttttatagcttggcctacgaaggcctctctaattttgggacattggagcaaagacctgagggtattaccatcattggctccaaactgaccaaactgtcctaatattacttaatataggtttcaggagatgtgttacagggcttatctagctattcgacagcatgccaatctcttcataaatcttttctccaaggatgctgggttctggaatgccagacctacaatctttggatgacattgcatacattcgaaggaccttagccttagatctgagcaggaggctttgaagtatttcatgaaccaaatgattgatgcacatcatgggggctggccaccaacttgagaaattgaaggctaactctggattccacactgaactgttaatactctcagcaggcaaagaccgatggctaggaattgcacatccatgacagctttagatttacagcaggaccagttactatannn

SEQ ID NO: 21473 - DNA, 285 bp, Homo sapiens
  misc_feature 284, 285: n = A,T,C or G
acttagttactccttgcccatagacgtgtttgacctagaaaaatttcttatacgcaacagatattcatgaaatatatattaaaataaagcttgaagggtgaattaaataaatatttacttggaagctacagtgggtgaattaaacaaatatttacttggaagctactttatagccactgggctggatttcatatacagagttcttgcccttgggagttttacaactgcttaacactttgtctatgctagaatacataaaaaaaaaaaaaaaaaaaaaagtaccnn

SEQ ID NO: 21474 - DNA, 310 bp, Homo sapiens
  misc_feature 302, 303, 304, 305, 306, 307, 308, 309, 310: n = A,T,C or G
accttgatggggttgggtcatacagttgtgtgcattcgtccaaacccattgaatattatacgtgaggtttatgcaatttatgatatgtaaggtttatctcaagggaaaaaagttttgaaaactgtgattttgatgcaggtgatctgagcaccacacttgaaaactactgggtttgagtaacttcaggaatagttcttccataaaagcataataattcagagattactaatgtaatcctttggcattcaaaaactaagggagccaaaatattaatggagccaggtgcagtggctccaagcacnnnnnnnnn

SEQ ID NO: 21475 - DNA, 1954 bp, Homo sapiens
  misc_feature 1, 2, 1954: n = A,T,C or G
nnatcaacgcagagtggccattacggcgggggctgcagacgtacttagaaaaggggtgcatactggatattcaggctaggagaagaacgcaaaaagcagtgacgtacattattctctgcatatatttactaggggaaattgtgcgtctccctattctgagtcttggcaggaatggactggtccaaccttatacagagagcagtagagcgcggcagtatagagagtacctcacgaaggggacgtgggaaagtgttagcggggaacgctgggaaactcccggcctccgccaccatcttgctttcctttaatccggcagtgaccgtgtgtcagaacaatcttgaatcatgaagctactaaccagagccggctctttctcgagattttattccctcaaagttgcccccaaagttaaagccacagctgcgcctgcaggagcaccgccacaacctcaggaccttgagtttaccaagttaccaaatggcttggtgattgcttctttggaaaactattctcctgtatcaagaattggtttgttcattaaagcaggcagtagatatgaggacttcagcaatttaggaaccacccatttgctgcgtcttacatccagtctgacgacaaaaggagcttcatctttcaagataacccgtggaattgaagcagttggtggcaaattaagtgtgaccgcaacaagggaaaacatggcttatactgtggaatgcctgcggggtgatgttgatattctaatggagttcctgctcaatgtcaccacagcaccagaatttcgtcgttgggaagtagctgaccttcagcctcagctaaagattgacaaagctgtggcctttcagaatccgcagactcatgtcattgaaaatttgcatgcagcagcttaccggaatgccttggctaatcccttgtattgtcctgactataggattggaaaagtgacatcagaggagttacattacttcgttcagaaccatttcacaagtgcaagaatggctttgattggacttggtgtgagtcatcctgttctaaagcaagttgctgaacagtttctcaacatgaggggtgggcttggtttatctggtgcaaaggccaactaccgtggaggtgaaatccgagaacagaatggagacagtcttgtccatgctgcttttgtagcagaaagtgctgtcgcgggaagtgcagaggcaaatgcatttagtgttcttcagcatgtcctcggtgctgggccacatgtcaagaggggcagcaacaccaccagccatctgcaccaggctgttgccaaggcaactcagcagccatttgatgtttctgcatttaatgccagttactcagattctggactctttgggatttatactatctcccaggccacagctgctggagatgttatcaaggctgcctataatcaagtaaaaacaatagctcaaggaaacctttccaacacagatgtccaagctgccaagaacaagctgaaagctggatacctaatgtcagtggagtcttctgagtgtttcctggaagaagtcgggtcccaggctctagttgctggttcttacatgccaccatccacagtccttcagcagattgattcagtggctaatgctgatatcataaatgcggcaaagaagtttgtttctggccagaagtcaatggcagcaagtggaaatttgggacatacaccttttgttgatgagttgtaatactgatgcacacattacaggagagagctgaacgttctctcagcccagagcagcaaacacatgaaagtcagaagtctctaatatatcatttgtcttttttccagtgaggtaaaataaggcataaatgcaggtaattattcccagctgacctaaagtcaataaaacattctgtttaagtgttaaacttacgcggtaatacccgttttggcggactcccttcgcacacaaatttttcccccacagctccn

SEQ ID NO: 21476 - DNA, 991 bp, Homo sapiens
  misc_feature 990, 991: n = A,T,C or G
gcgtccggagatttgaaacttagcctagctgtagactaaattccgtatttaacattaaagattttcttcagtcagttatgtatctttttggttaatatagagttataggtgtttttaagccactaagtgtcattactgttacatgcatcagttagccctacttggattagcaagattatgctttcataaactattctttctctaaattaatatatttatatatttagaagttgacattctaaatcaaattgtgtttttttccttttgcaggtggataattactgtaccttcctcatggaaaaagttttatttaaagtgttatttctcattgaatactatcaaaaaggaaaaaaaaaatgacctaaacttttgagatagatttggcttctagtaagtatttagttatatcacttgcatatctgggagaagaaataagagactatcatcagtacattcccatctactaaaaaaatttattttacacatgtcaagggattacttataacttccattttattactaatagcttgaacccttttaatgaagacctaactcctccaccagaaatttaagtttatgttcttactttgtttacttataaaatacatctcaggtatttcggatgtctttttttttttctaagcctatatgaaatgaaaaatatatgggcaaaataaatgtttaaaccttttacgttaaaattactttgaaagatgaaaagttagtgctgtttggtctacgttatactgaaattaaatgtttataattatattggggttatgtataacatcatggaatttatgcaaaaatatgagtagtacagattctcctctaattctgtaggacttgaataatgtgatatttcttataatggacccttgtgtttggaagaaatggccacgcttgaagaatctccttgaaatgataattgccaagggccatgctgcgaatctgcggcaaaattttagcccgttcaccaaaagtcccacnn

SEQ ID NO: 21477 - DNA, 258 bp, Homo sapiens
acccgaatctcagacgtccaggctctagaactgtaagaagataaatgtgtaacgtttaagccacccaatctatggtattttattatggcagctcgagtcgactaagacagattaagtgctaaaaccttctaaaagtctccagaacattacttgacacagaatagctaatgaatgtaacacagttcttttctataacctctgagatcctgagggttttcctgagctgctaaggaaaaagggagggctgggacagtaagt

SEQ ID NO: 21478 - DNA, 492 bp, Homo sapiens
  misc_feature 484, 485, 486, 487, 488, 489, 490, 491, 492: n = A,T,C or G
acattttttgaatcaatgaaatatagttgtgttaatatgtttggtaaaataaaacaatttattcatttattcagtttttccattctgctctcaaatccccttttccacacttgaacaaaactctattgtcaacatgaaagaacaagtcaaagagctataaactccccctctaaacttggccttggtgttctcactttttctgtgatagtatatgagaaaaatgaatctaatcttgccctgataggaagtttaatgaattttaaaagaaagcaatgttgcttttataaaacataaaatttattatttttcctgggtggggagacagtgtctctctgttgcccagactggagtgcaatggtgcaatttcagctcacggcgatatctgcctcccaggttcaagcgatccttccgcctcagcctcccgagccagctgggaccacaggcgtgcaccaccagacccagctttatatttatagtagagacnnnnnnnnn

SEQ ID NO: 21479 - DNA, 390 bp, Homo sapiens
  misc_feature 1, 2, 3, 4, 5, 6, 7, 361, 362, 363, 364, 365, 366, 367, 368,369, 370, 371, 372, 373, 374, 375, 376, 377, 378, 379, 380,381, 382, 383, 384, 385, 386, 387, 388, 389, 390: n = A,T,C or G
nnnnnnncaggtacttttaggcattgggttcactaaataccacatctgcctatttactcaatttatttcctttacttatggctttttgcattatccagttttcctgacagcttgtatagattattgcttgaatttctctaaaccaaccaagctttcatttaagtgtcaaaaattattcccccccccgcagtgttttaatttgcatttcagtccccgcctatgttttggaggcccggcggtcttcctaagcttaaaggcacagaatgtttttttttgtcattgtcctttctatgtcagcattcacagtaaaagaaagtcattttcatggtaatgatagtatttgaacaaataaaaacccgcnnnnnnnnnnnnnnnnnnnnnnnnnnnnnn

SEQ ID NO: 21480 - DNA, 260 bp, Homo sapiens
  misc_feature 257, 258, 259, 260: n = A,T,C or G
cccttcgagcggccgcccgggcaggtacgcggggaaacacttccccgcttggctctcattcttccacaagagagacctttctccggaccttgctactggtcagcagctctgcagaaaatgtcctcccttgtggctgcctcagctcctgttcttggcctgaagcccacagctttgatggcagcgcctcatcttcaacttttgtgctcccctttgcctaaaccctatggcctcctgtgcatctgtacctcggccgcgannnn

SEQ ID NO: 21481 - DNA, 1614 bp, Homo sapiens
  misc_feature 1404: n = A,T,C or G
gctcaactgctctgtccacggtagcttgctgtagagaagaaaggagcagtcgtagtccagcacggcaggcgtggtctgtagttgttcctccggctgcccattgctctcccactccacggcgatgttgctgggatagaagcctttgaccaggcaggtcaggctgacctggttcttggtcagctcatcccgggatgggggcagggtgtacacctgtggttctcggggctgccctttggctttggagatggttttctcgatgggggctgggagggctttgttggagaccttgcacttgtactccttgccattcagccagtcctggtgcaggacggtgaggacgctgaccacacggtacgtgctgttgtactgctcctcccgcggctttgtcttggcattatgcacctccacgccgtccacgtaccagttgaacttgacctcagggtcttcgtggctcacgtccaccaccacgcatgtgacctcaggggtccgggagatcatgagggtgtccttgggttttggggggaagaggaagactgacggtccccccaggagttcaggtgctgggcacggtgggcatgtgtgagttttgtcacaagatttgggctcaactttcttgtccaccttggtgttgctgggcttgtgattcacgttgcagatgtaggtctgggtgcccaagctgctggagggcacggtcaccacgctgctgagggagtagagtcctgaggactgtaggacagccgggaaggtgtgcacgccgctggtcagggcgcctgagttccacgacaccgtcaccggttcggggaagtagtccttgaccaggcagcccagggccgctgtgcccccagaggtgctcctggaggagggtgccagggggaagaccgatgggcccttggtggaggctgaggagacggtgaccagggttcccaggccccagatatcaaggagaatatcccactccaaatctgcccccgggcccagtcgcacagaaatatacggccgtgtcgtcagatctcaggctcctcagttccatataggctgtgctgatggatgtgtccctggtcatggtgaccctgccctggagcttctgtgcatagtttgtgttaccattgtaagcgctgatccatcccatccactcaagcccttgtccaggggcctgtcgcacccagtataaatagtagtcggtgaaggtgtatccagaagtcttgcaggagaccttcactgaggacccaggcttcttcacctcagccccagactgcaccaactgcacctgggagtgggctcctgttgctgctgccaccaagaagaggatcctccaggtccagtccatggtgaggaacggagctcccaggggattctcccaaggacagatgtggttgctgggtccccgcgtacctgcccgggcgnccgcccgggcaggtacaccaagtagcagtggtgtgaggccatgcttgttttttgattcgatatcagcaccgtataagagcagtgctttgccattatttatcttcattgtagatagcgtagtgtagagtggtatttccatactcatctggaatgtttggatcagtgccatgttccagcaacattaacgcacattcatcttcctggcattat

SEQ ID NO: 21482 - DNA, 885 bp, Homo sapiens
  misc_feature 885: n = A,T,C or G
ctgccgcggtaggagagtactgagaagcgtcggggagcgcaggcccagcagccatggcggtggaaggaggaatgaagtgtgtcaagtttttgctctacgttctcctgctggccttctgcgcctgtgcagtgggattgatcgccattggtgtagcggttcaggttgtcttgaagcaggccattacccatgagactactgctggctcgctgttgcctgtggtcatcattgcagtgggtgccttcctcttcctggtggcctttgtgggctgctgtggggcctgcaaagagaactactgtctcatgattacatttgccatcttcctgtctcttatcatgcttgtggaggtggctgtggcatttgctggctatgtgtttagagaccaggtgaagtcagagtttaataaaagcttccagcagcagatgcagaattaccttaaagacaacaaaacagccactattttggacaaattgcagaaagaaaataactgctgtggagcttctaactacacagactgggaaaacatccccggcatggccaaggacagagtccccgattcttgctgcatcaacataactgtgggctgtgggaatgatttcaaggaatccactatccatacccagggctgcgtggagactatagcaatatggctaaggaagaacatactgctggtggctgcagcggccctgggcattgcttttgtggaggtcttgggaattatcttctcctgctgtctggtgaagagtattcgaagtggctatgaagtaatgtaggggtggggggcgtttggtcttttcatggagtggattctccaggtttttcaattaaacggatcatcggttcagacctagcaacgggaacccaaaaagtacgggcggactgtagacn

SEQ ID NO: 21483 - DNA, 523 bp, Homo sapiens
  misc_feature 1, 521, 522, 523: n = A,T,C or G
nactgatctttactactttagtaacactagataataagcacttaaatgctgagtgtttgtcagttttaaaattagagaaagagacaaattgttttctgatctacttgcttaataaattattttttgccaactaatttttaggtttacttggtaaatttaaaggtagtttaaaatgtatatttaaataacttttctctataattgaagaaaataatttatcttgagagaattttactttaaacagtggctttagagtctatcttgtaaagtattctattttcaaataaagccgggtgcagtggctcatgcctgtaatcccagcactttgggaggccgaggcaggcagattacctgaggtcgggagtttgagaccagactgaccaacaaggagaaaccccatctctactaaaaatacaaaattagctgggtatggtggcgcatgctaccagctactcgggaggctgaggcaggagaatcgcttgaacccaagaggtggaagttgcggtgagccgagatggcannn

SEQ ID NO: 21484 - DNA, 584 bp, Homo sapiens
cttcactccagcctggcgacagagtggaactccgtctcaaaaaataaaataaaataaaataaaataaaataaaataaaataaaataaagcaaaaatataaaatgttaaaaaaaaacaaaaaaagggaaaaaggaagctgattgccttggtgagtcaacactgggtattttctgaccactatttgaaacaaaaaaggaaaccactgatattctatgcaaagatctgttcctggaaggcactctgcggagacaccaggagaacttttatcaatccttcattgatttgaagtaaaagtgctaaagcaatggttgtgggtggcaacccattagcagatcacaaaatcactgtagtgggtaactaaacaagaggaaacacaagacggcatcctgtgtaactggggttaagcattactctctgaaactcatggcatcagtttcctcttaggctcttccaacagagtataatcatgttcatttcagtttacaatccttgcagtcccatcgatttgtgagattatacccaggtcatccacagtggaggtctgaaaatgtcttagttgtactctaatttcactaaccggacgc

SEQ ID NO: 21485 - DNA, 5397 bp, Homo sapiens
tttttatttttttttgaaaagctagtagtctatatatctatatatctatctatataaactactagcttttgatagatattgtgtttacatagtccacaagttaaatgcaggtatccataagaagagcattaacaataaaaatacaatctgtgtgtagccaagtacagagacttaaaatggtaaaacagcaaaaaggatctcacaaaagtacaaatatacagtacaaattgatttatttaaaacagttacaaaaaagcacaacaaaatagagattatccttagaattattaatgctttgttaaagatcaggtaggattagagggtaagaaatggtattgggtggagggagcacctgactagttctaaggctttagatacaatgcagttgattacatattaattcagccattacatactggggatagtagatgggggatcagtaatttatctacagggaactcctacacagatccatccagacctccccagtgccatccttctccactccttaggaccctaaagccacctggatgacaacattcccatcctttctccaccccattccctatccgtatattcttccctcgcctaaggtgctgtgcaagctgagagcagtctgctctctgcagctggatcatatactgttttggctacagggatcctgtgtgactaagaaggttgtaggggacagccttattttaatactttaagttagccatgagtacagtcagtccctcccccaacacaatctagattctcttgaatgcaagtatcagtcaagtgagggatcaacccctgccttcagcaataccagcaatgcactaaccactcacagctcacaactacgtgcaaactccctgcccagggggtgggtgtaaaaccactgtgtcatcagctcacactctttctctgaagaacctcagtccccatgacagtcataaagacaaataaatgcttgcaagtttgacaacaggtaaaggcacatgggctgctgccacacacactgcaggcaagaacccaatttgaggccatcttcactgctgggcatttgcagtggaatggctttgggatcacaaaactttgagttcgcaatctaccggggggatctaggtttaactggagaactaataaagaaacctttagtgtgaaaagtgcatttatgactattgttcctgctggggaggcagcagggcaaactccaacacctctcctccttccgccccaggcactgtgcatagtctgcagctaaggagagagtgcagtcgactctagcatctctggggccagtgtcatcataggcccagaccaggcttctggtccaaagatggatcctagagttgaaagagcaactgacagctgcaaagacccagatgcttattttattattgcataatgtgggagaccttcccctaccccaggaaagctggagagtgaaggcttcccagcaaagggcaaacaggttcctgatcgacatccaacctaataaggttcagctcctcaactgtagtgtacacttttgcccatctggaaggtactatagcttcagtgtggtttagtaaacttagcctaggaggccaagatgtctccctaaaacttagtctctgtcctatttactttgtttataagactgtgacctaacttcccatggccaattcaatcgactaggttatctttactccaatggacccaggccttttcccagtcaatccatgtccaacccttcatctccagcgtgatcactcaactcttcaacatgcctgcttgctgcaggtttaaaccacaccaccatcctgtgcttccccctaaatcgcccatgatgcccgcaggtaaaaataaaactaaaccccacttgaggtgctatttcagccaaactttaaaccctctccgaactccagaatccacctaactggagctggacgaacttcactgggatgctggcatgggccctaatgtggttcccttcatttagtttttaaacaggatacaagataccacaaaggaaagaagttaatacaacagaagacaccactagtagaaacctgcttgtttctccctcacagatagtcagacatttggagccaaagggctcccaacagcactgaagccttatccctttggatttaccagcccaccagcagcatttcataccatccctatcgaacatgacttcgctataaaataacatggcctaacacaggtaagaatgaaccggacgcctacacttaatctacatggccaaagacatggaaggatagggagctgtagaggacagcaggcaggacagtgagcggacagcagcagtggcaaagcagcgcagggcaaagcccttggtgttatgaccaactgggaccaagaatatagaaggaccagcccagattggctgggggccctccctcaggtacaagtactcagctctgaactcccagagccccttccccccatgccacctcttcctcatgtatactaatcttgataggaatgattcaagacttggcttattatccatccatgactgggttcccctattcccaaattggtatacacatttttatacagcgccagacagtcagcagtcctcctttctattcctaagagctggaaatgtcctactgctgacaagggacaggctctggcccttgtcaactgctcattcttaaaaagttggcaacttcccactaaaatactcgctaaaaactgctctcatgtctcctgcaaactcaggaaattcctataaggaagaatggacacaccacaggttagtcatatttttcatgcctggaggaaaagactaaactagaggttaaaggcaagggggaggccacagctctgaccgagatttagagcacagagattcttttcctggggaccatattttatgacagatacctttgcagctcagcaaaatcaagtattaatatgttatatatgcatggaacgatattgtggtattacaggaactgctggtattgcttcaccagcaagagacagcaacagaaaggtcagggcccaacttgccagggtcctcaagaatttctctttccagaattcagtggaagttaccaggttggaaagtcacaagtagcccaagtggaaggtgatttgatctaaactaattggtctgtatctggttagacataggtttgccccataaggagaaagctcagcttgtgtccttgcagacactgcttgagcatctactgtgtacatgtcactaaattcagttgatgagccttcctatgaggaaggacgcttgtgagaaacccatgcaaacaatgaactctaggaatgagttgctcatgaaacagccagagatgaggccttctcccaaggccttctcatttgaggggattcctcaagactcgtccacccagggcccccatctgtagggatactagccagagaaagcagcattcagagaatcgggtgtacagaggaaggggataaagatatgatcccaaatgcagtacaaatgttggcgtctggttctgacacaaaccagatactgaagcactcacggtcaggtcagcaacctcctttgatggacccccatgagctgactgaccaggcaaacgtgctttcaaggaatgaaagagtggagggtagggcttgtagcaaacaagccagtttcagtcactctgttcccccaggagtacaacctttagcacctgaacactaagaatgactccattctcagaacttcccactccccccaggaggtaggtaagattatttatccccatttggcaggtggggaggaagtgaaagagccagaggtcacgagacttgccgaaagtccttgacagagcagagatcagacctcagaggtttggactcctgatgccaggccaggtctcggccaatccaagtataccttataaaggacacgccaggatcatagcctgggagaagtctaaccagagagctgcgtggacaataccctgagttgccttcaagagtctaaagacccccaaaaaacaaacaaaaaaacttacccacctgaaagctagtgggggagcctaattcccaatacccagtggaaccccacggtctgagctgatgctaaaagttgtgaagaaaatgtgggattaagacattggtggggggtagggggggtgccaatgcaaccaagattgaaaatactttttgcagaggaatataccaacacaaaatgacatctattcaggtactgaaatgttatcaagactatcctagaatcttagagctggtggtgggaggggatggcttggaggcaccagaatgctgggagaagcagtggaataagacaggaggggcatatgggacatgtgaaaatgccatgatgggcactgcccagccacgcattcgccctggcccagggcatagttcccttcttgtttcttcaccaagctgtttggcagtggaagtggaggggacatgattttgagattttaaaaatagagattatagctgaaggggaaaccagagagaccccctacccaccaaaaactagaggtcttggtcagagtggacaaaaccaactttgcagacaaggaaaggcagtgcagctacaaatgaggcccaggtcacgacaccatgcagcggtcagcgcagcaggagggtgggggtggcgcaggcacttgggcacaacacagacaaaggtggggggtcagtgcctaggaaaaagggtctactagttctaaagtcaccattaccagcaagattctgtgagatttcaaagtgggtctggcatgctgagttggaggagctttgttaggtgagctaccctttccagagggcctgcctagaacccagtcagcctggctatcaagtctttctcccaaagtcccctgactgagtccctggcaaggtagtacttcactctgaaccctgaaggggctctccctccgggcccccgtgctgctagaagccttgtaggcagaatggtgaggagagatggggaagggctatgaagcagaggatcaagcagagtcctgcagatgagagtgctcctcccccacacacccagccatagacatctggaacaaaatcaccctttaaagtgcgcatctctcacaagaagggttctgggtgggaaccctcttatttccaaccttggggcctcctgcccttctaccacaaaaaagaaaaaaaacttctgacagtttaactgctactataagctgtggatcatcatttttggctctttctttactccctccctctgccatctgctcccaaagcctggactttctcttgcaggagctagggatggggaggaaagaacagggaggccctgattttggaatgtttcttctcctgtgtgcacccccttccttcctatgcccaggcctgctgtcccccatcacaacacctctggggttgtctgcaaggatgcatgggtaatgaacaaagatctgc

SEQ ID NO: 21486 - DNA, 233 bp, Homo sapiens
accttgaatatactgatgaaaatcaacatcaatatattgttggctgtgcctgtgttaaacctaaatcttcaacataataagatatttgtgaaccaagacagcaactctggaaagtggcttctaactcggcgcattttcttagtggatgcagtaagtggacgagaaaatgacttaggaactcagccaagagtaattcgagttgctactcaaatatcactgagtgtccaccttgt

SEQ ID NO: 21487 - DNA, 344 bp, Homo sapiens
  misc_feature 1, 2: n = A,T,C or G
nnaggctatggtgaagttttgctggtcgacttggatgccaggtaggcatgtcttcaggttctagtcacggcagtggtaggccaaatattcctttccttgggacctagggcagtgtataatggcattagtgttggctagtccagagagctgattcttgaacctctaggtggcttgcctggttactggtagtgacagcagtaggccagttgggtgggcaggtttttgggctcctgggcatgaagtatgctatgggcaatatcagtagccgtggcaggacaaacctctggcttccgagttgtctatcccggtattgacagtgacagtgattggcttggcaggccagt

SEQ ID NO: 21488 - DNA, 1229 bp, Homo sapiens
  misc_feature 1, 2, 3, 4, 5, 6, 7, 8, 9, 10, 11, 12, 13, 1223, 1224, 1225,1226, 1227, 1228, 1229: n = A,T,C or G
nnnnnnnnnnnnnagaggcggttgagtggggggtgcggcgtgttggtcttgtgggtgggtgtgggttctcgtttggtgtgtgtgttggtgtgtggttgttttttttttggcactcatagttacagtttattacagtgaaaggatacagattaaaatcagcaatgaagaaaggcacataaggtaaggtccaagagaacttccaattatcctctcctggcagagtcttcaggataatgcttaattctcccagcaatgatgtgtggctacaatgatgtgtgcacagagtattaccaaccagagtagctcacccatgcctaggtgtccagggcttttactagggattgatcacattggcatgcttcactgcccacatggctaacttagtctcctcagcttgaccttgcaaggtcaagctgatactgcatggcccaaggcccacaggtaaacaaaaacactcttatcaggcaagatattctaatggcttagaggttatctcccaggagccaggcaggggcctattctttatttggaatgtccagggttcaaacatcccaagttcatcctgtatcacacaaaaggattaacttcaaaagtggtattcttggccaggtgtggtggctcacacctgtaatcccagcaccttgggaggctgaggtgggaggactgcttgagaccaggaattcgacaccagcctgggcaacctagtgagatcccatctctatcgtaatttttctaaaaagtggtattcttaagtcaagttactaccctgattgatgacagggagagagaccaggaaaccactgtgttgtaatcccttaggaaaccttacacctttacttgctttattatcaggtaatttccaggatgtaagccatacagccagaaggcagggtacaaaggagaggaggcagagatggtacactcaatacgaggtagcttctcatgattgtccactgaaaagaaaggaagctttcgtccctcaggtcagcgatgcgacccccagtttggctgagcccgacagcatcctgaccagtgcagcaaaagaggggtcccgtcaattacggaaaaaaaagcgagtcacaagaccgaggaatatcagagacacaacacgggtgacaaatagcacgagtacgacagctgtataagtgaaaacccaccagagtggagagacaagaacacatataaagaggcaacaccaagggcgacgttctgcgcgtccctgnnnnnnn

SEQ ID NO: 21489 - DNA, 491 bp, Homo sapiens
  misc_feature 1: n = A,T,C or G
ngagctgttaatggttctgatgctgcacccggtagaaatggctccctcactatggacttagccactttgagggctgaacagtagctcatccactctctggttttcctttggaattcagtaatgaactcattaaatcaccaacttgttgtgacaggaagtcattcagatgctgatgctattgccatggaaaccatccctctgcgaggagctctgtctgtctttgtcgaggagcactccagctccataattactgtcacccccaaataacacagagccatcacgactgtgagcaagtcccctagcccctgaccagcctcctcccatgactggtgactgtttaatgagctgtgcatcccccacaaaaacatgagtgcccctctgtgtggcctctaaccctctgcacaacccttctgggtggtcctcaccaggtctctgagctgggtgggaggccatcctggcgaccactgcccattccattcacccctcactgt

SEQ ID NO: 21490 - DNA, 2940 bp, Homo sapiens
  misc_feature 2885: n = A,T,C or G
acccacgcgtccggaaacttgacttaaggatgtcctgttgaggcccaaacgcagcactcttaagtctcgaagtgaggtagagctcacaagatcattttcgttccggaactcaaagcagatgtacagtggcatccctgtcattgctgccaatatggataccgtgggcacttttgaaatggctagggttctctgtaagttctccctgttcactgccatccataagcactacagcatccatcagtggcaagagtttgctagccagaatcctgactgtcttgagtgtctagctgccagctcaggctcaggctctgctgactttgagcagctggaacagatcctggaagctattccccaagtcaaatatatatgcctggatgtggctaacggctactctgaacattttgttgaatttgtaaaggatgtacggaagcgattcccccaacacaccatcatggcagggaatgtggtaacaggagagatggtagaagagctcatcctttctggggctgacatcatcaaagtgggaattgggccaggtaagctggttcattggggccactggctaccccccttcagtggaaaacacctgtggagcacgtcattcttacccttatcatgttcttcctaggctctgtgtgtactactcggaagaaaactggagtggggtatccacagctcagcgcagtgatggagtgtgcagatgctgctcatggcctcaaaggccacatcatttcagtaaggctcaagggcagggtagggtatgagcggggtttctgcagggtatggaggtggcagagatggattagaattcctgggttcttgttggctttgagttgggctgttgggacatcgctgagggcttgggaaatccatgttgtattcatagtgctccttactttgcaggatggaggttgcagctgtcctggggatgtggccaaggcttttggggcaggagctgacttcgtgatgctgggtggcatgctggctgggcacagtgagtcaggtggtgagctcatcgagagggatggcaagaagtacaggctcttctatggaatgagttctgaaatggccatgaagaagtatgctgggggcgtggctgagtacagagcctcagagggaaagacagtggaagttccttttaaaggagatgtggaacataccatccgagacatcctaggagggatccgctctacgtgtacgcggggtccaaggatttatttaatggggatgtgttcaaggcaagaccgaattcagaaggatatcgacgtcgtgatccagaagtccagagctgaggactgcctgtttgcagatttcaggtactcagactccacctttacttttacctatgttggcggccccagaagctttaaatcatctaggaacttcatataaaatttaattccagtttcaactagttgtggagcatttgatccaaaataaaatgaaagtcctctctgaagttgtagaggagactctcaagaatcagaacaacctgaagttctttaagctgtcagttgaaggactaggtaaaaaacaaatatcatttagtgtgatcattaatgcacatgagtcattattccatgtggttgctgtcgactggtcaggggcacttcaagccctaatctgtactttgtcctgtctctctacaccccgttctactttttcagcttgttgcctgtaatatgtgaatggaaataaaataatcaagcttgttagaattgtgttcataatgacacaaaagacctgagagaatgtaagaacatatagaacatccaaaataagacatatttttggttggtttaaaacctttttgtttgtttcattttcttctgtgcttaatgtgtagttactattatttcatatcctttgacttacaggtttgactacaatgcagtgtgaatatcgcacatgggaccatttgtcatactgtcagatggcaatacatagatggatagaattttgctgtttgatcaaagctgtgccatcggaaacttgttttcccaagtatgggtacattctcctcttttcctgagtggagaaacctagatctgagcaaaaagcatgaatcaatacaccttgggaggcagggtgtcaaatatttgatgccatttcctttgcttgtaaattgttcatttcatttgaatataaatataaaaggacttctaccaagaacatgaaactaacattttgccaagctaaattttaatgaatttatttggacttttttataatcacttaatattttcagttcatgtgctaatattaactctacttactggagagaaagaaatggtattcaatatgataactgccttgttactgcagaaatgtagaagtttggcattttaagtatcaaatattttaagtcaaaaaattaccagtgtcccacagcacagagagagaatatatgtttgcttgtgtccctttaatctttcccctgtaaaattaagcctaggggccttacactattttaaattttcaaaattaggtcatgtaaatgttgtgtcatatttccaattcataagtagtatacttatgaatactgaatagtgaacatagggtacatttatatcctactgattgcttagctgtggaccagaggtaaacagagaatgaatggtattttcacaggttagtaaactgtttttctatgatctcttatatacaagtgtgatgaacattttttcccccttcctgaactaatataggaacatatggtctaataagtgtgagttcatttggggagggcaggatagaatgcttgaaattaggactgacccaaaaaatgccttggtctcagtatttgtggattacgaggaggaagggctgaaaaggaaccttaaaagcattagaatggtagagtacagattagcagcaacactcanggctccatcatgaagagagtgagatgagttcccatggttaatgcagcaggggctc

SEQ ID NO: 21491 - DNA, 1679 bp, Homo sapiens
  misc_feature 1, 2, 3, 4, 5, 6, 7, 8, 9, 10, 11, 1675, 1676, 1677, 1678,1679: n = A,T,C or G
nnnnnnnnnnnctcagtaacttactatccagcagactggctttcctgagacttgaggttgtggcttatactggaatgagaccactgtacgtgtaggtggttcagatcctgcgtaatggcagcatgaggacttaaaaggtggttttcattttgaagatggctatgtagcttgtaaggtgtatcacagcagtacctctcatggcttttggttccagcagtgagggcattggtgagatcaatggtaaactgtgcaagctttctttttatcattaggaaatgtgaaacgttggacaaattttgagttttaacaaggacaaaaagttgaaagaaaaggcacagttaacaaaaaagggtggctagatttatcttgggtgatggaggaaatgagagaggaatgctcttgaaaggtggtctgtggatctgtctgaatagaaagagcacagtaagtatgcattgccggagaaaacgtccttgaagctgcttgtctcatgtgtatgatgtgctttttaaatcatgcccctcgttgcctgcctaatctgtgactccctaaaaactaactgggcccatgtagatggggctgcaaccagagctgaataacatgttaggctcacacatgcatcagcactgcacactggaatcattgctcttcctggactttgtagaaatcagtctcaagtgcttcaagagtctggctcctgctacttttatctgtcaggtagcacataaggtttgcagggtttatattttgtatagaatcacagttgtggagaaaaagtaataatttctcaatgaattttaaaaatgggcctattttctatccccgtggttcatctgatataattagtgttccctgtgaattccccccctctatgggaaggatgcctttactctttatcagtaataaattatgactgttttcatattgccttagggttatttccctgtgtaaaccattgtcttttgttttggttttctttagcattatgaagctttggtattgtacaaggtcagtagtaagatgctcactagtctcagggcttgtgtaatattctgggaggtcatttaaatgccagaaatggtcaagcaattatacacagtatttatgactctgttaagcataccgtttgtctgtcacattagtagattctgagattaaaaaaaatttttaaagagtgatcatttaaataatttctaaaagggtcttttcaagctctaacaaagtcactaacaaatgcattattttctacagaattagatgttagtagtacagtactgcatattcagggaaaaagtgtgaggaattgatttcaaaatagttcgttcttgtgtttgacctaagaatgattgtcgcatgaagtgtttgtttttacagtttagcatatataaacaaacatgataggattccttaagatgttaccacccagggggccacaagccagcctgctgtctcaggaagctgtagaaggagtgtttgtcaatttcttgtcactggtttgctgacttactgaggattaattgttgccttacaatgttactgaaataaactgtttaatataaaaaaaaaaaaaaagtcgacgcggccgcgaatttagtagtagtaggcggccgctctagaggatccaagcttacgtacgcgtgcatgcgacgtcatagctcttctatagtgtcacctaaannnnn

SEQ ID NO: 21492 - DNA, 201 bp, Homo sapiens
  misc_feature 157, 158, 201: n = A,T,C or G
acctatagaattatgaatatacagtaacctcattgagattaatcataaaatcaacactagattccaatattaactgtttatactgcattttgtttgttcccgcgcaccaactttgtcatgccttaagcaggttagttctttttactgtgtcttaaanntttttcctagtgagtaacatggtattttttaataatcccgcgn

SEQ ID NO: 21493 - DNA, 779 bp, Homo sapiens
  misc_feature 777, 778, 779: n = A,T,C or G
gcgccacccacgcgtccgacggagtttcaccatgttagccaggatggtctcgatctcctgacctcgtgatccccccgcctctgcctcccaaagtgctgagattacaggcttgagccaccgctcccggcccgcaagcaaattctttcagtaaattcttgcattaaacctatggtttgatggacatttgggtttagcggacttcattgacacagtaggtactgtgtgttgggatataaaagactaataaagaggttcctggtcatggagcttgcactggctattttccattgtacaggttacttaatctctgtcaagtgaagctaatagcatctaactccagggttgtgacctctaaagagttttgaaagattgaaaacattgtacctatgtcatatttaacaagccccttttgaagtcctatatttgtttagtagactgaaaatttgaattcactgttaagaggagacatggaactgtggaaagaatattcatttgagtgtttcaggaagtttggattttttttttaccaacatattatttgtaaaaggagggaaatcagctgcctcaggaggttcttaacatataggaatgtaattatcagattcaaagctgaacagtagtgcgttgccctgtaacctaagtcttggctgttagcaaagaaaagccagtgtctggggtattggttccaggaccttccactaataacaaaatcccaggatgttccatctcttatataaatgtatttgcatataacctatgcacatcctcctgtatacnnn

SEQ ID NO: 21494 - DNA, 1104 bp, Homo sapiens
  misc_feature 1, 2, 1103, 1104: n = A,T,C or G
nnaacccaccaggaggaacgaacaattccagatgcgccgccttaggagctgtaacactcaccgcgaagatctgcagcttcactcctgagccggcgagaccacgaaccccaccagaaggaagaaactccggacacgccgcctttaagaactataacactcacggcgagggtccacggcttcattcttgaagtcagtgaaaccaagaacccaccaattccggacacagcaggatcccacccacagaaccgccaggtgcacagctgcatatcctcaggggaaaactcccctcccctgccaccttactgataggcttcacttcccagagaactttcccaatcctgtgcaatgcctgagtggtacattgtattctatgagaatggcgcccccgcctccagagttgtgcaacaagacttccatgaatcaaagcccatcgctggctgcctcctctagccctgcatagcccaggtacatctgaaaggagtgagaagtgttttgagggctctccctgtctcttcctgcacctctctcttgtgatcccagaagctacaacctcagcccagattagcaggctgaggggtcaggaggctgtcactggagctgttgagctcatgaacacgccgaagttgctgcgctccagaaatgtggaagttggaatgaagagcccaccactgtgcaccaacatgaagcttgaccaagcaagcccagaaaagatggccaagagcctctgcttccttctgcttctgcacgcaatggtgagcttgccatccacactgaaggatctcggaatccaagttaactttttagtctctcctaagctttcactgtttccgaaggcaccccgggggaccgcgtaaatggctggggccgttcctcaaaaaacactactacactaacaaaaaaaggggcggggcataaaatatcccaggggcggccagatatacccccttttataaaggccatcaaggcgacaatacaaagcagcagagctaacaatagaagaagatcacgattgtgagaccttggtttggaacaaaccagcatatatatgttgctgttatcatactctattctaacatcgacacgatacactacagcaacagcann

SEQ ID NO: 21495 - DNA, 1881 bp, Homo sapiens
  misc_feature 1, 8, 32, 1881: n = A,T,C or G
naccgggnccccccctcggagatacttctagnattaattaacgcggggagtgaggctaatctttaggtttttcctatagaaaacattcttcctccatcagtagccctttatttgatattcagaagtggaaagctttttcattctccagtagaacttttaaaaattgttacagatacctagcctcttcacagatatcatgtactgtaaacagtcatgtgtcttaattttattttctctatttgagtgcataattatcctaataatcccaaagacactgacaactcaaggaacagcagtacagtactattagaagttaagtatgttgttgttatttcacatttcatttaattgtggataaatgttagacatctgttgaaataagctcatatggtggaaacgacaactatattatgaattattttcagaaatggatctttgaatagcagatcaggatttaaataataaaattatctatgaatcacttttatggtcatacatatatgatacaaatccagagttattggtgcagaaatggctacccgagagcttggtaaatttgccttggtttcttatgttaaatgtattgtgcttcccttctgtctctagaatgtggctcttcagaagacagacaatcgacatttaaatttttccaaacaatgaaaaactaaattaaaaacattgcttgatatttcatttaacaatggcaccttgcttaaggtttactgaataactgaaatgtcagcaatttaaaataaattcaattgtgtgataaaatatctcacctataatagaagaaaaggaaaatcatattatttggcaattttgcagcattgtggttgcctaacaggtatatccagcagatgagaaacagtatgaaaggattgtattaacatggtacgttttgccctaaggaaaacgatcttgcattctggattcttgcagcaaagtctcagatacttaatacgttttcttgttttatcatctgttctatgattcggcttcactttgggtggttattgaattatgtaacagagatttggttttcccaaaatgttatcacatttgaaactatgattgctttgtgttcagtccttttggaacacgtagcttccagcttaagggtagaggaaatatatacctaaaatcatcaatacatgaaagaaaaaggatggaaactatgtcctcagttttacttctaccaaaacatccctgtatgtgtgtgcatgtatgttggcgtgtgtgtgtgtgcatgcatattagtaaatgtgtgtttgcatgtgtgtgttggggagtgtatgtgatctgggtgtttgtttatctctgttattattcccctttagctttattttagtcaactctacattatgatgaatttcaaaatgaagctgtattaaaataattgtaatataacaattcaatctcacatgttactgcagatagttaacttttgctgcaatctattgtacatttgcaattttctgtgttagtaaacttagcagaatctggttatttatttttgtgtaggcttaatgttcactgaaagataagtcaattactgttagtaaaaaattaaggtactctcactgcagagatttaaggcctgggcctaatgtgctgtattatgaagccttgtgactgaaaaatatgtttacatatgttgtctatttttttaataaacttttatagctggtctatttgctcagtagctttgatcctctcttgattattgtgactatagtttgcaatggtttattttgtattcaataagaaaaattgtgttaataaagattattgtttaataagccaggtattaacctgctaaatatattaaactgaaaatcactaaatgagtcattcaattaaatacatcaaaaaaggtan

SEQ ID NO: 21496 - DNA, 1748 bp, Homo sapiens
  misc_feature 1720, 1721, 1722, 1723, 1724, 1725, 1726, 1727, 1728, 1729,1730, 1731, 1732, 1733, 1734, 1735, 1736, 1737, 1738, 1739,1740, 1741, 1742, 1743, 1744, 1745, 1746, 1747, 1748: n = A,T,C or G
acgcgggggggagtcggagacacaacaaagatggcggcggcgactgtgacggtgacgaagacggcggcggcggcgacggcatttaacaaggcggtgtggtttactccatgcagttgtcaggagacctctgtatggcttttcaattttagttgaaattctctctccatggccttttggagtcccttgctgtatctccgaagtaaatttcaattactctacatttcatcaatgttggagtggcaagaaaaaggaggaacagatttggggtgaaaagttttgttttctaggtctaacaaactgtaaatgttaaaaaagcaaagatgggtgaaaaaaaaccagagcctttggacttcgtgaaagattttcaggaatacctgactcagcagacccatcacgtgaacatgatttctggatcagttagtggggacaaagaagcagaggctcttcagggagctggaacagatggtgatcaaaatggacttgatcacccatctgttgaagtttccttggatgaaaactcaggaatgttagtagacgggtttgaaaggacctttgatgggaagcttaagtgtcggtactgcaactatgccagcaaaggaacagcccggcttattgaacacatcagaatccacacaggtgaaaaacctcatcgatgtcatctttgtccatttgcatctgcttatgagcgtcatctggaagcccatatgcgttctcatactggagaaaaaccatacaaatgtgaattatgttccttccgctgcagtgatcgaagtaacttgtcccatcatcgaaggcgcaagcataaaatggtaccaattaaaggtactaggtcttccttaagcagcaagaaaatgtggggggttttacagaagaaaacaagcaatctgggctatagcagaagagcactaatcaacttaagtccaccttccatggtggttcagaaaccagactaccttaacgattttacccacgaaatcccaaatatccagactgactcctatgaaagtatggcaaaaaccacaccaactggtggccttccaagggacccccaagaactcatggttgataaccctttgaatcagctctcgactctagcagggcagttgtccagtctgccacccgaaaaccaaaaccctgcatcccctgatgtagttccctgccctgatgaaaagcctttcatgattcagcagccctctacccaagcagtagtttctgccgtatcagcaagtattcctcagagctcctctcccacaagcccagaacctcggccatcccatagtcaaaggaactatagtccagtggcaggtccaagcagtgagccaagtgcccacacgagcactcccagcataggaaacagccagccaagcaccccagccccagccctgccggtccaggaccctcagcttctgcaccactgccagcactgtgatatgtactttgcagacaacatcctttacactattcatatgggatgtcatgggtatgaaaatccttttcagtgtaatatatgtggatgcaaatgtaaaaacaagtatgattttgcctgtcattttgcaagagggcaacataaccaacattgattgaaaatagtcatattttacttagttttgctgtttttgtggtttggttttttttgttttttgttttggtcatccctaataaagtgtctgctaattcaaaaaaaaaaaaaaaaaaaaaaaaaaaaaaaaaaaaaaaaaannnnnnnnnnnnnnnnnnnnnnnnnnnnn

SEQ ID NO: 21497 - DNA, 1148 bp, Homo sapiens
  misc_feature 1, 1148: n = A,T,C or G
nagctgtttcctgtgtgaaaaaggaccctgagagaacaagcacgacgggtcggaagtcttcatgctagtctcgtggggttccgcggtgtcgtcgctggctgtgcgcgtcatttccgggcgtcacgtaacggagtggccaacggcctgcagagcaacatgcccaagttttattgtgactactgcgatacatacctcacccatgactctccatctgtgagaaagacacactgcagtggaaggaaacacaaagagaatgtgaaagactattatcagaaatggatggaagagcaggctcagagcctgattgacaaaacaacggctgcatttcaacaaggaaagatacctcctactccattctctgctcctcctcctgcaggggcgatgataccacctccccccagccttccgggtcctcctcgccctggtatgatgccagcaccccatatggggggccctcccatgatgccaatgatgggccctcctcctcctgggatgatgccagtgggacctgctcctggaatgaggccgcccatgggaggccatatgccaatgatgcctgggcccccaatgatgagacctcctgcccgtcccatgatggtgcccactcggcccggaatgactcgaccagacagataaggatagaggggaggccttattgtatcggttttatattacctgttctgcttcaccaggagatcatgctgctgtgatactgagttttctaaacagcataaggaagacttgctcccctgtcctatgaaagagaatagttttggaggggagaagtgggacaaaaaagatgcagttttcctttgtattgggaaatgtgaaaataaaattgtcaactctttcagttacacaacaaatcccaacaaaacttgtggccgccaaaaatatccacgctgtggcgcgcccacaaaaggaacggcacccagctatcgggaacgcaaagcagggtggttccacaaagacaagagccggacaagcttaacaccgtgtgagccaggcgatagcaccaaccggtcaggaggacaacgcagcgtgagacatcgaggagagccccccagcggggcccatcgggccacacacgagataaccacggaaacaacacacggcaggggcacccaccgcgcgagaagggcgattan

SEQ ID NO: 21498 - DNA, 1552 bp, Homo sapiens
acttcaaacacgactaagcaagatctggggacagcagacagatggtatgaaacttgaatttgtagaagaaaacctccaaaagaggaaacagagtttttatcaatccattctcagatgaccaatttggaagacattgatgtcaatcataaaagcaagttatcttctctgcaagatcttgaaaaaactaaacagcttgaagaacaagaccacccaatagcataagcccagaaaaagaaagaagactccacaatgcaaattagtttcttgcaagagaaaattaaagtatatgaaatggaacaagataaaaaagtagaaaactcaaataaagaagaaatacaggaaaaggagacaatcattgaagaattaaacacaaaaataatagaagaagaaaagaaaactcttgagctaaaggataaattaacaactgctgataaattactaggagaattacaagaacagattgtgcaaaagaaccaagaaataaaaaacatgaaattagagctgactaattctaagcaaaaagaaagacagtcttctgaagaaataaaacagttaatggggacagtcgaagaacttcagaagagaaatcataaagacagccagttcgaaactgatatagtacaacgaatggaacaagaaacacaaagaaagttagaacaactccgggcagagctggatgagatgtatgggcagcagatagtgcaaatgaaacaagaattaataagacaacacatggcacagatggaggaaattaaaacacggcataagggagaaatggagaatgctttaaggtcatattcaaatattacagttaatgaagatcagataaagttaatgaatgtggcaataaatgaactgaatataaaattgcaagatactaactctcaaaaggaaaaactcaaggaagaactaggactaattttagaagaaaagtgtgctctacagagacagcttgaagaccttgttgaagaattgagcttttcaagggaacagattcagagagctagacagacaatagctgaacaagaaagtaaacttaatgaagcacataagtcccttagtacagtggaagatttgaaagctgagattgtttctgcatctgaatccagaaaggaactagaattaaaacatgaagcagaagttacaaattacaagataaaacttgaaatgttagaaaaagaaaagaatgctgtgttagacagaatggctgaatcacaagaagctgaattagagaggctgagaacacagcttctatttagtcacgaagaagagctttccaaactgaaggaagatttagaaattgaacatcgaataaatattgaaaaacttaaagataatttaggcattcactataaacagcagatagatggtttacagaatgaaatgagtcaaaagatagaaaccatgcagtttgaaaaggacaatttgataactaagcagaatcaattaattttggaaatttcaaagctaaaagatttacagcagtctcttgtaaattcaaagtcagaagaaatgactcttcaaatcaatgaacttcaaaaagaaattgaaa

SEQ ID NO: 21499 - DNA, 532 bp, Homo sapiens
  misc_feature 1, 2, 3, 4, 5, 6, 470, 518, 519, 520, 521, 522, 523, 524,525, 526, 527, 528, 529, 530, 531, 532: n = A,T,C or G
nnnnnnggacacccctgcctaggggaacttgttttgtctacttggttagttgtccttattgcattttacctgcagtccaaaggttattttagatgatagaactgcaagaaccccaaacccaaagaaagaatcgttgaagtggttgggagaggaggtcatttctgagcatcttcctgacttgaacaccttctacagcaaactcttgcaagtccagtttcatccctgtaaggcaaatgtcttttcacgcagaaagtgccatatagacgagataaaggcagctaaaacgagggcagtagagagcacttacccgaccccaaggtgccggccagagatgccctgaggatggtggttaaggaaacaggagcaggaaatgtacacacagattcctgtccctttgccaacttactccttccccatcaaaggaaaaacactttgcacacagttaacttaccagctccttcttttcaaanttgtattttctactggggggattgttttcttcaggaattgaccttccnnnnnnnnnnnnnnn

SEQ ID NO: 21500 - DNA, 2674 bp, Homo sapiens
ggctagtgaaaggaaagtacctctgaaagaaaccattttagcaaattatggttatatgttttaatttaatctacagaatgttttatagtaaaattctagcaccactagaataatcacatagcatgtacaatatatttatgctggctgaaaagacagaatctgggaataataaaattgcaaccagtttggtaatgcaaacagcagaatagaatgaaatctcagtaatgaattaaagcaacaaaaagatattgattggcaaaaagcaagatataagagattcatttgcttaacatttctacataatatttatggtctggtcagtattggtctggtcagtattgcctggctgacgtgaaatgtaaactagtaggcgtgttattgatctgctaaaactaaccctctttttaagaggagatttaaggaagacgtcaatcaaaatgtcaaatatgtgtgtcagaatataaataatttttcacattgtattgttgctatataaaaaaaataatagaattggttgggtttctgaggtgaaatccagagtaagagtactagacagttcaacaagccacatctaatggcacagatagaggatgtagctattttatacctttcataacatttgagagtaagatatccttcaggatgtgaagtgattattaagtactcatacctgaaatctgttgtcaagattagaactggggttcatgttaaaaaccttccatattacctgagggtacctgtggggaacagttccttcccctgtgtggtagtattttgttggaagagaatgtttatacaaaaaatgaaattcttccaacagcagagaaactctaaaaagtttgatagtacctatcaaagtgctgtacttctgtgatagagaacatctgatgtaccaatttagatctatttctttatactttttctaatcaattgcttaatagtactttggatgattatcacctttgccacttaaaatatataaatatcctttttacttcatgaggaaggaagaattttttgataattactgagttcagccttttgtgatgacttatattttggacttacattttaactttaaagaatgtcagatcccttctttgtcttactagttaaatcctcacctaatctcttgggtatgaatataaatgtgtgtcatcgttatattgttcagctagatgagcaagtatcttagggtagtaggtagcctggtggttttagaagtgtttggtgatttttatggagagagttttcctaagtggtggtttataggtggtatcagatattattagggcagctttttggggagtaatctcaggtctcccagagcagcagcatttttctcattgatataagtaagattcttaggagcttttcttatcacacaagatgcctgaatcgaatgtgagaattgaaggcatttcttctgcataaacaaagaattctacctgctggacagaaacctggaaagttctttggaattcgctgaattacagtttagtatgtcctgattacagagtgacaatatttatcaagcctttgttatattggattatcttctctcttaaaatacaactgtattataattgaaatgacagcccaaaattggatggtttaccaaaaccaatgaaagggatttcacacatcaatttttatttctgttttgaagagcacatgctatataataattgctagtagcaactgcagtaaaacaggtgataagttattttctctgaaaagatccagtcctagagcaggattcttcgatcattcatggcagagtgaaaaaggtttgtatggttcttgtccaaataactcagttcttaaaattcttaaaatgatcgtaaaccattatcctttaaaggtttatttgaagatgctgttaaagtacagaattttgtgtacaggtagatttttccgtccctcattaatagtgccttcttaattaatacagactggtgttagctataacaaaactccagtaaggccaaagaatcccaagttctttgtggaaaaaaaaaaaaaatcttttagggtcagattttcccttctaatatcattgaagatgatgttgcattgatttattcataaagtattttaactataggaactctagaagataatggttaggcaagtgattttttttttaaatatggttggcgtaagttgtattttgaaattcacttattttaaaatcgaagaggattgtaatcatggaaatagaatgtttgtatctacctgcccacattttcttaaaaggatatttcattatacagataattgaagaccaaagctagtgggctggaacggtagggtcggcggatcaaatggtgataggcggggactgtggaatgtttgggcaagctggaaatgctagccaatcaggctcaaaagtcctgctaacttgggataacttgatgaacctggtgatcggggtatacctaatcatggtgcttcggaaaggcaatacaactcttagagaaacctggctcgggcatatggccggccaactcctaaacttaagaaaacttaaagccgatgaaaaacagaacagaaaatacacaatatattcacaaagaaacaacgaggcgcagaatcaccagaggaccccacggccaacattcgacaggtcccagggcgactaacacaacgggcaacacagggaaaagaggca

SEQ ID NO: 21501 - DNA, 1351 bp, Homo sapiens
  misc_feature 1, 2, 1350, 1351: n = A,T,C or G
nnacaatgagagcctttcccctctgactgagctcacattatcgtcctactacctgtgtcatgaagcgcgcttaacacttcatatagcgtgccagtgccatatatagggtgatcgtacctttgacgtgaccctctctaggccattagcactacactggacgagacgtccttctgcatgaaactggaaaacaatgatggtgtccttaatcgcctaaagttatcatgtataacccggtaatcccgtttgttggcaccattcctgatcagctggatcctggaactttgattgtgatacgtgggcatgttcctagtgacgcagacagattccaggtggatctgcagaatggcagcagcatgaaacctcgagccgatgtggcctttcatttcaatcctcgtttcaaaagggcggctgcattgtttgcaatactttggataaatgaaaaatggggacgggaagagatcacctatgacacgcctttcaaaagagaaaagtcttttgagatcgtgattatggtgctgaaggacaaattccaggtggctgtaaatggaaaacatactctgctctatggccacaggatcggccctagagaaaatagacactctgggcatttatggcaaagtgaatattcactcaattggttttagcttcagctcggacttacaaagtacccaagcatctagtctggaactgacagagataagtagagaaaatgttccaaagtctggcacgccccagcttcctagtaatagaggaggagacatttctaaaatcgcacccagaactgtctacaccaagagcaaagattcgactgtcaatcacactttgacttgcaccaaaataccacctatgaactatgtgtcaaagaggctgccattcgctgcaaggttgaacacccccatgggccctggacgaactgtcgtcgttaaaggagaagtgaatgcaaatgccaaaagctttaatgttgacctactagcaggaaaatcaaaggatattgctctacacttgaacccacgcctgaatattaaagcatttgtaagaaattcttttcttcaggagtcctggggagaacgaagagagaaatattactcctttcccatttatcctgggatgtcttgcatgcatactcatggtgtgtcaacattcggttgcgtaattgcgtaccgcctggagtcacacgattatagacaggttgcagctgaattgggcaccttcggataggaggtctccaccgggtccaccactcagtctggcgcctcgacaaaaacacaaaaagggcaacttggcaatacacattaagctaacatacggccagactctactgtgcatcacattcttttctaactacttcann

SEQ ID NO: 21502 - DNA, 757 bp, Homo sapiens
  misc_feature 629, 670, 722, 726, 750, 753, 756, 757: n = A,T,C or G
tacatgaatgtgcagatgatacacagattgtgcacccagcttcccatcgttgatcactgaaattgagcttggggttagggagtcaggatcatggcagaggtcgaagaatgaagatcatattgagaagtaggaatgagaattcataggtgagggaccaagggccaaaagtcgctcaccaagtcggtatccatctcccaggcccccagcctttgctgtctgcttggccacaaggagtaggtgtcctagaagctatagagagagcggagggacataggtggcttcattcatagggagcaagacctctagctgggtccaggggctcctcccagccaaaccctggccctgttcttcccacctgctggtcttcttcttcagcctggctaatccgaggaatgggcttcttaggaatgaccaggaagtgcacaggagcctgaggggccacatcacggaacacaagacactgctggtcctcatagagaatgtcagctgggaggctcttgtccaggatccgggagaagatggttggggctgctcccccaggagttgcctgctgggccttggccacttcattcccatcagtcacacctgcagctcctcggacctgccccccgcgcacccccgtggccgcncacggcttctcgccgcgcgcaacccagcatgccatgcaacncacgtgccgccatcttccctgagccgcggaacctctcacccgggtcagcacntcgntccgcggccggccgtgggtggggnctnccnn

SEQ ID NO: 21503 - DNA, 1791 bp, Homo sapiens
  misc_feature 1, 2, 1790, 1791: n = A,T,C or G
nnaccagtctttaaaggagtcactgaaagagaatcctgcaatgacccctgcaaggagacagtgccatccatggaaaccggagacctctgtgccgacaccgcccccactcccaagagtgagctgtgccaggaaccagagcccactagtgacacctgtggcttcactcgcttcccaggggctccgttcacccactacatgagctacacggatgataactgcactgacaacttcactcctaaccaagtggcccgaatgcattgctatttggacctagtctatcagcagtggactgaaagcagaaagcccacccccatccccattccacctatggtcatcggacagaccaacaagtccctcactatccactggctgcctcctattagtggagttgtatatgacagggcctcaggcagcttgtgtggcgcttgcactgaagatgggacctttcgtcagtatgtgcacacagcttcctcccggcgggtgtgtgactcctcaggttattggaccccagaggaggctgtggggcctcctgatgtggatcagccctgcgagccaagcttacaggcctggagccctgaggtccacctgtaccacatgaacatgacggtcccctgccccacagaaggctgtagcttggagctgctcttccaacacccggtccaagccgacaccctcaccctgtgggtcacttccttcttcatggagtcctcgcaggtcctctttgacacagagatcttgctggaaaacaaggagtcagtgcacctgggccccttagacactttctgtgacatcccactcaccatcaaactgcacgtggatgggaaggtgtcgggggtgaaagtctacacctttgatgagaggatagagattgatgcagcactcctgacttctcagccccacagtcccttgtgctctggctgcaggcctgtgaggtaccaggttctccgcgatcccccatttgccagtggtttgcccgtggtggtgacacattctcacaggaagttcacggacgtggaggtcacacctggacagatgtatcagtaccaagttctagctgaagctggaggagaactgggagaagcttcgcctcctctgaaccacattcatggagctccttattgtggagatgggaaggtgtcagagagactgggagaagagtgtgatgatggagaccttgtgagcggagatggctgctccaaggtgtgtgagctggaggaaggtttcaactgtgtaggagagccaagcctttgctacatgtatgagggagatggcatatgtgaaccttttgagagaaaaaccagcattgtagactgtggcatctacactcccaaaggatacttggatcaatgggctacccgggcttactcctctcatgaagacaagaagaagtgtcctgtttccttggtaactggagaacctcattccctaatttgcacatcataccatccagatttacccaaccaccgtcccctaactggctggtttccctgtgttgccagtgaaaatgaaactcaggatgacaggagtgaacagccagaaggtagcctgaagaaagaggatgaggtttggctcaaagtgtgtttcaatagaccaggagaggccagagcaatttttatttttttgacaactgatgggctagttgccggagagcatcagcaggcgacagtgactctctacctgaccgatgtgcgtggaagcaaccactctcttggaacctatggactgtgatgccaggataatgcactgattatgaatgtgacccatgaccagaatgtgcttttgcaccatann

SEQ ID NO: 21504 - DNA, 893 bp, Homo sapiens
  misc_feature 1, 2, 3, 4, 5, 6, 7, 8, 892, 893: n = A,T,C or G
nnnnnnnncagtaaattcgcatcagtacattacaaccactcaagttttggcaaatgtacccatcatgtttttgatagcaaaatgatctagttcaggatcacaagctgcctttagttgtcatgtctcttcttcctcaatctgaaacagtttatcaggcctcccttgacattcataaccttaacacttttgaagattacaagactgttattttaaaatacgtcccctccatttgggatttggtcctaatgtttcccccgtgattagagccagctgtaccacctttggccaggactatctcagtagccaacttcttactgtaccctatgaagtggcccatggtttctgtgtgtcccattactaatgatgtttacttgggtcacttgatccaaggtggagactgtcaagcttctccactgtaaatgtactcattttccttttgtaattaataagtcctttttgcagagttctttgaaattatgtaaatactttgtcatcaaactatcaattcattaggtaataatctgtatcacaggaaatcatggtttcctattttgtatattaggttataatctgttactatcattatttctttgagaccagtgtgggcccttcaatctggctctgacttctgggtttttaaaagctttttgggtgattctaatgtgcagccatgcttaagaaccacttctctaggtagaccaaagcacctatattcaaaggatattcacaggattgcaggcaacatgcagcagcctcagggaactgcaaggttttcagtgtggctggtggacaggatggagaaggagatgaagacagggagagattcagtctttagattcatctgagcccagacagcctgatcatcattatctccgatgacagcatcctatcnn

SEQ ID NO: 21505 - DNA, 1666 bp, Homo sapiens
  misc_feature 1665, 1666: n = A,T,C or G
gtccgcaggcatgagccaccgcgcctggcccaacatcagttttgaaagtagggctacagtgatttatatgtattgtgggcacttattaatgtaacgataataaaacatgaatcgtataaagtcctttgagggaatctcctaatggctaggctctctgtcgtaagtcatattccagccccaggcttctgagctcttataacatacaactgagcattcttaagctcacaacctatttccagaaaagagacccacatctttctatgttttatactacctttgtttttacaccatatagtttttttctattagtttaaggtacctagtgttacaggtctagaaagtgcagagccatccctacctagaagagaatagatgggaagagaactgaaagaaagaattcctcaagcactgaagtcaggaaaatccccgtaggcactgtattagttgttccatttatcccagcactccacttgtggatgaaggagttgtatagaaaggagatgagaaaatggcaggagtggaagcagccaagaagagatcgatgactgaagatctccttcaccttcaggactgtctcaaggggttatttcacctctactcatgaggatggccagtttttctgtcttttatctttagacccatatataatcagttcagagcacaaatcaaaataaactggcctaaataactgaattctaggaagcaaagctacatcttttttcatatgccaaagcttctgtttcctcatgttgttcctactttttaaataataaatggctctcagcatcttaggaactagatgggtcccatctgggtagaacctgctataatttttagaatcactcttgtaattcttacctcacttaaaatattaggaaacacagtaatagaaaagacagggagaactcgtctgcaggttttggcagtgaaatttgtcttccagtgaattgctattattttcaaattgcctatagtcaaaaagcttttccattgatggagacttactttcaaatgagcttgtgttgaattcagcactctagattctctctgacattttcctgtcttttgggaaaaaaaagcagatattccaaaaatggcagaaatctaatttttgtaaactttttcatctataggattgagccaaaaaacatacatactattttaaagaaaggtaccatctaattcttttattaaagatagctacttctgaaatgtcttaacagagtttcaagattgcaaagtagtattgcatagctggttttcttacatgtgatgatggaggagagaggaagacccagacttaggcatgtagtgaaatatgtacagtttctggcatcagtgtactatttatagtctatagcatacattacttgcaaatgggaaaagtattttataattatttttgtacctcaaaataattattatattctactgtattatattcaaattaaagtttattattggatcttagatgatatctgtgaggtgtgatgagggtgggacctaagtatgtcatgtgctttaaccttttttctagcctaagatgaagggagaagttggggccatagtatctttgaagggagttatttccaaaagctttactaaaggggggtcggggacacaaagggggttggggataaagccaaattgagggggggtccaaann

SEQ ID NO: 21506 - DNA, 1010 bp, Homo sapiens
  misc_feature 1, 2, 1010: n = A,T,C or G
nnagcaggagggattgatcgagctcagtcaatcaaggctgattgagggaggttagggcttcagtaggccgtgatcatgctatcacactccatcctgagcaacagtgagaccccgtctcaacaaaaagaaaaagaaaaatgtgttaagccatgagtcttataacacagcattagtgtctaaggagatatgtgttgtgggagtagtagataagattacagtatttaatcttcatttctttatttagatactatggataattgggatgagaaaaagctggaagaagtagtgaacaagaagcacggtgaggcggaaaagaaaaaaccaaaaactcaaatagtatgtccttttcttgaattgagttgctgtgatatttatcattagggagaattatgtggcaaggtatttgctgctattttctattagattattctgtaagttactggaaaatttgatttcatcaagataaggtacacgaagctttatttttggaatttacaagttagattttatagattcttgttcagaaatagctgaacaagaataaaactatgttaccgaagtcctttaaatgccattttctgaggtgaacgttctcaaatatggataaacaaaattacatatccagacaaaaatccctatttttttgcacagagtggaaggaggcctgttaaactaacccacttaataatgtatttagttttaatagggatagatttttaaattttaaggtttaaaatatttctacatatgaattccaaaatgaatttttggtaggtagtggctctaattccaggaaatgtacctttaaaaattggttcttgatgtctcaaactttgcatttatgtctatatttatagtgaagttacagtaaaaagtcttgctgtgctagaataattctaaatactacattcatacacatctgttatgtttgtttttgggggcggatactgtttgttaattttctcttacttgcaaagcttaatacttgaggcttaaatacaattgtatcn

SEQ ID NO: 21507 - DNA, 844 bp, Homo sapiens
  misc_feature 1, 2, 3, 4, 5, 496, 844: n = A,T,C or G
nnnnnagatcacgttgagacagcctgggcactatagtgagacctcacctctaaaaaagttttttataaatttacttgtctaaagtggggaaagggaaattattctgttttcttattcttgcttcaagactatgacagatttgaaagagaattctaaagcagatttagagaacctgcttctcttcttatctcctaatccctaaattgtaatttagctcttatctgtattgttgttttgttttggtaaagggatgatttttacattgagttttaaagtagaataagaaaagcttctaaaaacttgcattgtgctagggatctgccctatatctttgcctctggtgtttcgttgttgttgttattgtttgtttgtttccaaagaagttggagttaaggacacaatatatttgtacccctagactgaatgggtgagtattccatatgaggatctgggtaatcctctttgcaacccacatttggtcttcagagacactggncattttgaagaaacatatgatatagctgtttggaaataaattcatctatgttactttttttttcttttttttttttttatgagcgaggagaatcttaatggacagaaaactcatggggggtgggaggggccaaggggcccgggaaaagagtttccagtaatcagaagaatggtgatcggggtaatggtaatcttatggcacattccatgggtcttggccaagcccaagaagccaggtggtggtccatgggctaccgaactctggatcagatttacccagctttcctatgtcattcgggacttcatggacaactttgtaacacctggagtcgcgttgcagccctgtgcn

SEQ ID NO: 21508 - DNA, 2843 bp, Homo sapiens
  misc_feature 1, 2, 3, 4, 5, 6, 7, 8, 9, 2839, 2840, 2841, 2842, 2843: n = A,T,C or G
nnnnnnnnnatccgttatcttaccaaggccggcaagaacccccttttttaaaagcgcttttttccctaaaagggtactctccttttcgcaagatgtctcgcgtgtaaacctactggattcaattgatcatcaggatgtttcagaaaaacacaggcggaaaaataagcaagaatcccaaatacagaactttacaagctgtgaaacttggtctcttgcaatcatgttactgctcaaattagagacaatcttattgctgtctattggagcagcatcgtggcacatcagcaggcaatgatgatgttgagaacagcagcaaaaataaacaatcgtatgctcatgaagaacccaagcctacaaaatggatacctttcagaaaagtatatacttaaaagacccaagacgtcaggataataaagctctgtatttataatcttttatatgtcctattgtggctattatgcttaagtaaaatagctaaagaaaaaaaagaaaaaaaaaacagaaaagatgacaatatcataaaaatgtagctgtctattttggcagctatattgcagaatttcttgactatcttttaatcagctgggaaaaagtcaataactgtatgcaaatgaataaactgtccatatcaaaatacaaaagtactatcaataatcacctctgactttcagatttaaattcagtgcaattgacaaatgcatcactaaaggaaaatgcagcttaaaagatactcaaaacatttgtgtctattcctgggagcacattttaaaattattgcacagatttttttaatttttatttattttttttaaacaataacagaggtcaaccacagatgtggacctccagcaataaaagcaggaattcaagtgccagatactcagcatattaggtttcctacgtaagtcacagggtaatatgttctaaatatctctaatgtgatccaaaaccctaaaaagagctggcacaaaaccatcgtgaatgactgcctctcttgatgtaaatttttaaaaatattattacagtatcatagtccccactaacaacaactggggtacatataacaatgtattgtgaaattaagtgtatttattctctttaccaatagcaaatgctaccctaccttagtaaaaccaagacttgcttcaatcaatgctgttttgtaaaaatagcaaagcaacgaatgctgaaatcaatcaaagctgcattacttgggttaaatcagtttctacttagaacacaggttaaaattttagtactaaaaggcctcaaaataattagtgacagaaatagtgttattaatttgctaagctcaacaataagcaattccttaattaaaatcttcgagatataaatttgatgactattctcttcagaaatgacatacctggattatgttaatcatgacaagccttattagtcacacatataaacatggcctcatgcaatcatttgtctgtatatgttactctaagttgcatgagcacaaggtttaatatctatatctttaagaaaatacttgatattataaacagagtaaaagacatgatatagtagtgattactaaaaaaaaaaaaattagcagcttaaatctatctatatttgaaaaaacgtagtcacaagtaccacaaatgcagaatcagagcagcaggaagaaggttagtgcaattatactttcattaaaaaaaattctgaatcactgctatttaaaaacaccttgaagcaagtcttttgtttgagattgttttttaaactaaggtagcaaacattttgccatgtaatggcagtgttatatgccgttatcttgctttgtataaagaaaacaacatgagagatttttaatactggagtttggttacattacatatttaagcttctacacagaatggatggacacttcgagaagctaatccttatccagaaacattttaatctcttaaaaaacaaagcaaaacaaacaaacaacaaaaaacccaaaactacgttgctccttttcacaatagtgcacatttttaccataatttagttatggctacaaaacatcagaagattttttttaatgtatcttctctatggtaattaaaaaaaaagttgtgcccttctagtctttaattggcagaaatatgtcccaaaaaagaaactattgcatttaagccacatcaccaaaaaacaaaaaagaaaaaaaaaaaaaaaaagcaaaacaaaaaaacaaaaccaacagagcataatacccttttactgatgtgtcttacagattgacatgaccaaagtcataggttttcatttaatttccaattcccccttccacaacatgcaccaactgaatatatgctctgggagccataaaatgtaccaaacatctacctcttcaaaagaatgcattaaaatattttaaagaattttttgtttaaaaggtgaaaaaaatataaacaagaaactgattcactcccttacttcatgcatccataatctaaaccaaaaacgaaattttaaagcaagaacaaactactgctgcaagtttttgtaagtccattttctctgtacatacaaactgctcactactgaagggaaaaaaagaatataatccatggtgtctgctgattcaaaggggagaaacaaggctgtcatttagtatccaaaaactggtacatgtatgttctgcttttataatgtatatttttctctcttctgtttttcatatccaaaacttctaaatgctattttaggggcacagcagattagattccagcacttggttataatttttcatctttcccttgcggtactatatctattgcgccaggtttcaatttctatcgcctaactttgttcggacgcnnnnn

SEQ ID NO: 21509 - DNA, 538 bp, Homo sapiens
  misc_feature 533, 534, 535, 536, 537, 538: n = A,T,C or G
actctgacaaatgctcttcagacctctcaccatcagacaccaggggaaggagacccttaaaccggagaattataattcaacagaaactgtcatttccccagacatcatgggagtattacatgcaaaaaccagccctgcggtgagtgggcttaaactcaaacttaattcttcaatacaggactctttactgatttgttctaagttttcagtgatgaacccaaataagattgagcttcaagagacagggttctgagaatctttggagtcattctgtccactattcctaagagaatcaatgtagataacagtcccaaaacctcaacagattgtttaaaggtgaacagatgttatctaaaatatcagaatcaaaattatgtgtaaaacatatccgggtgtattgtgtatgcacctatacatgtttatatatgtatattcttttttctctgctcaataaaattagcagcagttacagataaattattgtggtcatgatttgtgtgatttctaaggacaacatatatccctttatcaannnnnn

SEQ ID NO: 21510 - DNA, 1108 bp, Homo sapiens
  misc_feature 927: n = A,T,C or G
ggccattttgtgaagagacgaagactgagcggttgtggccgcgttgccgatctccagcagcagtcggcttctctacgcagaacccgggagtaggagactcagaatcgaatctcttctccctccccttcttgtgagatttttttgatcttcagctacattttcggctttgtgagaaaccttaccatcaaacacgatggccagctcctcttttgacttggactatgactttcaacgggactattatgataggatgtacagttacccagcacgtgtacctcctcctcctcctattgctcgggctgtagtgccctcgaaacgtcagcgtgtatcaggaaacacttcacgaaggggcaaaagtggcttcaattctaagagtggacagcggggatcttccaagtctggaaagttgaaaggagatgaccttcaggccattaagaaggagctgacccagataaaacaaaaagtggattctctcctggaaaacctggaaaaaattgaaaaggaacagagcaaacaagcagtagagatgaagaatgataagtcagaagaggagcagagcagcagctccgtgaagaaagatgagactaatgtgaagatggagtctgaggggggtgcagatgactctgctgaggagggggacctactgaatgatgatgataatgaagatcggggggatgaccagctggagttgatcaaggatgatgaaaaagaggctgaggaaggagaggatgacagagacagcgccaatggcgaggatgactcttaagcacatagtggggtttagaaatcttatcccattatttctttacctaggcgcttgtctaagatcaaatttttcaccagatcctctcccctagtatcttcagcacatgctcactgttctccccatccttgtccttcccatgttcattaattcatattgccccncgcctagtcccattttcacttcctttgacgctcctagtagttttgttaagtcttaccctgtaatttttgcttttaattttgatacctctttatgacttaacaataaaaaggatgtatggtttttatcaactgtctccaaaataatctcttgttatgcagggagtacctcggccgccaccgc

SEQ ID NO: 21511 - DNA, 864 bp, Homo sapiens
  misc_feature 1, 851, 852, 853, 854, 855, 856, 857, 858, 859, 860, 861,862, 863, 864: n = A,T,C or G
nctagtgtggttctttgccgtgtgagcctttttgtaaccaaaggtgtgatcgtaaatctgagaatattaatgggttctatagcgattaatatgaccgttccagactcggcccagagagttaaggtaagggacagttagcacagtcgagaatgcttgtcatgttctagttccctggggcaagggacaggctgccttgccctcctgggggtccccaacagcttgcagacatgcgggcatctgagcatacctttacggaactgaactgactccctctagtggctggctttaaatggcttttttttttcttttggtgtttttgtttgtttttttagttgtatttcttaggccatcccttttctacagagagaaccgcaagtcatcgtgagggtggaaagaatcgatagtactaaatgtcctttgcctaggctgcaagaggcacaatttcctttttcaatggatgaaagtaaaacggcaaactatttttgtttggactttgttgacttttgtgaggaaaccatatgacagctttaatatctaattttaaaattcagagcaggaaatgaggcaatcccgtacacaggccaagaaaaaaaccgtatcaaaatgtaaatatcaattccacattacagccagttaaagaacaatgggaagaccaagaaggagatggcagtgacagaagaaaggagaaggggaaataatgggcactaagaaagcagaaagagacatatttggagggagatggctaccgaaatctgggcttttcttagatcctctccaaggaaagttatcactggaaatacccaaggccctgattgtatgcactgtgctagggagaaagacattcagatgcnnnnnnnnnnnnnn

SEQ ID NO: 21512 - DNA, 549 bp, Homo sapiens
  misc_feature 548, 549: n = A,T,C or G
acatcttcacataacatactgagaatgcgttgctgtatcagagaatcatttctgagaatcatttctgtagtattcctgcccaagtgcctaacctgaatctaataatgaagaaacttcagacaagtgaaaattgaggagcattctatgatgcagctagcctctgctctataaaaagtcataaaacacatggaaaactaagaaatcttcaaggttaaaggagactaaaaccccatgacatctagatgcatggtaatagattataatatgatgataatagatccttggattaccattatggtaatagagccttggctcagggaaaaaaaaattcacaaagggtgttttgggagacagttgacaaaatttgaaaatggattgtatgttacataatattatattagggctaagtctcctgaatatgatgattatactgtgactatataagagactatctttaatcttagtagattcacactaattatttacggataaagggacctaatgtctcagttgaggaaacaaatgcacatgtatgaatatgtgtgtgnn

SEQ ID NO: 21513 - DNA, 577 bp, Homo sapiens
  misc_feature 577: n = A,T,C or G
actgggcagggtatggtagggagcagacagatactgacttcactacaataagccagccaatcactaaacaaacaagtacataataataacaagccctggagttaggaatgaagaggaccagcacccagaatttctacagtgttacctggaatatccaattttcaacaaaaagttgagatatgcaaagaaatgggaaagtctaacccatatatcgggggaaaaaagcagacaaccaggcttgcctgtaagagggaacagatgtcagatttaataaaagatttcatagtagtcattataaatatgttcatagaaccaaaggaaatcatggttgaagaaataaaggacagtatggtgacaatcacatcaaatagagaatgtatgtagagatagaaattataaaaaagaaccaaatgaaaaattccactagaggggctcaacagtagatttaaactggcagaagaaagaattagtgaacttgaagattctagatcaatagagattatgcaatccaaagaagagagaagaatgaataaaaaggaagagagcttcagagaaacgtggaacaccattaactgcn

SEQ ID NO: 21514 - DNA, 2093 bp, Homo sapiens
  misc_feature 1, 2090, 2091, 2092, 2093: n = A,T,C or G
nccgggccgggccgggccgggggcgcgcgctctgcgagctggatgtccaggctgcgggcgctgctgggcctcgggctgctggttgcgggctcgcgcctgccgcggatcaaaagccagaccatcgcctgtcgctcgggacccacctggtggggaccgcagcggctgaactcgggtggccgctgggactcagaggtcatggcgagcacggtggtgaagtacctgagccaggaggaggcccaggccgtggaccaggagctatttaacgaataccagttcagcgtggaccaacttatggaactggccgggctgagctgtgctacagccatcgccaaggcatatccccccacgtccatgtccaggagcccccctactgtcctggtcatctgtggcccggggaataatggaggagatggtctggtctgtgctcgacacctcaaactctttggctacgagccaaccatctattaccccaaaaggcctaacaagcccctcttcactgcattggtgacccagtgtcagaaaatggacatccctttccttggggaaatgcccgcagagcccatgacgattgatgaactgtatgagctggtggtggatgccatctttggcttcagcttcaagggcgatgttcgggaaacgttccacagcatcctgagtgtctgaaggactcactgtgccattgccagcatcgacattcctcaggatggcgacgtgcagagggaaatgctgggaggatcagccagactgctcatctcctcaaagcccaaaaatctgcacaagttacgtcgcacaatactggggtcgttgtgccctgccctgaagaaatcagtgacggccccaccgaatggtggtactgcgacgaaggggggttcccaaagtaactctcaaaaaaagggcaaaccaggacacccataaaggcaaaaaaaggaaagcaaagagagggaacaataaggattgggggccatctctctaggggtaacacaaagggcaagaggttgctatggtatttggaaacaatgaaaatggactgttagatgccaagtgagttgtgctgtcctttacacaattcttattcatttgggacacagacagggagctacttctacttatcagtgtagcaagactacaaagaggttaaccgaaggaatttcttcaaaggcctccaaggaatatcttctaatttgtattcaggaccttcccaggctgggaacagagatgccagtcaggatttatctctaggctaggagcgcaagctcatgtttattcattcatttggtagcgctagaaactggcaactgtgggctaaatctagcccatagacctaaatttatgtttttcttaaccttcacaatatttagaaatcagagcacttcacataggtctacattttcagcttcttttagcaggaatgctccttcaaagggtatctgcattcctgttcccacagcccccagcattccttgtcctttagctgcctggcttctctaggcacctgagttcatggtcctgggttagaagctgcagaaaggactgtgctgactccctcaactaaggggtggtactaccgcttgctcctctcagcagctgacatcccagagatcagtttcctttctgggagggactcctcattgaggggggtgcagaagacctgcagacctgcatcaaccctggtctttgaggcttcaactcctgaaaatcaatcaattgagccctacctttaccagacctttagtctctcttcttctgtttctttttggctttctggacagtgctgactccagctctttccttcttgggatgctgctgcctcttcctcttacctctgctgcttgagccagtgtgtgctctgctctctgcttccctagccccgccatccttctcatcccttacatccaagatgtcctccaactcaggatgcttcttgacgtcaagaagcatcctgagttgctgggactacaggtgcccaccaccacgcccagctaatttttgtatttttagtagagacggggtttcaccatattggccaggctggtctcgaactcctgacctcagtgatccgcctgcctcgcctctgaaatgcttgataacannnn

SEQ ID NO: 21515 - DNA, 1251 bp, Homo sapiens
  misc_feature 1, 1242, 1243, 1244, 1245, 1246, 1247, 1248, 1249, 1250,1251: n = A,T,C or G
nctgcagaattcgcccttgagcggccgcccgggcaggtacttaggctttcataaaaatacagcagggcaagaggaccaagatggaggcagtgatcagggaatctcaatgagggtgagactgcgacaaagacttgaaaaaggtggagaagcaagccttgtgggtatttagggtagcagtagtccaggcaaggggaacaactagtgcaaaggctctaggaggcaatgtgtttgaagtgttttaagaacagtaaggaggctagtatggttagaacagaatgagcaaagggggcaaagtggtagaaggtgagatcaaagaggtaatgaggccattgtggaggcccatatggactattggaagggctttggcttttactctaaatgaggcaaaaaccattttaagcagagaggagtgatatgacttgatttcttgttaaaaggattattctagttgctgttacagaaaaagattacaggggtgcaaagaaacagggagacaaaagaatataagattttcactgtaacttatatctagtatgcttgcttatacttgaaaatgcatatccagataattgtagtaaattcaaatattatgtttatttaatagtactaacattgatatgctggttaattatgattaggagcactaataaagcacaaatcagggattcccaaaaagaatgttaaaagggcagtcagcttttcctgtgccagaaatcaaagtcatagcagatttggggcaaatatgtcaaagtcaaacttacgcacatcactactgagaagacaaagatgaatgtgtgacagtttcctgcccccaagaatctttaagcattgtgaaggaagattaatatagccaaataactagagtgatcagttctaccagagaggaccagttttggaagccagaggaaaaaaaaaaaaaaacagaaacaaaatgatgtttgaattaaatctttaaaagtttctcttataaatttaccaagccacatattgggaatggtaccccaggcagaaggagtagagtaagcaagccagaaaggaaatactatggtgcttttgagtaactgcagtgtggctgaagaatgtggaaaatgatgaggataaagaggtggacagggaactaggtaagggagggcttccttttaaataattagaccttgtcctgtgtacatttaatgggattttaatcaggccataatgccaaatttctttacttcggaaggatctttatggtgatggtttcannnnnnnnnn

SEQ ID NO: 21516 - DNA, 3054 bp, Homo sapiens
  misc_feature 1, 2, 3, 4, 5, 3054: n = A,T,C or G
nnnnnagacagtcaatctgtcagctctaacactgatgcagatacctccccggggaaaaaccatgcaacttctaaccgaaaatcttcagttggcgtaaaaaagaatagcaagagcagaacgttaacgaggcaatctatgtcaagaattccagcttcttccaactctacctcatctaagctaactcatataaataattccagggtaccaaagaaactgaagaagcctgcaaagcctttactttcaaagataaaattgagaaatcattgcaagcggctggagcaaaagaatgcttcaagaaaactcgaaatgggaaacttagtactgaaagagcctaaagtagttctgtataaaaatttgcccattaaaaaagataaggagccagagggaccagcccaagccgcagttgccagcgggtgcttgactagacacgcggcgagagaacacagacagaatcctgtgagaggtgctcattcgcagggggagagctcgccctgcacctacataactcggcggtcagtgaggacaagaacaaatctgaaggaggcctctgacatcaagcttgaaccaaatacgttgaatggctataaaagcagtgtgacggaaccttgccccgacagtggtgaacagctgcagccagctcctgtgctgcaggaggaagaactggctcatgagactgcacaaaaaggggaggcaaagtgtcataagagtgacacaggcatgtccaaaaagaagtcacgacaaggaaaacttgtgaaacagtttgcaaaaatagaggaatctactccagtgcacgattctcctggaaaagacgacgcggtaccagatttgatgggtccccattctgaccagggtgagcacagtggcactgtgggcgtgcctgtgagctacacagactgtgctccttcacccgtcggttgttcagttgtgacatcagatagcttcaaaacaaaagacagctttagaactgcaaaaagtaaaaagaagaggcgaatcacaaggtatgatgcacagttaatcctagaaaataactctgggattcccaaattgactcttcgtaggcgtcatgatagcagcagcaaaacaaatgaccaagagaatgatggaatgaactcttccaaaataagcatcaagttaagcaaagaccatgacaacgataacaatctctatgtagcaaagcttaataatggatttaactcaggatcaggcagtagttctacaaaattaaaaatccagctaaaacgagatgaggaaaatagggggtcttatacagaggggcttcatgaaaatggggtgtgctgcagtgatcctctttctctcttggagtctcgaatggaggtggatgactatagtcagtatgaggaagaaagtacagatgattcctcctcttctgagggcgatgaagaggaggatgactatgatgatgactttgaagacgattttattcctcttcctccagctaagcgcttgaggttaatagttggaaaagactctatagatattgacatttcttcaaggagaagagaagatcagtctttaaggcttaatgcctaagctcttggtcttaacttgacctgggataactactttaaagaaataaaaaattccagtcaattattcctcaactgaaagtttagtggcagcacttctattgtcccttcacttatcagcatactattgtagaaagtgtacagcatactgactcaattcttaagtctgatttgtgcaaatttttatcgtactttttaaatagccttcttacgtgcaattctgagttagaggtaaagccctgttgtaaaataaaggctcaagcaaaattgtacagtgatagcaactttccacacaggacgttgaaaacagtaatgtggctacacagtttttttaactgtaagagcatcagctggctctttaatatatgactaaacaataatttaaaacaaatcatagtagcagcatattaagggtttctagtatgctaatatcaccagcaatgatctttggctttttgatttatttgctagatgtttcccccttggagttttgtcagtttcacactgtttgctggcccaggtgtactgtttgtggcctttgttaatatcgcaaaccattggttgggagtcagattggtttcttaaaaaaaaaaaaaaaaacgacatacgtgacagctcacttttcagttcattatatgtacgagggtagcagtgtgtgggatgaggttcgatacagcgtatttattgcttgtcatgtaaattaaaaaccttgtatttaactcttttcaatccttttagataaaattgttctttgcaagaatgattggtgcttattttttcaaaaatttgctgtgaacaacgtgatgacaacaagcaacatttatctaatgaactacagctatcttaatttggttcttcaagttttctgttgcacttgtaaaatgctacaaggaatattaaaaaaatctattcactttaacttataatagtttatgaaataaaaacatgagtcacagcttttgttctgtggtaacctataaaaaaagtttgtctttgagattcaatgtaaagaactgaaaacaatgtatatgttgtaaatatttgtgtgttgtgagaaatttttgtcataagaaattaaaagaacttaccaggaaggtttttaagtttagaaatattcatgccaataaaataggaaattataaatatatagttttaagcactgcatcagtgggagttcttggcttatgttagtttatgttagtttattatgaaaccaccaaagatttttttggctatattaccagttaaccaaaaaggggccagatttaattgttttattgaagcacttggagaaattaattttaattacttaagtgagcaaatttttattactactttatgttcactaccaggtctttcatttctctggattattggcaatcatcggacagagatctgggaatataactctgtaacagggggttgaacaccagaaggtctcttatttctggaaatgggtccgtaccttctgattcaggttccaagaaaacacaccggggataggaan

SEQ ID NO: 21517 - DNA, 2975 bp, Homo sapiens
  misc_feature 1, 2, 2955, 2956, 2957, 2958, 2959, 2960, 2961, 2962, 2963,2964, 2965, 2966, 2967, 2968, 2969, 2970, 2971, 2972, 2973,2974, 2975: n = A,T,C or G
nnaagtcgacccacgcgtccgcggacgcgtgggcggacgcgtggggcctgggtgtccgtgggtccgtctgcccagccatctgctggtggcacctctccctcctgccgcctccctcggtgaaccccaccttgcagaagtgcagctcgcccggagcagcccaggagctcagcatgcgtcccccaggcttcaggaacttcttgctgctggcgtcctcccttctctttgctgggttgtcagctgttcctcaaagcttctcgccatctctgaggagctggccgggcgccgcctgcaggctgtcccgggccgagtccgagcgacgctgccgcgcacctgggcagcccccgggggccgcgctgtgccacggccggggccgctgcgactgcggcgtctgcatctgccacgtgactgagccgggcatgttcttcgggcccctgtgtgagtgccatgagtgggtgtgcgagacctacgacgggagcacctgtgcaggccatggtaagtgtgactgtggcaagtgcaagtgtgaccagggatggtatggggatgcttgccagtacccaactaactgtgacttgacaaagaagaaaagtaaccaaatgtgcaagaattcacaagacatcatctgctctaatgcaggtacatgtcactgtggcaggtgtaagtgtgataattcagatggaagtggacttgtgtatggtaaattttgtgagtgtgacgatagagaatgcatagatgatgaaacagaagaaatatgtggaggccatgggaagtgttactgtggaaactgctactgcaaggctggttggcatggagataaatgtgaattccagtgcgatatcaccccctgggaaagcaagcgaagatgcacgtctccagatggcaaaatctgcagtaacagagggacttgtgtatgtggtgaatgtacctgtcacgatgttgatccgactggggactggggagatattcatggggacacctgtgaatgtgatgagagggactgtagagctgtctatgaccgatattctgatgacttctgttcaggtcatggacagtgtaattgcggaagatgtgactgcaaagcaggctggtatgggaagaagtgtgagcacccacagtcctgcacgctgtcagctgaggagagcatcaggaagtgccagggaagctcggatctgccttgctctgggaggggtaaatgtgaatgtggcaaatgcacctgctatcctccaggagatcgccgggtgtatggcaagacttgtgagtgtgatgatcgccgctgtgaagacctcgatggtgtggtctgtggaggccacggcacatgttcctgtggtcgctgtgtttgtgagagaggatggtttggaaagctctgccaacatccgcggaagtgtaacatgacggaagaacaaagcaagaatctgtgtgaatcagcagatggcatattgtgctcggggaagggttcttgtcattgtgggaagtgcatttgttctgctgaggagtggtatatttctggggagttctgtgactgtgatgacagagactgcgacaaacatgatggtctcatttgtacagggaatggaatatgtagctgtggaaactgtgaatgctgggatggatggaatggaaatgcatgtgaaatctggcttggctcagaatatccttaacaattacatgagagagcaattttgatgacgtattcgctgatgcacagacattggaattcattacattatctagccatcgtaatacaaatgacctttggatttctctatcacggcgcttatcctcctattaaggatcagaaagttaaactttacggaccacgtacgtccctgtctcatattcttctttgttggtttctgtttaatactttaaagctgtaaaaaaaatttaaaaaattccttctgagctcccaggccatacaaaagcaacttaagggtggatttggctggcagctgggcagtactttgtcagcctcagctccactggaactgcccttgattctctatagctcatcacaaaacctcaggtatgtcttatttttcttataatcctctgtatgttattatcctttttattaacaacaacaactacaacaaaagtgctgctctttttcatagtctcatgtaagaagagtgtcaaaaatgtcctcggcatttgttttctcagaaaaagaatttagatattggagaaattatcataccataaaaagttcaaaatgtgattcatctaaaattttggacaaagatgaaaatatagtcagctctgttctagtgttcatttagttagaaaccatagtaccggaactgtattatagtagaagttaatggtacctaaactctaaggaatgctttttctttgaaaacagaaatatttttacttatttctgtccactatgtttgtgtgtatgtgtgtgtttgtgtgtgtatgtgtggttttgatgccagcaatgcaaacaccaatatatctattaagaagtgattgaatttagattggaaaaaataaaatagttacatgtaaagacataaactctttccttcttaaatgtgattttcaactctatgatagaaactccctctaaaaaacaagcagggcaagaacaaacttacttgtaatgggtgagagaaaataagcaaatctcattggctcattcctgtttttaggaagttgcagtgggattaatgtcaattggaagggatgcagcaagtttagagaaggtgttggcactaacgctgcttgtttggcaaatcatcatcactgaggtattccacccagagactttttcaaaaaagtcaactaaagtgctaagtcataagaggagagccattatacccgttgtctttctgggctccttgagtttatctggattccaacagcacttggaaagtaccgccctccactacctcaaatgcaaacacaatctctgccagtagacattggaattagacttagtgaaaaccacgnnnnnnnnnnnnnnnnnnnnn

SEQ ID NO: 21518 - DNA, 2251 bp, Homo sapiens
  misc_feature 2233, 2234, 2235, 2236, 2237, 2238, 2239, 2240, 2241, 2242,2243, 2244, 2245, 2246, 2247, 2248, 2249, 2250, 2251: n = A,T,C or G
ggagtcgacccacgcgtccggagcaggggcagcgtgggaggcgccaagggagcgcgaacctgaggaggaagaaacggggctagcgcgcaggcccagaacggtccgagccgcggcagtcggcgacgcctcagagcggaagagggaagtgaatcaggcgccgggtagtgggttgctgggctgggcttgctgaggtagaggcagcgccaagaagaggcctttgccgctggtcgggattgggatgtcgaagaacacagtgtcgtcggcccgcttccggaaggtggacgtggatgaatatgacgagaacaagttcgtggacgaagaagatgggggcgacggccaggccgggcccgacgagggcgaggtggactcctgcctgcggcaaggaaacatgacagctgccctacaggcagctctgaagaacccccctatcaacaccaagagtcaggcagtgaaggaccgggcaggcagcattgtcttgaaggtgctcatctcttttaaagctaatgatatagaaaaggcagttcaatctctggacaagaatggtgtggatctcctaatgaagtatatttataaaggatttgagagcccgtctgacaatagcagtgctatgttactgcaatggcatgaaaaggcacttgctgctggaggagtagggtccattgttcgtgtcttgactgcaagaaaaactgtgtagtctggcaggaagtggattatctgcctcgggagtgggaattgctggtacaaagaccaaaacaaccaaatgccaccgctgccctgtgggtagcatctgtttctctcagctttgccttcttgctttttcatatctgtaaagaaaaaaattacatatcagttgtcctttaatgaaaattgggataatatagaagaaattgtgttaaaatagaagtgtttcatcctttcaaaaccatttcagtgatgtttataccaatctgtatatagtataatttacattcaagtttaattgtgcaacttttaacccctgttggctggttttttgttctgttttgttttgtattatttttaactaatactgagagatttggtcagaatttgaggccagtttcctagctcattgctagtcaggaaatgatatttataaaaaatatgagagactggcagctattaacattgcaaaactggaccatatttcccttatttaataagcaaaatatgtttttggaataagtggtgggtgaataccactgccaagttatagctttgtttttgcttgcctcctgattatctgtactgtgggtttaagtatgctactttctctcagcatccaataatcatggcccctcaatttatttgtggtcacccagggttcagagcaagaagtcttgctttatacaaatgtatccataaaatatcagagcttgttgggcatgaacatcaaacttttgttccactaatatggctctgtttggaaaaaactgcaaatcagaaagaatgatttgcagaaagaaagaaaaactatggtgtaatttaaactctgggcagcctctgaatgaaatgctactttctttagaaatataatagctgccttagacattatgaggtatacaactagtatttaagataccatttaatatgccccgtaaatgtcttcagtgttcttcagggtagttgggatctcaaaagatttggttcagatccaaacaaatacacattctgtgttttagctcagtgttttctaaaaaaagaaactgccacacagcaaaaaattgtttactttgttggacaaaccaaatcagttctcaaaaaatgaccggtgcttataaaaagttataaatatcgagtagctctaaaacaaaccacctgaccaagagggaagtgagcttgtgcttagtatttacattggatgccagttttgtaatcactgacttatgtgcaaactggtgcagaaattctataaactctttgctgtttttgatacctgctttttgtttcattttgttttgttttgtaaaaatgataaaacttcagaaaataaaatgtcagtgttgaataatttaaacaaaaaaaaaaaaaacaataacgcaaaaaaacaacaacaacaaaaaaaaaaaaaagaaaaagaagagaaacaaaacacaaaaaagaaagagcgaggaggggggggccctgagcttcagagagagataccaccaccacggggagggagcggggaggggggcgggagaaaacagaggggggaggaggggggagaagcgannnnnnnnnnnnnnnnnnn

SEQ ID NO: 21519 - DNA, 947 bp, Homo sapiens
  misc_feature 1, 2, 3, 4, 5, 6, 7, 8, 9, 10, 11, 12, 931, 932, 933, 934,935, 936, 937, 938, 939, 940, 941, 942, 943, 944, 945, 946,947: n = A,T,C or G
nnnnnnnnnnnnctaagagtctaactcgatttccatgcttcggtttctgattgtttactgtcatccagttttctagtttaatatctagcaaaactaaatctgaatgtactcgctttttccgttaagtatgccaagcacctcggttgaaaggcttgactcaaaccagaagtcttgctggaattcgtctctgaacacttgaaaaacagaaaccctgagccgcaacaaacatgcctctgtgtgtcgggattgcctttgtctctgcttccatgtggcttttccttttgtagctatgcttagtgacataatcttccctcttctagccttctcctttcaagcctgtctgttaattaaccatgtcagtattggcaagcatttatcttcccccaccctaacatgcgatcttctaagaattttgcaaaattctaaacaaatatagagatggtatatagaattcatatctagaaaactttgattttaatgtgagcttatcaaatttgttctggcttttttggcactaaggcaaaaacatgttaaccagaaataatttattcttcatgtatgtaaaatatttgagaatgtttagccttttattagaattttatttggaaaatatttatctttctacacattttacacttatgttcctttgcttataacccaatttcttaacttttttgttacttaagcaaatatcaattatgttttattatctaataaagtgtaagattcttactatctaaaatatttaattctgtgtgactaatatacttttctgatcattcaaattgaatatgaaaagctagaataactgtattgcaactgttaattccagccaattgtataatgataacactggtgaatttctaagtaaatctaatacttgaaaatttgggtatacatagaaaataaattttaatataatgtacaaagnnnnnnnnnnnnnnnnn

SEQ ID NO: 21520 - DNA, 1187 bp, Homo sapiens
  misc_feature 1, 1187: n = A,T,C or G
nagtgtcttggaattcgccctcagcgtggtcccgctcgaggctctgttttgtgttgatcttatgtaaaagaactcaattcttttttcacacaattagtcaaattttattttttattagctaacactaaatagtgtaatatttcttttgcttttaaaaaaattcctggtagcaaatcaagataaataattgcttcattttcttgagcaatactgaagcaggatgaagtaagaggaatgcattcatttaaacatgctttgctttatgaattttgtctcttttttggtctctttttcttatattcaagttacaaatgtacaagtatccttactaagagtgctccttttgtattttacatatatacagtatgaaaatacattggaacactaggaaagtttttaaataacagttctaatttatcagaaaattgtgttttgggattgagttctttgtctcagcccagaatcccaggtcctgggcctggttttctaatgctgtcatctcagttcgatattttactttagaacctggaatctcctacttaatatatgaccatgactttgaaaggcaaaagaggaatcaagaataaataaaacaaacttaatcttcatctttaaaaaaaagaaaaaagaaaccaaaatgagaatcaacacttcataggctcactgggttttcttttcttttctgttaatttaaactcagttatttttaatgcttaatacatacatggtgcaaaatttaaaaagcgcaaataggtatctagtggaaaacctaagcctccctctctcctccggcacccattacctctccctggaggcaactgttttgatccatttcttacacacactgccagagatactctaggcatgtaaagcacaaacatacatataaaatctgcgggcttcaaaaaatataagtaggatgtcatctatactgtcatacactttgttttttatcacttacttaatgttatatcttggatattgtattaccctgggtattaaaaagaactcctttcacattatgaaataactatctgagcgcttcataaatccaaatgcgtatctccagtccgctcgagctaggatatagcggatacgcaccttgtcaaaggaggcaactacgactacgacaacgaattcaaacgtaggctcttgtacaatcatcgtgactagggattaccggagan

SEQ ID NO: 21521 - DNA, 574 bp, Homo sapiens
  misc_feature 574: n = A,T,C or G
tatatggagtcgacccacgcgtccgctttcccttcctagattgcacagcgttcatgcccaggatgagcttcctgacccccacgatcctgctgctggcgctggtcgccgccacccaggccgagcccctgcacttcaaggactgcggctctaaggtgggcgttataaaggaagtgaatgtgagcccgtgccctacccagccctgtcagctacacaaaggccagtcctacagtgtcaacgtcacctttactagcggcactcagtcccagaacagcacggccttggtccacggcatcttggcaggggtcccagtctacttccctattcctgagcctgacggttgtaaatgtggaatcaactgccccatccagaaagacaaggtctacagctacctgaataagctgccggtgaagagcgaatatccctctctaaaactggtggtggaatggaaacttcaagatgacaaaaaggataacctcttctgctgggagatcccagtagagatcaaaggctaggctgcttggtgccctgtgtctgtgcagggtgagagtccatgggcggagggaggggaaggaan

SEQ ID NO: 21522 - DNA, 509 bp, Homo sapiens
  misc_feature 1, 2, 3, 4, 5, 6, 7, 8, 397, 398, 399, 400, 401, 402, 403,404, 405, 406, 407, 408, 409, 410, 411, 412, 413, 414, 415,416, 417, 418, 419, 420, 421, 422, 423: n = A,T,C or G
nnnnnnnncttttgatgaaattatctgaactcaacatctagcacatagaatgtgttcaacaaatgcttgttgaatgaataaattatgactgcagactggctctcctgccttaaactaatttcatcccagcctagtctcctgatgtctgtgctcgttatgctatgccatgttgcttcagtcaaacaagaaacacttactgagggcatattgtttgcccatcattgtgcaatatgctgtgggacatgggatgtcgtctcagtcttcaaggaaatggaagggttaagaaatgcatatgagattattaccaatgacaccgttaatttatatgatgctttaaaattatcagagcactttcatgtatttttcgtgtgactagtgaaaaagacaatgttggacnnnnnnnnnnnnnnnnnnnnnnnnnnnaaaagaatgcttctttattgatggttatatttatcagcaaggatcatgactcagtagccagttgaaggaatcagaacactttgggt

SEQ ID NO: 21523 - DNA, 811 bp, Homo sapiens
  misc_feature 1, 2, 3, 4, 5, 6: n = A,T,C or G
nnnnnnactcatatgcttcagttaattatatatgttgaacaggtaggaagcagtgctgtttttatttattttaatatgttattcatacatttggttctttctgtaggcagctgaatttttttttttttgagacgaagtcttggtattgtcccccttgctggagtgcaatggcatgatctcggctcactgcaacctctgcctcctgggttcaggcaattctcctgcctcagactcctgagtagctgggattacaggcgcctgccaccacgcccggataatttttgtatttttagtagagacagtgtttcactatgttggctgggctggtctcgaactcctgccctcaggtgatccgcctgcctcagcctcccaaagtgctgggattactggcgtgagccactgctgccagccggcagttgaattttaagactgtggagctggctgaggcagtagatgaaacaagatttcttgatgttccttccaggtttattatgcatgtatctttagagctgatttttttttaaagactgtgtttattgtatttcagatgctgagatgaatcgtcacctgtgtgtttggctttttagacatccatctcttaatggttacctccagtgtcacatccagctccattctcatcaatttagacagatacatcttgatacaaggctgcaagtttttagacaaaacaggaattgcattcttcatctgttaagtaagaattggtccaggagatattgccatcaagacaccaagatgctctggaagcataaagcactacagaaatatatggagaacctgagtaaggagt

SEQ ID NO: 21524 - DNA, 4737 bp, Homo sapiens
  misc_feature 1, 2, 3: n = A,T,C or G
nnncccggcatactgtgggcgtccatcgcccccaaagggtctctcccagtgcccgggactttttcctccccccgtgtttaacccgcccgcgctcccttgtattatcatcctccgcttggggccctcttcgttacaagctggggttggtatcatcggcttcccccctggtgatttttatttgtgtgccccccccctttcttgtctttgtctttatcgttcctcctccattccgtcgtgattctactctctgatatttgcttttcgttcttcccgtgttttgtaaacaactcaaatggctttcttttaatgctaggaaaactgtccacctttcaacggtgacagggctgttaacacaggtaagagcaaacaaggtaaaaagtgaaagcacatacagatgatgcacacaaatatatataaaaattgaccagaaatcacaggacatgtaagcaatgttttcttaagcagaactttttttgtactttaaatagactaaaatatttggtgtaggtgggagaaagacatcagtattcaacaattttaacttgaaaaccagctgtaataaagcctcagctcattgtttaataaaaataaaaaaggaaccacatcgtacttttgacaatcatagaacgaaagctcacaaagaacacatttaatatctccatcacagtgcaccaaggatgcagccactaaggacttccagagggaaacaagaacagggtctgcatccatcatattgcattacaaagttaatgccatcagagaaaaaaaatctcacctcacgtgctcaatgttctagctggtaagcaccttatgagtatgaggctacaattgagagaaactgctcagtctgcatcaggacacccaattccttcacttgccattggctgatgcatttaatcattttaacacaacattcacggaaaaatgttaacaacacattctggcttctcgagcagaacagactgggaaatgcagtagacgccagagcatcaaaggccatgtatttcctcacaagaaaagaaatctgcaacaattggtttccttttactatgaaaaatgtaaatttcagattaagtttaaccccataaggacgcatgatttgtacttacatatacacataggttcagaagaacttagctatctagttggcctcttctctgttccattataacatcagttaccttagctggatcactaagtgtgagtctcaccaccatactggtaccttcagctattacctgtgttataaatctcatgttccattcaaagtactaaatgactggatggcacatatcccaataagtatcagaaatgttgacagccatagtgcagctgagtttagaagcaactatgacaacatagggaagtaaggataaatcacaagaacacctaaggtggtcagctccttctggtgtgcctgggacttgttttgagtttagcaaaaactttacaagattaaaaatcagagcaaatgaatttcttaagttccaagatatgtactctcaatggagaatcgcttttgggcagtggttaaggcctctgatgtgctacttatcagaaaaatcccacatatatacaaaactctgcttaaaagttttgtatccagggaaagtcccgcatccagggaaaccctcaatcccaggcactttagggcagctggtcaccctgagaacactacccactcgttccttaatatcactagagaaaaggtaagaactttcaagggcataacctttaagggcatcagtccccaaaatatttttacatcactagctaatggctagttcctctaagcttgctgaaaggctaggaagtccagaaataccttatttaaacgtgttaactttaagaagagttggtagtaatcaagcaaattagtgagcagtgtataaaagctcactcttgaaatctgttttcagacaaatcttctaaaggttcttctagctttgtccagttatatggtattttactgtattctctttttgcaattaatccagttttgtatgtcttttctttcttttttaggtgaaaatattctatgccaactgttttccacagtcctgcattatatattaaaacaaaggctgccagctggagacacagccctccgattacaaaggcccagaatgttacttttaactgtgctccaccaggaggtctggccttgggaaaagatggcgaaaggaatattctcagatatgaacattttttattctgcctacaatgctgtgatctagttcaacaactgcagaactgttctcatcttaatcgctgtagtttttctttctttactcttttgtataaaaggttagtgtcacagcttcactatcactaataaaaagatacaaatatgcctttcaagtcagggttggaaaagcaaaactgaggtgtgaggttacactggtctaagaaagtaccaatttgggttctatattttgtcaaacagttgggtttttaaaaaaattcaaaactcatgcatgttacctacttgtcatgtgtgaattatttctcacaattttaattaatctgtgtgtatattagttatataaagcaatggatttccacattcttaaagcaggaacctatattcaccagaaaaggatcctcctgtttctcatcaaattttttttcagctcgaacaatccaagattgggaatagtaagagtggcaaacaaatgttttcttagggacttactgagaaaagaaaaaacttactgggagaacagagacttagtaaaatttctattgctacagacaaatgctaaaaaccagctttataataacagcattataaaggatagaacttaatatagaaccagaaatatggcaagttacctagtgattaacattgtaaaatagtcaaaaactttaaagccacagagaaaggaaaacaattatgaaatggaaaatatataatatttaagtacttttataattctaaaacttcacttttgtccttaaatcaatatattacggatttcattgttcaataaattaccatctttaactaaaaataagtaaatcaaagagcatatttggagaaactaagagctgttaactgtttggagggtaaaagaatacttttctcgaaatttttttgaagaaaaatctaaaagccctctatgttgagttaatacaccttctgacccccatcatcagtggcattattcttccaagggactcttatatctaagcaatggtgaagttctggattcattatggatctcatggcaccaaaccaactggcactgaagttaagttaatatactccagcgagatcacctgtgggtcaaggatggcccagagaatcttggaaaatccatttatattgagcaaagatctgaatcaccttcaatcaggctgtaagatactagaaaatttgaccttgtagtagtatttcccagggtaacttaagcagcaaccttgcaccagaagaagaattaaagagggagcaatctagtattatcaacaacaacaaagttaaccctaagttagtacatcccagaatctgctggatgtataataatttagtaacggggtatatggcagagctttctttgatgttaacaaattttggctgtgattcttagttaccaagttgccaaaaaatggtatattaaatgaactgccaaatggcagattaagaaaattaatgtactccaatggtctgtccatgaaaggaaaatgtacacagacaaattaagaacattttaccaggatctgagatttaaacaatggaacaattgttttaactgttagaatgaccccaactgttaagtttgtctatgagtgtatatgtatatataaattcatacacatatattatttatttccttcttaaaaagactgaggcagttctgctatatatagttagctacaatattcaagataaaacagttcctactcaaaaaattacatgaacacacgagataagttcttatcgtaaatgctatcatgaggctatctagtatagctcatatttccgggtggtaaggctcaaaacacaggaattccactccaagagatatttggcccctcaatccctacaaagtgtagtctaaacaaacaaaatggtaataaaaaattgaaaaggaagatataaaaagaactcaatagcaggattctgactacctctggagaccacacactatcattattctgacggtcttaaatacaacaatccaatatgccccaagatggaaatctggtatcgtagggaaaacattggctgcaactgtcagaaaagttcataatcttaaacataatttatgccattggccagtcacaaagacatttactgaacagaatttttgagccattggtaaaattaaaatgatggatcaatttgaatagcaaccttcatgatgaagaaattaggactctaggtatgaaaagcatgttccttttttgttaataagttcaaaggagagaaacattctgatatatgcagataaaaatatggctaggctgggcgcggtggctcatgcctgtaatcccagcactttgggaagccgaggtggacagatcacgaggtcaggagatcgagaccatcctggccaacacggtgaaaccccgtctctactaaaaatacaaaaaattagccgagtgtggtggtgggcgcctgtagtcccagctacttgggaggctgaggcagaagcatggcgtgaacccgggaggcggagcttgcagtgaaccaagatcgcaccactgcactccaggttcggacgcgtgggtcga

SEQ ID NO: 21525 - DNA, 2468 bp, Homo sapiens
  misc_feature 1, 2, 3, 4, 5, 6, 7, 8, 9, 10, 11, 12, 13, 14, 15, 16, 17,18, 19, 20, 21, 22, 23, 24, 25, 26, 27, 2450, 2451, 2452,2453, 2454, 2455, 2456, 2457, 2458, 2459, 2460, 2461, 2462,2463, 2464, 2465, 2466, 2467, 2468: n = A,T,C or G
nnnnnnnnnnnnnnnnnnnnnnnnnnncgaggtcgacggtatcgataagcttgatatcgaattcggcacgagcaaacatggcggctccactagggggtatgttttctgggcagccacccggtccccctcaggccccgccgggccttccgggccaagcttcgcttcttcaggcagctccaggcgctcctagaccttccagcagtactttggtggacgagttggagtcatctttcgaggcttgctttgcatctctggtgagtcaggactatgtcaatggcaccgatcaggaagaaattcgaaccggtgttgatcagtgtatccagaagtttctggatattgcaagacagacagaatgttttttcttacaaaaaagattgcagttatctgtccagaaaccagagcaagttatcaaagaggatgtgtcagaactaaggaatgaattacagcggaaagatgcactagtccagaagcacttgacaaagctgaggcattggcagcaggtgctggaggacatcaacgtgcagcacaaaaagcccgccgacatccctcagggctccttggcctacctggagcaggcatctgccaacatccctgcacctctgaagccaacgtgagcaaagggcagaggcagttggcctatgagtgggctgatgcgtgaggttggccacacattccttcctgtggacttgacattttggaagaactctttgccagataatgagttcattttagttttatgctcccattgaaaaattttccactatttttataagctgttaatttcttgagtactttataacatgtctgtagcttggataaaccaagtaagtattttttttttgtctttagcgaagtttagactgtgaatatgatgacacagattcttttttatggtggctttgcttgttttaaatttttgcatgacttttcatctttttatgtgtgtttcctgtagtttgatccgaaggaaaagagtatagtagcctgagaatcaggagatgggagttttagtcgtaggccttatgataattaccccgcggtggtgtgtagaaaagtatgtaaatttgctctgttttaagactttgaactacctcaagaagaggaatctaatacaatatttgtaatgtttccagagctctcagaatgaggatttttttgtaaataggtcagaagacgatggaactgtcctgggttagtatagtaatcttacagtaggatccttaggttgatgctgacttctgtttggggtatgtttatattttatgtggtgtttactttttttttttgacatagaaggatatagtgggagcagtgatacgctaacattcattacattctgcagtaatgaatctgtttaatgggtcagacactgttttcagtagcatgacagtggggtcataggtgagctgtgaggggctaaatcttgctctgattgtctctttctgttttgagttttgtttgcgtgtatcatttttgttctacattttgggaggggaaacattttccgttaaggaaggttgttgccagtggatttgactccaagggactagagtgtcgtggtgggggtggggaggggctgcagggtgatcattggctactgagcctccacaaagagcatgtggtgccctgcctttgggagggtattttgctctcgttagttttgtgggcagcctcagattccctgttgagttgctgttaagaaatggagatttctggctctcattgggtaaggttttctgagttttatatcttattagatcacatccctttacccagaacaaatgcttcactgtcttctgattggcagtactcctgtggctttgtgccttgactcattttgttgtcttcagccttgaaggccccttcccacatggactgacatccactcatgtgcctgatccctgaagcctcccagcacccattcagttgcatccccagggcacaggactttgatctcttctgttgccctcgctaggttctccctggtgggttagtgctttgtatctgtctctctgcccctcactaattctacacccatgagaattagacattattctccttaaatatataaggaccatataatctgtatctttttggtgtgtgtatatggtatctggcacatggatctctgattaccagcctgacatcaacaaatcccctcagttacaacgtataggttaaacaaagcttttaaaagctcatgtggtatgacctcaaggttgctaacctggtcactcatggtaattagaaactctgattggcagctttgtatttcttgactaaaaacctaaataaactgattaggttttaggcgttctttcaaagaggttcttgagaagattgagaactatcctatttggtgcttagtgaaaagattttgaattactgtacgtaccagttgttgccatttctttattaaattcagaagtttttttgccaaatgaataacnnnnnnnnnnnnnnnnnnn

SEQ ID NO: 21526 - DNA, 1518 bp, Homo sapiens
  misc_feature 1, 2, 3, 1513, 1514, 1515, 1516, 1517, 1518: n = A,T,C or G
nnnaacccctcactaaagggaacaaaagctggagctccaccgcggtggcgccgctctagaactagtggatcccccgggctgcaggaattcgattccctcccccacagtgaggaaagtagcacaaataggatacagttgtatgtagtcattggcaacaattgcatacaattttactaccaagagaaggtatagtatggaaagtccaaatgacttccttgattggatgttaacagctgactggtgtgagacttgaggtttcatctagtccttcaaaactatatggttgcctagattctctctggaaactgactttgtcaaataaatagcagattgtagtgtctggtttggtttggacagtagtgctttctatcatattgttgtgtgcaatggtaatttgttctactggccaaagcctctttcagcagtgccttgccatcatgcttaaaagtttggctagtatatcttgctggatggagccttgaactccggcaaggattgaaccatctgacttccaaatttgccttcccctctggacctcactattaacaagcaaacctttcagggccctcttagctctcagaagctatgtatgggctttcccagattttaaagctgctgcctcgagaactactcatttctctcctggtcagcagacagaaatagccatactaatctcatagggctcaaatgcatcttcaggcagcagggaaccaagcagcgtggcacaggccttcttgactggaggaagagcttgctggcatggtgggcagtattccaggagaggccatgtccgtgttcacttcttggcacatttcagttccgttttcctcttgtttaaaactgcctctttagatgtggatgccttaatgctgtaacacatttgaaaacattggcaatacttaagttgctgccatgattacagatggaattattggctaccaaagagacgcaattgatgatgagaagcatgattcttgcttccatataaccaaagttaatcttaattgcaatttgactccgtttccttggtagggatagactttcttcagattccaagtgctctcttaaatggcaaattaagttaaagaatactactgctccattcccctcacttattctccagttaattgcttgtcagttccatttcaagaaagcagtgatgttccaggtttgattcagttttcctgtgcacactattgccaaattttttttagcaaagattctgcactggaacgtagacagtggacagtatccacgtagagggatgggttgcctatccccgcggctatcccggtttgttcccagtgaagggaagcagccgcctgggagttagctctactagaacaacagagcggtgctggatagtatcttacgaggacggagagtgtttacccccatagctccggggctctctgaaagcaagatccttgttgctctatgtgaagttgagctgtgtcgaagcttcgagtgtggcgtgataagagcagagacgacgacgacgggcggagccaannnnnn

SEQ ID NO: 21527 - DNA, 1398 bp, Homo sapiens
  misc_feature 1, 2, 3, 4, 5, 6, 7, 8, 9, 10, 11, 12, 13, 14, 15, 16, 17,18, 19, 20, 21, 22, 23, 24, 1390, 1391, 1392, 1393, 1394,1395, 1396, 1397, 1398: n = A,T,C or G
nnnnnnnnnnnnnnnnnnnnnnnnctacagtatttttattaagtttgtttatgcattctttgttagcagtatcagtgtgcttaaggttaggtttagtaaaataattggattctaaaaaagatcttcttcgctctctgcttgaaccagacaaaatttcatcatcaacatcattttcttcagtgtccagggttaatttatcttgtgtcagatcatgaagtgagggttgaggtaaagaaaattcgggttcctcttccacaactggagagatattttgttgttcctttgctttaagggcacgggcttcttttaatttttgaattttcagggcatattcatattctagcttttgtaaccgtcttttctccatagcaattagttctgctgaatgctttcttggacttgatactggagaactgtccagtctcatcattttgtttggcccaaagcgatcttgttccagtttacgttttcctatttctttactggccactgcctttgcccgagcaagctcttctccatattttagagtcaaagctttcttaattgtaacacgctgttgaactctgtgaatttgttcctgaagcttcttcaaaaacattctgttaacattaagaattttttcagttgcttgaagctgttctgtaagttttgtaatctttgcttcagcatttctaacagattctttcttcttagcttcttgttgcactaaattctttaaaacagattcatctttcatcaagagaatcctatgttttttcagttttgattctgcatctgtaacctgcttagtaaccattgctatcctgccaataccatcaatttccacatcagagtttgctggggatgatgaacttgtcttcagctgatctgatttaatcaaacgctgtttctcacggttggcaatctcttcctttaacaatctatattcaatcttcttttcttcaggcaaagcctccggtgttcgcagaggatcattttctttttcagattttggaggtactttcggttttgaagcttgctcagcagttcgtcttgcttctttaatcatggactctaatccaccaaaaacactatttgttgacttggaagcctctccatcagattcactatcatctgagtcatttagtgttacaaccactgatttatgctttggaagcgagatcacagttcgtggaagacggggtcctctgtgaaactttggattctgtatcctaggctgagacactgtgttaataccgactattgatagattgcttcttggcgcaggatgtgaattgttcagaactggaggtgaaggtgggtcactattactggatgtttcctctggcttaaaagctcttttatttgctagagatttaagtagtcctcgtgccgaattcttggcctcgannnnnnnnn

SEQ ID NO: 21528 - DNA, 881 bp, Homo sapiens
  misc_feature 878, 879, 880, 881: n = A,T,C or G
acaatagactagaaacgaaaaatattccatcaaaacattttctcttttcatttaagggagatcggatgtgcactttgcggtgtctgtgtttctggtagagctctatggaaacagcctccttttgacagcagtctacgggctggtggtggcagggtctgttctggtcctgggagccatcatcggtgaccgggtggacaagaatgctagacttaaaggtgagtgttgttatataattaagcccttttattcatgggaccaatgcctgagctacctctgtagcaaaggaaacaacaaactaggagagaaacaaccagggaatgtctgcatgccacacttgagggaggagggcttagatggcaccacctctggatggagggtcccatggctcccacacaaagttgggatgcctggacattgacctaatggctttttttcgggatggactttggtatccatgtgcgtggagtacgtcctgctctggaaggtttaccagaaaacccccagcctcctagcctgtgaaagccggtccttaaagaagaggaaactgaaattgaaacagcctgaatttacacaaaggtaaacctgaacacaatgatctctccttttgttcctcatgttcagacccttaaatgttggtgaagatcaaaactattttgaatttgtatcaggttttattacccagtgggggccagatgaggttaaatatatcgctttggtagacgaggcaagagcaggcttttgaggatctagggaaaaactccgggttgaatctggtggggttagaatgggtcccctagccctcttccttgatgtgagcagtagttatagaggttcaattttacttgagagatagctgggcaaagctaagtcataggacnnnn

SEQ ID NO: 21529 - DNA, 1480 bp, Homo sapiens
  misc_feature 1: n = A,T,C or G
naccccgcgtccggcctggttcccacttttacattgaatcctggttcccccgaaagagggaaataccatggtgttacctgaaaggagttctgatccagaccccaagagagggttcttggatctggctgaagaaagaagttgaggcaaatccatagggtaaaatgaaagcaaaggaataaaagaatggctactccataggcagagcagcagtgtgggctgctggactaaggatacttacagttatttcttgattatattctaaacaaggggtggattattagtgagttttctgggaaagaggtgggcaattcccagaactgagggttcctcccctttttagaccatatagggtgacttcctgatgttgccatggcatttgtaaactgtcatggcgctagtgggagtgtcttttagcatgctaatgcatgagcagtgaggatgacccgaggtcatttttgttaccatcttggttttggtgggttttggctggttttggccggcttctttaccacttctttttatcagcaaggtctttgtgacctgtacttagtgccgacttcctgtctcatcctgtgagtaagaatgcctaatctctcaggaatgcagcccagtaggtctcaaccttattttacccagcccccattcaagatggagtgactctggttcaaatgcctctgacacatgtgcctcatgtttgggcatgagacctcactgtgtaggtgcagagaagaccctgcctaaacattgcctacacgttgctcctttttcctgcctcaacttccttaaaatgacaagagcagagcccttttgggagctaacatcaggactccttttctgtactctgctccgttgtgctgctagagccacaagcctattaaactttgcctgaaataaattcctatttgcgctggtgttaatttttacttatgagtgagccaagaactcaggccagagttgcggtaacaccaccagaagaggtctccgcttgtcagacttgagggatatcatcaatgagcctctgagctaatggtgtaaaccaaaaataaaattctaagccccccgccagccaaaccatctgaatggacttcctcctcagccagggtgctcttaaaatttaacctgagagactggttcaggtcatgatgggaagtaggggttggacatgcctcattatacctctccagcattaacatcaacataaaccctaagtctaagaaatttttacaacctattctctctgaagctgactaccttggaggcttcatctgtttcataaaattttggtctccacaacctcttacttcaacccagatatttcctttctattgatcccaggtctttagataaacttaaccaattgtcaaccaaaaaatttttaaatctgcctataaactggaagctccgcactccgctcccctcccctccccgcccttcgagttgtcctgcctttctggacagaaccaatgtatttcttaaatgt

SEQ ID NO: 21530 - DNA, 906 bp, Homo sapiens
  misc_feature 126, 127, 128, 129, 130, 131, 132, 133, 134, 135, 136, 137,138, 139, 140, 141, 142, 143, 144, 145, 146, 147, 148, 149,150, 151, 152, 153, 154, 155, 156, 157, 158, 905, 906: n = A,T,C or G
acacacactggggccttctcgaccccatcccctgacaagccagccttttttttttctgtttctttggttgggttgggtttttttccttttaattaattaaatttttattttctttttccttggggnnnnnnnnnnnnnnnnnnnnnnnnnnnnnnnnncaagcttgcttttttgccactgcgcttgcccctgggtgcaaaaactaagcctttgggtttcctgatcattgcaagggtcagtctactggacatatttttttcccttccctatacccacagatgttctggggatcattaatttacttgtgagatgatcagcaggtttaaagtcttttattattgtcgggtcatttgcatacataaataacaggactagcttaaccttaaaccagctctttcccttttctgcttttcttctcatttcacatccctctttagatcattagagctgtgatttagaggttaataagctttctgaactgtacattttcctattttacctactttgagagaacatgaccttgtgatagccaaataaggaaccgatgccagcaaagagtgtgtagtaatgagaaaacgccagatatttagttcttaaaagccattggaggaaatgagtagcataatcagcaacccagactcttcttacagctatttgactatcatagatttgctgactctactagccatagtaattggactccattatttaaactgtctagctatcactaaagttccatgattggtttgtcacatattatttaaaatgtggacaaagtgatataattgacaaagtacaagtttttgagttttgaagtcttttatcatgacctctccagatggactttttctgaatgcaagcttgatttagtcgctcaagtcatcagggaaaatttctataagacnn

SEQ ID NO: 21531 - DNA, 465 bp, Homo sapiens
  misc_feature 449, 450, 451, 452, 453, 454, 455, 456, 457, 458, 459, 460,461, 462, 463, 464, 465: n = A,T,C or G
actttatttttaatcctttctgtaattgtaggatgtagatattatagtcccaatattaggaatgaggaaattgagactcagagaagttaggttacttactccaaagcaccctgctgataagtcgaagaactgcaattaaaacccaggtctgtttggctcccactcctgtgctctggaatgcttaagggattagaaatgtcccaaagagcctaagaatccaaagcagtagtgggtatggaaggttacagcagtgatttcctaaggacctgggttctagccccagacacatggttaaaattttatagcagttgcctgctttttgagtctgacaagcctccattttactgtcaaaaatgtgaaattcataattaggcaataatgtgctgaagcctgattttatttggttattttattcccacccaagtcatcaaaagtgatttattgattannnnnnnnnnnnnnnnn

SEQ ID NO: 21532 - DNA, 4679 bp, Homo sapiens
ccacgcgtccgccggagccgtgtgcgccgggagcgcggaacagcttgtccacccgccggccggaccagaagcctttgggtctgaagtgtctgtgagacctcacagaagagcacccctgggctccacttacctgccccctgctccttcagggacggaggcaatggcggccagcacttccctgcctgaccctggagactttgaccggaacgtgccccggatctgtggggtgtgtggagaccgagccactggctttcacttcaatgctatgacctgtgaaggctgcaaaggcttcttcaggcgaagcatgaagcggaaggcactattcacctgccccttcaacggggactgccgcatcaccaaggacaaccgacgccactgccaggcctgccggctcaaacgctgtgtggacatcggcatgatgaaggagttcattctgacagatgaggaagtgcagaggaagcgggagatgatcctgaagcggaaggaggaggaggccttgaaggacagtctgcggcccaagctgtctgaggagcagcagcgcatcattgccatactgctggacgcccaccataagacctacgaccccacctactccgacttctgccagttccggcctccagttcgtgtgaatgatggtggagggagccatccttccaggcccaactccagacacactcccagcttctctggggactcctcctcctcctgctcagatcactgtatcacctcttcagacatgatggactcgtccagcttctccaatctggatctgagtgaagaagattcagatgacccttctgtgaccctagagctgtcccagctctccatgctgccccacctggctgacctggtcagttacagcatccaaaaggtcattggctttgctaagatgataccaggattcagagacctcacctctgaggaccagatcgtactgctgaagtcaagtgccattgaggtcatcatgttgcgctccaatgagtccttcaccatggacgacatgtcctggacctgtggcaaccaagactacaagtaccgcgtcagtgacgtgaccaaagccggacacagcctggagctgattgagcccctcatcaagttccaggtgggactgaagaagctgaacttgcatgaggaggagcatgtcctgctcatggccatctgcatcgtctccccagatcgtcctggggtgcaggacgccgcgctgattgaggccatccaggaccgcctgtccaacacactgcagacgtacatccgctgccgccacccgcccccgggcagccacctgctctatgccaagatgatccagaagctagccgacctgcgcagcctcaatgaggagcactccaagcagtaccgctgcctctccttccagcctgagtgcagcatgaagctaacgccccttgtgctcgaagtgtttggcaatgagatctcctgactaggacagcctgtggcggtgcctgggtggggctgctcctccagggccacgtgccaggcccggggctggcggctactcagcagccctcctcaccccgtctggggttcagcccctcctctgccacctcccctatccacccagcccattctctctcctgtccaacctaacccctttcctgcgggcttttccccggtcccttgagacctcagccatgaggagttgctgtttgtttgacaaagaaacccaagtgggggcagagggcagaggctggaggcagggccttgcccagagatgcctccaccgctgcctaagtggctgctgactgatgttgagggaacagacaggagaaatgcatccattcctcagggacagagacacctgcacctccccccactgcaggccccgcttgtccagcgcctagtggggtctccctctcctgcctactcacgataaataatcggcccacagctcccaccccacccccttcagtgcccaccaacatcccattgccctggttatattctcacgggcagtagctgtggtgaggtgggttttcttcccatcactggagcaccaggcacgaacccacctgctgagagacccaaggaggaaaaacagacaaaaacagcctcacagaagaatatgacagctgtccctgtcaccaagctcacagttcctcgccctgggtctaaggggttggttgaggtggaagccctccttccacggatccatgtagcaggactgaattgtccccagtttgcagaaaagcacctgccgacctcgtcctcccccgccagtgccttacctcctgcccaggagagccagccctccctgtcctcctcggatcaccgagagtagccgagagcctgctcccccaccccctccccaggggagagggtctggagaagcagtgagccgcatcttctccatctggcagggtgggatggaggagaagaattttcagaccccagcggctgagtcatgatctccctgccgcctcaatgtggttgcaaggccgctgttcacccacagggctaagagctagcgctgccgcaccccagagtgtgggaagggagagcggggcagtctcgggtggctagtcagagagagtgtttgggggttccgtgatgtagggtaaggtgccttcttattctcactccaccacccaaaagtcaaaaggtgcctgtgaggcaggggcggagtgatacaacttcaagtgcatgctctctgcagccagcccagcccagctggtgggaagcgtctgtccgtttactccaaggtggggtctttgtgagagtgagctgtaggtgtgcgggaccggtacagaaaggcgttcttcgaggtggatcacagaggcttcttcagatcagtgcttgagtttggggaatgcggccgcattccctgagtcaccaggaatgttaaagtcagtgggaacgtgactgccccaactcctggaagctgtgtccttgcacctgcatccgtagttccctgaaaacccagagaggaatcagacttcacactgcaagagccttggtgtccacctggccccatgtctctcagaattcttcaggtggaaaaacatctgaaagccacgttccttactgcagaatagcatatatatcgcttaatcttaaatttattagatatgagttgttttcagactcagactccatttgtattatagtctaatatacagggtagcaggtaccactgatttggagatatttatggggggagaacttacattgtgaaacttctgtacattaattattattgctgttgttattttacaagggtctagggagagacccttgtttgattttagctgcagaacgtattggtccagcttgctcttcagtgggagaaaacacttgtaagttgctaaacgagtcaatcccctcattaaggaaaactgacagaggagggcgtgactcacccaagcatatataactagctagaagtgggccaggacaggccgggcgcggtggctcacgcctgtaatcccagcagtttgggaggtcgaggtaggtggatcacctgaggtcgggagttcgagaccaacctgaccaacatggagaaaccctgtctctattaaaaatacaaaaaaaaaaaaaaatagccgggcatggtggcgcaagcctgtaatcccagctactcaggaggctgaggcagaagaattgaacccaggaggtggaggttgcagtgagctgagatcgtgccgttactctccaacctggacaacaagagcgaaactccgtcttagaagtggaccaggacaggaccagattttggagtcatggtccggtgtccttttcactacaccatgtttgagctcagacccccactctcattccccaggtggctgacccagtccctgggggaagccctggatttcagaaagagcaagtctggatctgggaccctttccttccttccctggcttgtaactccaccaacccatcagaaggagaaggaaggagactcacctctgcctcaatgtgaatcagaccctaccccaccacgatgtggccctggcctgctgggctctccacctcagccttggataatgctgttgcctcatctataacatgcatttgtctttgtaatgtcaccaccttcccagctctccctctggccctgccttcttcggggaactcctggaaatatcagttactcagccctgggccccaccacctaggccactcctccaaaggaagtctaggagctgggaggaaaagaaaagaggggaaaatgagtttttatggggctgaacggggagaaaaggtcatcatcgattctactttagaatgagagtgtgaaatagacatttgtaaatgtaaaacttttaaggtatatcattataactgaaggagaaggtgccccaaaatgcaagattttccacaagattcccagagacaggaaaatcctctggctggctaactggaagcatgtaggagaatccaagcgaggtcaacagagaaggcaggaatgtgtggcagatttagtgaaagctagagatatggcagcgaaaggatgtaaacagtgcctgctgaatgatttccaaagagaaaaaaagtttgccagaagtttgtcaagtcaaccaatgtagaaagctttgcttatggtaataaaaatggctcatacttatatagcacttactttgttgcaagtactgctgtaaataaatgctttatgcaaaaaaaaagcggccgcgaattccagcacatggcggccgttactagtg

SEQ ID NO: 21533 - DNA, 593 bp, Homo sapiens
  misc_feature 1, 2, 3, 4, 5, 6, 7, 8, 9, 10, 11, 12, 13, 14, 15, 16, 17,18, 19, 20, 21, 22, 23, 24, 25, 26, 27, 28, 29, 30, 31,32, 33, 34, 35, 36: n = A,T,C or G
nnnnnnnnnnnnnnnnnnnnnnnnnnnnnnnnnnnngtagagacgggtttcacccagggctggtctcgaactcctgggctcacgcgatctgcctgcctcagcatcccaaagtgctaccagcattacaaacatgagccaccatggccagatgatcatttggacttctaagcattagcaaccaaaataaaaaattaattagaaaaacatacacataatttataataaaaataaggaacctaggattaaatataaaataaagatgtataagacctttgtgtagaaaattgtaaaactttattagaaaatgtcaaagaagacttaattaaatgtaaagcttatacactatgttcatggatagaatggctcaatgtcagaatgattttagtgttctcatattgatctatagactcaatacaatactgataaaaattcttaaatgatttttcaaggaaaattgatgtgataatttcaaatttcataaggaagagcaaatgtctaagaataactaagacactcccaaagaataatgcgaactgatttgccctacacagattattataaggccatagtaattaagacagcatgttacttgt

SEQ ID NO: 21534 - DNA, 1020 bp, Homo sapiens
  misc_feature 1020: n = A,T,C or G
atatagggagtcgaccacgcgtccggtttagtccaacaaacagtgacaaattaaagtttcatggtttatgtttttcactgattttaggctaatgcaaattatttttcacttcttagttacaatccagtgatttgggagtaggtaaacatagattaagaagtttgatattaaactttaattattttaaaatttttctctttttacacttgattatttaaagataaagttatttttaaaacatgtactctgacagaaaagacatcttagaaagaaaactagcaaatttatcttccacttttgcatgtgcaaaaattgtctcaacaactagtagtgaaaaagtgttgtgatagaaaggacctctttatatatgcaggacttacttgtgcacaaaagtatgagagaatgtggatgaaacaagacaaactagggtaaaaaaaacctttaaaattcatcacaaataagttaaagcagagttttggtgaaatttgtgaaaattacaaaactgcttgtattgaggaagagcaactacataataactctacaggaagaacaaacttaagtaaataccctctaatttgacaaatgattcacctgattgtcaggaaagtgatgcatctggcatgtctgtctctgtagtagtccagatatttcctgaacaaaaataacccagtctcaaaaatgcctttctttctcattcatactctgggtccccagaatatgcttgccagtcaccttcagagctttatttaaatacaaataaagtagactgtgaaaacgacaacaaaccagatactgaacatgtttttaactcagacaaggaaaatttttataatgatactgaaagtacaaaagcaagaaacccagaagtagctatggatgaaataaaagaagacaaataggttgtgaggcaaatgacaaaaaaacaaaacaccgctaattggaaattaaacattggacatatgcctcaatttagtgattcaaaaagccttttaggtatgtggcttacctgctccaaagaan

SEQ ID NO: 21535 - DNA, 735 bp, Homo sapiens
  misc_feature 1: n = A,T,C or G
nccaggattaccaactaattagaagggtgttactgaaggcatcggatgggagagagtaagtgctggtactgtggttttgaggcagtgtgtgagtctgattttgcctgatgatatcatttgctaaacattatactttgtgtttttgtcacacagataagcctcaagtgcacattcagatgacttatcctctacaaggcttaacccgggaaggggacgcgcttgagttaacatgtgaagccatcgggaagccccagcctgtgatggtaacttgggtgagagtcgatgatgaaatgcctcaacacgccgtactgtctgggcccaaccctgttcatcaataacctaaacaaaacagataatggtacatacccgcctgtgaagcttcaaacatagtggggaaagctcacctcggattatctgctgtatgtatacgatccccccacaactatccctcctcccacaacaaccaccaccaccaccaccaccaccaccaccaccatccttaccatcatcacagacacaacggcgacgacagaaccagcagttcacggccttactcagttgcccaattccgcagaagaactggacagtgaggacctctcagattcccgagcaggtgaagaaggctcgatcagggcagtggatcatgccgtgatcggtggcgtcgtggcggtggtggtgttcgccatgctgtgcttgctcatcattctggggcgctattttgccagacataaaggt

SEQ ID NO: 21536 - DNA, 1294 bp, Homo sapiens
  misc_feature 1, 2, 3, 4, 955, 975, 1035, 1036, 1056, 1057, 1071, 1072,1088, 1089, 1090, 1117, 1118, 1150, 1151, 1227, 1292, 1293,1294: n = A,T,C or G
nnnngtctctggggtatcccagacggcgtggggccatttggctcccaggcctatccggcgtcgcccacagacccgagtgtttgaagctgtgcacaggctccactattgcaaccaatttctagttgtccggaatctcagtagctgccacatgtagttcatcatgagaagtcctgaaatactggctctagagagcgtgttcgacctctcctagttatgaagatatttattctaggatcgtggtcctttccatcaatgcctagagatacgtgctctcctggttcccactttgggtctgaaggatttgtaattattaattctaaagggttgcagcttccacttgtgcaggaggggctgctttctcctgttttggagccaacaagatcttatttcatcttgttgtttccaagtagcccagatgacacacagaccagtattgacacacatttgtacatgaatatgattcatggcagatatacttattttctgctgtgtaactcttttcccatctagagaaccgcatcttcattccttgctgcttactatcaatagtggcacaagtgtcgaattttagggttacatgtttgggggacccctctttcttctgttctagctattacctttacttgtgtcacctagaaaagggccagtccttagtcgtatttcaaataccgtgatcatgggaggcttcagaggggtcataacacgcatcaggctggtcacttcctgggctccatcccccgggtactgagtagctattatacaaacatgttccttttagagtcatggagcttcgtgcccggccgcccgatggaaaagttgaattgatagcaattcctttgtcctacctcagtgacttgatgtatatactggaaacagttctcagtctgaggaaggtcagttgaagtccttactggtgcaagtctaaattttaaggggaaaattagtcccgcgatgnagtttcctcatgccttcagnctgtgcgtggacccagtcatgcttcccgggtggtgaccttggagcagggctttggtcgtnncttcttcagaaagtcacttnntgcaggggttggtnngaagctgctcccattnnncatgtacctcggcccgctcttagaacnntagtggatcccccgggcctgcaggggaattcnngatatcaagcccttatcgataccccgtcgacctcgaggggggggcaccggtaccccagcttttttgttccctttantgaagggtataattgcgccgctttggcgtaatcatgggtcaatagactgtttcctgtgtgaaaannn

SEQ ID NO: 21537 - DNA, 997 bp, Homo sapiens
  misc_feature 995, 996, 997: n = A,T,C or G
actactcgattgtcaacgtcaaggagtcgcaggtcgcctggttctaggaataatgggggaagtatgtaggagttgaagattagtccgccgtagtcggtgtacgctgggaaagcagaaggtcgcgcttggaggaagtggcggctttgagtccggtggcccaatcgctgttactacttctctgaagctcctctcggctgcttgccgagacaccctgccgccaagatgcctcgaattatgatcaaggggggcgtatggaggaataccgaggatgaaattctgaaagcagcggtaatgaaatatgggaaaaatcagtggtctaggattgcctcattgctgcatagaaaatcagcaaagcagtgcaaagccagatggtatgaatggctggatccaagcattaagaagacagaatggtccagagaagaagaggaaaaactcttgcacttggccaagttgatgccaactcagtggaggaccattgctccaatcattggaagaacagcggcccagtgcttagaacactatgaatttcttctggataaagctgcccaaagagacaatgaagaggaaacacagatgatccacgaaaacttaaacctggagaaatttgatccaaatccagaaacaaaaaccagcgcggctgatccaattgatatggatgaggatgaacttgagatgctttctgaaggccagagtccgcttggcttaattactcagggaaagaagggccccgaggaaacgccagagagacacactggcagaagcacgacgtcttgctggccttccaaaaaagagagaacttcgaggcgctggcatagaatccgaagaaaagacaagggacagagcgtgcataaagccgacccaatgtaaaaagctgcctggtttatgataccgaggaactacaggctgagcaatcggatagaacggcctgcgggcaaccaaaaaaaaaaagggcggccgcaatacacggggccacagaagaagcgacgaggcccgannn

SEQ ID NO: 21538 - DNA, 444 bp, Homo sapiens
  misc_feature 1, 2: n = A,T,C or G
nnttatagcctttaacaattgagtatacagaaatgaggcatatttctccctttttgccagatttatccagaattcagaaactttgtgaatgttcttaattcattgcaatgtggttgtttgcaagatcagtaagaatctgttttctcttatatttggaaacaattggaggcactggttattttctaggacttggactaaaatggcatgttttgggatatgagcacacagctttgaggaattcacattgattttatagagccaatgagaaccccttagaaagatgcctcataccttgtctatgcagttcctttgcagggttcctggcctgtggtaagtagagagtcaccttcctggcaggcccaggaaccacaagttcttttggggccttggaaagagaggagttcacccaattcatgtaaatatctgtagacacagatcccgcgc

SEQ ID NO: 21539 - DNA, 1002 bp, Homo sapiens
  misc_feature 1, 2, 1002: n = A,T,C or G
nngctagtacgaggctgcggttaatcggccgaggcagtgtttcagttcgaggagagcagcggcaacagaaccaagtggcagtggacgcaccctcagagcatggggtctattctttccagttcaacaagtaacagtgggattcccctccccatctttactgaatagaaatgaattcttggagatactcatgctcccagattccagagggttaaccaggaatggagaccatccgtcggccctgctaaggactaacacttagccatcgtttttcacaggcctgggcctggaaaaagaaatctctacgttcctgccctttactatgctgatggagcctgggggaaccatcactttttttgtgtgctacattcaaggagatcaaaaaaacttttcttctttgcaaagaaagcttttgtttttaactgcaacgtacttttcccctaccttgaagagacatggtggtcgtagcttctcatctatatgaaaaagttttcgatgtattggaattatttgggaatgcttttaaaacaatttgtaattatttctttacaaaccaaaacagaacagaaaggtgtggtgctggaacatcgatgaaggagccctacttactgagcttagttatggacttttttgatgcatgtgtgtatgtgttttaaaaagtatgcaggctctaaaaatgttattttgtaaagctctcagtcatgcaccccatctcctcttcaccatattatgccttcttttctcttgtccagattcttcttgttctcttttctaaacagctgagctgcctactttgccttttacagcttttaatttatggatttcaaccatgaaattcctgtggactggggttgggggcagctggagggaacagggaactagtagcctggatgtgttttccccccgccaccgggaaactcactggtccacacaggcccgttaagaaccgcgggaccctcacatggaatcccccggaggaatacccgccacggaggacgtcaagan

SEQ ID NO: 21540 - DNA, 2686 bp, Homo sapiens
ctaatcactgtcaatttatagacccctgactttctggaaataaaatgtgtaattaccttttactctgatcataatctcccacctgtctaagaggttatttattccttatttagagggcctctattgccatgtgcctggaattattatatgctcatcactttatgaagaataaaatttgtctttcctgccttaaagttacattcgttcttccgctcaaatcctgatctggtccattaaagagtgttcgcagacaaagtttctgaaagattagagaagaatcccccccaagattgccccaacactgaactacagacaaacactattttatttaaataaggagacagctttctaaaagtatacattctctaataaaaatagtttattattttgaatgatttaatggttttctacacaatttacatcacaacatgtaaattttagcagtaacatctgattctaacagcacatcatgctattcctttcatagagccttcagagattcaatgctaaacaaatttccttagttggcatcaaggcactgatcactttagaggcttttaagaaattatttaaagatgcaaatgcctctgagtgaagtgtactgtactatcccatcactgaagcccacaggaacaagtcctacaattttaaaaaggctcgatggaaaaatttctcaatcctgaaatcccctagggaaggggtcaggagaaagtgccatggttgatatttaagaactccacagctcttaaaaataagcacttatccctaacatgcaatactgcagatgcaagttaaacttatctgttaacagctgcctgctgttttctgctcccagatgaaatgaagcaactcttctgataacgaagagatacctgtctgaggcaaacgaaacattggcacacagcacagcctcctcaatccacttgatcccaactcatctctcatttatttcggcttcttttattccaggattaatgtagtgtaacattttcatttcttttcgcttttattctgcttttgtaaaagcagtattttgagatggacattgcctcttcattgtatttctcatcaattcattatttttgtggttatagcttgacaagcaattaactttaaaatggtagattccgtaactttaaattggtagctttcatttgcttaaaatttttttggcatatgcagataatgttctcatcagtagtaagaatctcagggttatgcttattccccaatggaggtatgacatataatcttttctgcctttacttatcaattcaccaaggagctgttttctctgcatctaggccatcatactgccaggctggttatgactcagaagatgttatctgaaaaaagtctatagaaaaaaaaaaaagtttcccctccctcatcaacaaaagcccaccctctaagagacattcaagctgaactatcacaattcttaatcagttacaatttacaaacagataagtttaaaataaacaatttacaaaatttttgaagcataccttaacatcttgttttgcagttaaacaatggaaaagtatttctcctacactaaaaaaaaacttgcttacacacaactgaaaatagaatcttacttgataatacaaaagctaccatcagaagaaatcccttcaggatcattaagccacttcctttgctctgcagtttctatagtagttttaaattattattaaatcacctgaaaaaaattccaaaagagaaccacacactaccatatccaaacaacttttgcatttcccataattgtagttaatgtcagcccagtaggccagaccaacccccagttcaatactttccttccccaaaagctctatactttgaaggaaaacagatacagtatcaaattatgacactttccttgcccaaattaatgcactggtacacccagtggctcatatttaacttcccccagcttcccaattcaaactggggggaaaaaaactaaatcattgggagttacttgccaacttggaagttgatatttctttactttttccattctaagactttaagttctctggcatgagtttatctgcaatcataaactaaacaattacctaaacccaccccaccaatcccaaccgtaacaggccactgccaactaattgccaatatttgcccctcccctttaataaaacttttaagaagtcacattattggaaaacttaacttcaacatttggcctactcaagctcttctgaagttctcctgagatgactgaatatgaaccaaagctgcactgtgctgtacttttcagcttcaactgggaatactcttccaaggataaaagcagctccagtccctgaaggtgttcgtgccaacagcacagcggtacactccttctctaacccagtttgtcaatagtactatagcatctgtggaaaatcttagaaaaaaacattttctcccccaccctctctcttccctgttaagaccatcccaaaatgcttcaagtaaaaaataacaagtttaaggggttaagcacttttaaagtctgattaagggggtggggggaaaaaaagagtaactaccagccatttctgtcaatggacatctcttcgcacagacctcaacgtgagtactcctctagtttctataaactgtaaacctgtggtggtctgattatcctgatattggattttcttcttttatatacagc

SEQ ID NO: 21541 - DNA, 2187 bp, Homo sapiens
  misc_feature 2187: n = A,T,C or G
gcgtccgtgtatttttagtggagacggaatttcactatgttggtcaggagttttgagaccagcctggccaacatggtaaaatcccgtctctactaaaattataaaaattagccgggcatgatggtgggcacctgtaatcccagctacttgggaggctgaggcaggagaatcacttgaacccaggaggcagaggttgcagtgagccaagattgcacactgcactccagcctgggtgactagcaaaactccatctcaaaaaaaaaaaaaagaaagaaagaaactgaaaagtgaggtgtggaactccaggcaacgacccaagcacttattttttaagagggaaaggactttggtcatgtttacattggcctttggtttttttttttctttcagccacaactatatgctgatataactcagccatcacttttgagttttgtttttaaatgaaggttaaatgtgacctgtgccctcacatttaattccgtttcatggagacatcttcctgactttgttggatagctgccactagggttgcttcgatcttcagccacatgctgtccttgaagcagctatttgaagatgtgttttctgaggaaaacaggctacaactgtttattaaaaccacttgcagtgcattcgtttatcagatgctcagtgcaaagtgtaattgggtcatggtcaaaaacgcttgcaacatctaattggcgttcaagatagtcattcaaaagttcttggcccgctgaagtctgttaacagttgaaacattctacagttaaccattagcatgctagttgtcctaatggaaatttttgaagagtttttcaatatataccctacccttgccaggaagagaagtaaaatcctcaggttgtggggtatttgtttctactccagcctggcaggcaaggctaaaacctgagattatcgatctatgagacatcttgatatgtaaagcacttaatattaaaggcataaaagtgaaactgctaaatatgtatagagaggttgacgtgtgatacgtgggacagttcacatagacatcagagaatttattccagaaaggagcctcctgaatgtgatgaatacggcaaagcctttaatcacatctcagcccttagcataaaaacggccatacgaggactgggtgttgtgaatattatatgtgaggaaaactttcatgtatagcactcattgcttcagacagaaaatgaattccgtcggtatgttccaatcgtgatgaatttgagaaacattgcaagagggagctcaatcttggccgggcgcagtggctcacgcctgtaatcgcagcactttgggaggccgaggcaggcggatcacgaggtcagtagttcgagaccagcctggccaacatggtgaaaccttgtctctactaaaaatacaaaaaaaaattagctgggcacagtggcgcacgcctgtagtcccagctactcgggaggctgaggcaggagaatggcttgaacctgcgaggcggaggttgcagtgagctaagatcatgccactggcactccagccttgagtgacagagcgaggctctgtatcaaaaaaaaaagttgcgggggggtgctcaatcttaactgcagaggatctacagatgaaaaaaaatgtggggaaatgctttaaaaaaatagcaaaatgtgcaacttcttacaaaaattgttaacgttaggtacttctatatattttatatgaccataatgtccgtgtgtgtttggtaccttcagtcccttgttatggttccgtatattacctgtaagcagatactgtattttattttagcctatttgacagaacacatcactcagaaaaagtgaagtttcagagcaaacagtgaagaaatcagtgtgattgtagacaaaaagtcggttcacagaacggagcagcggggagaggaagggaaaagcttcatagttgggtgctatcacatcaagagatggtaaatttctgaggaaagacaggcaatggggcactgaatggacaatctttaaagtgagccttgaatttctcaaacagaatgaccttgagtgcggtccgtgcaggggggtcccggcagaagggtcccgagcagaggaggtgatagccggggcccgcaggttaaggactgtccactattatcaagagagggggggaccccaagggaaacaggccaaggccgggggatggacacgn

SEQ ID NO: 21542 - DNA, 897 bp, Homo sapiens
  misc_feature 885, 886, 887, 888, 889, 890, 891, 892, 893, 894, 895, 896,897: n = A,T,C or G
acgcgggggcaaagcggaaggggcgcgcggataggttctgaatctgtggtgggacctgagattctgcatctcaacaagtcccaatgtgtccagaattggtgggttcttggtctcactgagttctagaatgaagccggcgccccgctcggctgccaggatggaaactaactacctgaagaggtgctttggaaattgcctggcccaggcactggcaagaggtggcgaaggttcggcccagtgacccaatagaatacctggctcactggctttatcattacaggaaaacagcaaaagcaaaagaagagaatagggaaaagaagatccacctgcaggaggaatatgacagtagcctcaaggaaatggaaatgacagaaatgctgaaacaggaagagtatcagattcaacagaactgtgaaaagtgtcacaaggaactgacttctgaaactgtttccacgaagaagaccatattcatgcaggaggacacaaacccccttgagaaggaggccttgaagcaggaattcctgccaggtacttccagtctgattccaggaatgcctcaacaggttcctccttcagagtctgctggccagattgaccagaacttcaaaatgccacaagaaataaattacaaggaggcttttcagcatgaagttgctcatgaaatgcctcctggctccaaatctcctttttaggttacagaaggtagatgcttctgatttacttctctcaaagctagaagccaagaaaatggccagctagaaccaagatttaaggggctgtaaaaggcaagttgagggactctccagcctactccttttctgaaaaacccttaatcatgtgaacatttgaactagttataggataaaataaactcagaataaggannnnnnnnnnnnn

SEQ ID NO: 21543 - DNA, 478 bp, Homo sapiens
  misc_feature 1, 2, 3, 4, 464, 465, 466, 467, 468, 469, 470, 471, 472,473, 474, 475, 476, 477, 478: n = A,T,C or G
nnnnctctctttattcttcataacctgatgcaaagaacagaaaaggggaagatgtgggggattcagtcaggatggtgggagaaattgtaaaattataggaaataatcacaaacacttgtggaaggcctgggggtttgcataaaatgttgggctgaaggcagctgaattctcttaaaagcttagggcatagatacacagaaatgtagtttatctaaatgacttgtttacttatgtggtcctaaaactaacctttgatagtttatgggcaggatagctctctcagggtagggggagggcaaccagattgattacccactgatggtgttgactcaaagccttcgtcatttaatatgtgctgaataaatgccagcagggccagtgagtcagggccacagctgcaactctttacagcactctcctttgagtctgtaagtggcctagaccctcaaccggtctgaacagcnnnnnnnnnnnnnnn

SEQ ID NO: 21544 - DNA, 1262 bp, Homo sapiens
  misc_feature 1252, 1253, 1254, 1255, 1256, 1257, 1258, 1259, 1260, 1261,1262: n = A,T,C or G
acgtcacttgataagctgaaaggggtggatgttgaatatcacctaagtgtcattgcaacctaaagcctgttatcctctttccaatagaaccaaagagaagttggtatgtagcttctcggccttttggctaagattaagagaagttggtatgtagttcagatacttcattttctttaattgcactgacactaaagctttgtatttataactattctggttcttatagactataggttcttggggaaccctcttgttaagagaattttcctggactcaaatatttgattttccatagagaagaaaaattcagttttatttctgtattaaagcatttcagtcccttggccatagtcctcatagtaactgctcaattaatgttttcataatcattgtcataattattgccttcagtctgtataaaatgaagggcttgaagtagctaagatttaccatctttcctggatttccaccagtttctggccaccagaaccatccccagataattccagcgcttctggaatgaatagggtgttgtaagttatgttaaagagtgaatttcattctgacagagataggaagtaagattgttttgagtagagaataacataatgagacttatattttagaataatcactagctcctgtgtagaggggcaaaagctgaggtaagatgagtaattccaagacaatgagaatagttcagggatagatgctactggttggactagagtggtagcagtgggggtggtgggaagaagtcagattctgaatatgtacttaagtagagcctacaagatttactgatggactggatgtgaagtgtgagaaaaagagaagaatcaaagatcaccccaagtttttggcttaggcagctggtaaaatggagatgctgtttacttgagatggaattaaaggtaaggacattttggtgttggtgttggtaatctatagtcttaggacatatactagaataaaatatttacttcctactcgtttttttttttaaactaacatttattctactttttatgaataaattgtatcctttctgaagagctaatgtgtttgggattaattttgctacatggggatgtggtgttttaaggagtaaaacacagtaataacttttggctgggtgtggtggctcacacctgtaatcccagcactttgggaggccaaagtgggttggatcacctgaggtcaggagttcgagaccagcctggccaacatggtgagacttcccccgatctcnnnnnnnnnnn

SEQ ID NO: 21545 - DNA, 1231 bp, Homo sapiens
caggttcactcatttggtgtatgtgcttggctgaggagccaatggggcaaagctcccaatctgtgggattatgactgaacgcctctaagtcagaatcccgcccaggcggaacgatacggcagcaccgcggagcctcggttggcctcggatagccggtcccccgcctgtcaccaccggcgggccgccccccccctccacgcgccccgcgcgcgcgggagggcgcgtgccccaccgcgcgccgggaccggggtccggtgcggagtgcccttcgtcctgggaaacggggcgcggccggaaaggcggccgccccctcgcccgtcacgcaccgcacgttcgtggggaacctggcgctaaaccattcgtagacaaacccttgtgtcgagggctgactttcaatagatcgcagcgagggagctgctctgctacgtacgaaaccccgacccagaagcaggtcttctgaacttttttctgccactgctccctagccctgtttagtttgttattgctgcttttcttttttctttctgtatctatgcctttttttcacagtagtccttggctctgcacggaataaatgataccctcaaatctaattggatgtgctttcgcctttgcatgtaagtacggtagtaagaaacctttgagatctttctgacttttcaaaattagagaaagcaaatgggatggatagatttttttttcttttcaaggggggcaggaaggtaatggtttgagtagcctttgtttaaaaaaaagactaaatatatttaaaaggccacatttatatttttttcacaagaaccacataataaattccacttcttgacctgaatttggaaatccgaaattactaatccaggccaggtgtggtggctcatgcctgtaatcccagcactttgagaggccaaggtgggatgacttgggttgtgttcctggaggtttgaagtgggccttcccgccttttgagggggaaaactgactgttttgaacacatatcctggattagttgggttgttttgtattgaggatccctaaaagacaaaagagtcttggaaaggactgctggcttcgtcttgaacgttcgccccatcaccagtgtgagtccgtggggaagtcttcctcaagtggggttcagtctgtaattttcctgtctgttcttagtttgttctgagttattttggattttgttctttagccaaattaaaggcagtgtggttttaacccgaaaaaa

SEQ ID NO: 21546 - DNA, 1342 bp, Homo sapiens
  misc_feature 1, 1265, 1330, 1340, 1341, 1342: n = A,T,C or G
ngtcagtggggtatcaagccgccaaacctgatgccctcaccaagttggaacaaggagaaccactatggacactagaagatgaaatccacagtccagcccacccagaaattgagaaagctgatgatcatctgcagcagcccttgcaaaaccaaaaaatactgaagaggacgggacaacgctatgaacacggaagaactttgaaatcatatttaggtttaaccaaccagagcagaagatacaacagaaaggagcctgctgagtttaatggagatggagcttttctccatgataatcatgaacaaatgcctacggaaattgaattccctgaaagtagaaaacccatcagcaccaagtcacaattccttaaacatcagcaaacacacaacatagagaaagcccatgaatgcactgactgtgggaaagctttcctcaagaagtctcagctcactgagcataagagaattcatacaggaaagaaaccccacgtgtgtagcttgtgtgggaaagccttctacaagaagtacaggctcactgaacacgagagagctcacagaggagagataccccacgggtgttagcttgtgtggggaaagccttctacaagaggtacaggctcactgaacacgagagagctcacaaaggagagaaaccatacgggtgcagtgaatgtgggaaagccttccccaggaaatctgagcttactgaacatcaaaggattcacacgggaattaagccccatcaatgcagcgaatgtgggagagctttctccagaaaatcactactcgttgtacttctttttataggactggaaggaaaagtatataaaccgtgattattcaaagattttcactgaaaatatagttgaacaggtttgtattaatgattacaaagtatagaaaattttgctgttattttccagaagaaatattattaatactactttcacagaagatgtgaaagtggagaaactaccttttaggtaaaatttatttgactcaattactgattaaatagcattaaggaacatacagttgtaaaatgtagaacatagaaattaacattttaaaagcatgcctttttaaaaagcatgctcctatgtgtcatagctttctgaaaccactaaaaatagaaactgttgacagatctctgatgtagaactcttgcagtgaaagcttatctttggaagaaactgggctgtctttctggaagagtcttttctcagagacatctttgaaacatgaattctcttttagcttagtgttcanaactattgttaatacctaatttttgagaatgtaagatgtcatcaattctgaggtgcaccattatntatgtaccannn

SEQ ID NO: 21547 - DNA, 388 bp, Homo sapiens
  misc_feature 310, 311, 381, 382, 383, 384, 385, 386, 387, 388: n = A,T,C or G
acatgtgcacattgtgcaggttagatacatatgtatacatgtgccatgctggtgcgctgcacccactaactcgtcatctagcattacccgcgtacaaaggcagggagtcctggaaggagttttagctgatgatgacaagttcagtgaaactgtcatagagtgctttgagactagagagagtgctagtgctctaaagtgcttagagactagtagagttacacataaaagaacacagtgtgttccaggaactgcagttgtttctctaccctttttcactcagtccctttttcttttgatgaatggcacagannaaaaaaaaaaaaaattttcctgcccgggggggccttaaaaaggggaaattcgccccccttggggggccannnnnnnn

SEQ ID NO: 21548 - DNA, 7764 bp, Homo sapiens
  misc_feature 1, 2, 3, 4, 5, 6, 7, 7755, 7756, 7757, 7758, 7759, 7760,7761, 7762, 7763, 7764: n = A,T,C or G
nnnnnnnatggaggatctgtctctctctctctctctcctttttttttttttggtggagatgaaggggtgggtctatggtacatcacctgagttgtggggtaaatgtagagagtgtcaatcaaaggcagagctctcagagctgggaaggaggctctagatggcggctgtgccttagagagagcgcgctctgctccctgcctttgcctcactttacgcaactttccctaactttcgggcagcctcagggggcccccgtagccccctgcctttcctagggacttactggggtcgattcgaacctttttttgggagaaaagcagcttttaggagctttcttttcgtgccttgttggaaagaagcagccgtactgagagcccaggtcgttgttttttccagcttagaagccatggcgcacctccatttttgtgcgctctcctaatgaggttttttttctttcggacctgttttagtattaattattgctttatttttttgaccagttaacatatttgagggttattttatttatttttcgttttttaacggaggattttgcctttatttttaattatttgggatctgatatttttctactagtagataggactcttggtttggacatactacatggatcagtaaatacctgggcacaggacttcaaagcaaacacagattccccctcccccttaatatttaagaattaaaagatgatgagaaataaggacaaaagccaagaggaggacagttcgctacacagcaatgcatcgagtcactcagcctctgaagaagcttcgggttcagactcaggcagtcagtcggaaagtgagcagggaagtgatccaggaagtggacatggcagcgagtcgaacagcagctctgaatcttctgagagtcagtcggaatctgagagcgaatcagcaggttccaaatcccagccagtcctcccagaagccaaagagaagccagcctctaagaaggaacggatagctgatgtgaagaagatgtgggaagaatatcctgatgtttatggggtcaggcggtcaaaccgaagcagacaagaaccatcgcgatttaatattaaggaagaggcaagtagcgggtctgagagtgggagcccaaaaagaagaggccagaggcagctgaaaaaacaagaaaaatggaaacaggaaccctcagaagatgaacaggaacaaggcaccagtgcagagagtgagccagaacaaaaaaaagtaaaagccagaagacctgtccccagaagaacagtgcccaaacctcgtgttaaaaagcagccgaagactcagcgtggaaagagaaaaaagcaagattcttctgatgaggatgatgatgatgacgaagctcccaaaaggcagactcgtcgaagagcggctaaaaacgttagttacaaagaagatgatgactttgagactgactcagatgatctcattgaaatgactggagaaggagttgatgaacagcaagataatagtgaaactattgaaaaggtcttagattcaagactgggaaagaaaggagccactggagcatctactactgtatatgcgattgaagctaatggcgaccctagtggtgactttgacactgaaaaggatgaaggtgaaatccagtacctcatcaagtggaagggttggtcttacatccacagcacatgggagagtgaagaatccttacagcaacagaaagtgaagggcctaaaaaaactagagaacttcaagaaaaaagaggacgaaatcaaacaatggttagggaaagtttctcctgaagatgtagaatatttcaattgccaacaggagctggcttcagagttgaataaacagtatcagatagtagaaagagtaatagctgtgaagacaagtaaatctacattgggtcaaacagattttccagctcatagtcggaagccggcaccctcaaatgagcccgaatatctatgtaaatggatgggactcccctattcagagtgtagctgggaagatgaagccctcattggaaagaaattccagaattgcattgacagcttccacagtaggaacaactcaaaaaccatcccaacaagagaatgcaaggccctgaagcagagaccacgatttgtagctttaaagaaacaacctgcatatttaggaggggagaatctggaacttcgagattatcagctagaaggtctaaactggctagctcattcctggtgcaaaaataatagtgtaatccttgctgatgaaatgggcctaggaaagaccatccagaccatatcattcctctcctacctgttccaccaacaccagctgtatggcccctttcttatagtcgtccctttatccaccctcacctcatggcagagagagtttgaaatctgggcaccagagattaacgtagtggtttacataggtgacctgatgagcagaaatacgatacgggaatatgaatggattcattcccaaaccaaaagattgaagttcaacgcacttataacaacatatgagatcctcttgaaagataagactgtgctgggcagtattaactgggcctttctgggagtggatgaagcccatcggttgaagaatgatgactctttattgtataaaactctgattgatttcaagtccaaccataggctcctgattacggggacccctcttcagaattccctcaaagagctctggtccttgctgcactttattatgccggagaagtttgaattttgggaagattttgaagaagaccatgggaaggggagagagaatggctaccagagtcttcataaggtgctagagcctttccttctccggagagtcaaaaaagatgtggagaaatcccttcctgctaaagtggaacagattctcagggtggagatgtcagcccttcagaaacagtattacaagtggattctgaccaggaattacaaggctcttgccaaaggaacaagaggcagcacatctggttttcttaatattgtgatggaactgaaaaaatgttgcaaccactgctatctgattaaaccccctgaagaaaatgaaagggaaaatggacaggagattcttctgtccctcataaggagcagtgggaagttgattttattagacaaactgttgacaagacttcgagaaagggggaatcgagtgcttatcttctctcagatggtgagaatgttggatatcctggctgaatacctaactattaaacactatcctttccagcgtctggatggttccatcaagggagaaatccgaaaacaggcactggaccacttcaatgcagatgggtctgaggacttctgtttcctgctctcgacaagggctggtggcctgggaatcaatttggcttcagcggacacagtcgtcatctttgactctgactggaacccccagaatgacttgcaggcacaagcccgagcgcatagaattggtcagaagaagcaggtaaatatttaccgcttagttacaaaggggactgtggaggaggagatcatagaacgggccaaaaagaagatggtattagatcatctggtgattcagcgcatggacaccactggccggacgatcctggaaaacaactcaggaaggtccaactcaaatccttttaataaagaagagctgacagctattttgaaatttggagcagaggatctcttcaaagaactggaaggggaggaatcagaacctcaggaaatggatatagatgaaattttgcggttggctgaaacgagagagaatgaagtgtcaacaagtgcaacagatgaacttctatcacagtttaaggttgccaactttgcaacaatggaagatgaagaagagctagaagagcgtcctcacaaggactgggatgagatcattccagaggaacaaaggaaaaaagtagaggaggaagagcggcagaaggagctagaagaaatttatatgctgcctcgaattcggagttccactaaaaaggctcagacaaatgacagtgactctgacactgagtctaagaggcaggcccagagatcctctgcttctgagagtgaaacggaagactctgatgatgacaagaagccaaagcgcagagggcgtccgaggagtgtgcggaaggacctcgtggagggatttactgatgcagagatccgaaggttcatcaaggcttataagaagtttggtctccctcttgaacggctggagtgcatagcacgtgatgctgagctggtagataagtcggtggcagatctgaagcgcctgggtgaactgatccacaacagctgtgtgtcagcaatgcaggaatacgaagagcagctgaaagaaaatgccagcgagggaaaaggaccagggaaaaggagaggtccaacaatcaagatatccggagttcaggttaatgtgaaatccattatccaacatgaagaggagtttgagatgctgcataaatctatccctgtggaccctgaagaaaaaaaaaaatactgcttaacctgtcgtgtcaaagctgcacattttgatgtagagtggggggtggaagatgattctcgcctgttgctggggatttatgaacatggctatggaaactgggagttaattaaaacagacccagagcttaaattaactgacaaaattctgccggtggagacagataaaaagcctcaggggaagcagctacagacccgagcggattacttgttgaagctgctcagaaagggtctggagaagaagggggctgtgacaggtggggaagaggccaaattaaagaagcggaagcctcgggtaaagaaggaaaacaaagtgcccaggctgaaagaggagcatggaattgagctttcatctcctaggcattcagataatccatcagaagagggagaagtgaaagatgatggcttggaaaaaagtccaatgaaaaaaaaacagaagaagaaagagaacaaggagaacaaggagaaacaaatgagttctaggaaagacaaagaaggggacaaggaaagaaagaagtcaaaagataagaaagagaagcctaaaagtggtgatgccaaatcttcgagtaaatcaaagcgatctcagggtcctgtccatattacagcaggaagtgaacctgtccccattggagaggatgaggatgatgatctggaccaggagacattcagcatatgtaaggagaggatgaggcccgtgaaaaaggcactgaaacagctcgacaaacctgacaaggggctcaacgtgcaagaacagctggaacacacccggaactgcctgctgaaaatcggagaccggatagccgagtgccttaaagcctactcagatcaggagcacatcaaactctggaggaggaacctatggatttttgtttccaagtttacagaatttgatgctcgaaaactgcataagttatacaagatggctcataagaaaaggtctcaagaagaagaggagcaaaagaagaaagacgacgtgactgggggtaagaaaccatttcgtccagaggcctcaggctccagccgggactctctgatatctcagtcccatacctcacacaaccttcaccctcagaagcctcatttgcctgcctcccatggcccacagatgcatggacacccaagagataactacaatcaccccaacaagagacacttcagtaatgcagatcgaggagactggcagagggaaagaaagttcaactatggtggtggcaacaacaatccaccatggggaagcgacaggcaccatcagtatgagcagcactggtacaaggaccaccattatggggaccggcgacatatggatgcccaccgttccggaagctatcgacccaacaacatgtccagaaagaggccttatgaccagtacagcagtgaccgagaccaccggggacacagagattattatgacaggtatgcaaaaggctgtgagacaccaggtgccaacctttgccaggagctgtttctagggagaaagtgacgtatacatgaatgtatttatctatcaaattactgaagatctcatcatgcatgtgtcagccacagcgaatcccatgtcttggttataggttttatgttttgttttctgggtcatagggagcacatttcacctgtgcaggaaaagagttttctgccgtcttttgaggaaatctagtgaagaggtcgccataaaatattagagtcaacaaccaaaattattaagctctgtgcgaggctgtcagccacactaggtatcagggatcccgagatgggtaccagcccacagtccttacctgccacgagcccataattgaagagtcaaagtcttctgaagctgcaccctctttacttcagtacaatgccaccagtagtacgatgagccaaagctttacattgtgagagtagcaagtccagggagagctaaagaggttttatctgtatttcctaatttcaaatcttggataatttaacctcatagcagctttggttttccctgggctgatgatgtgcgtcatttgcactgtaccttgaatttacagtgggaaaatttcatataaacgtgtcaaagtcgtgctttgtttttggaagatctggtaacagcagcccgcattagcagagagctgtagctgagtagctgccacctcgttgggagactgcccctcgctcccacccttctctattgtctggacccagtgggcatcttgccctgcgttcttctagtaggtctgtatttctatttgatgtcactttccttttgcctgaaggactttttctgctggtgataaactctttcagtgtttgtatatatgcctgaaaaagtattttgccttcatttttgaaagtagtttttgctgagtgtatacatttttggctttacagtttctttcagtgctttaaagatgtacctctgctatttacttgcattgttttgtgatgaaaaatctgtcatccttatctttgttcctctttacataatgttccttttaaaaaaaatcactgattatgatgtgccttggtgtatttttccttggtttcttgtgcttggaaatttttgaacttcttggatctgtgggtttattgtttccataaaatttggaaatttttacaatcttcttcaaatattttttctgatcccccactctctcttcttctttggagattctcattacacctatattagcttgcttgaagttgtctcacagctcacttgtattctgttgacttttaaaaaattatgctttctgtttcactgtggatagtttctattgctacctcttcaagttcactaatactttccttttcaatgtcaagactgctgtgaggcccatccagtgtactttgcattttatacattgtagttctaaaagttcggaaagttgtttttgggtctttttatatatgttctgtgtctaaccttttaaaacctggaacacagatataacaatggttttgatgtccttgtctgcgaatcttatcacttgggtcagtttcagttgatacctcctcactgtgggtcttgctcccctggtgctttctgtgcctagtaatttttgtcagatgccagatgtaacatttaccttgttgggtgctggatatttctgtattcctgtaagtattctggagctttgttatgagttgcaggttatttggaagcagtttcctttttcaggtcttgctgttaagattcgttaggtagaaccagagcagtgctcagtcaagggctaatgattgcccacccccaaggtaaagagcctcattgcactctacccaattgcgttagtctgttttgcaggaatacctgaggctgggtaatttatagagaaaagagnnnnnnnnnn

SEQ ID NO: 21549 - DNA, 1842 bp, Homo sapiens
  misc_feature 1, 2, 3, 4, 5, 6, 7, 8, 9, 10, 1841, 1842: n = A,T,C or G
nnnnnnnnnnctaaacagtttttcataatgacggataggtgtatgtttctgaaatataaggcaaaattgttaaaggcatctcaaatgtcctggaaagtatatagatctttttttaaaaaagaaaggttgtggtagtttattagagaaaaaaatgactttgattctttaaactagtcttgagtatacctaaattttacagtatataggcatgaacaaagaaattgattagattatgtatttttctaagagacagaattacaaaaagtaaaagtgattgctaggtatacatttgcttatttttcaacatttttctttggtagacaaaaacattttgtatttcaaatgtgtccaagatattgctatcatttatacaaacggatcaaaacaaaaagtacagtaaacacacatatcctaattgcttcaaaacatctcaatgaataaaagttgaaaaacatcaaattaagaccggtgctgctaatttggttatgaaatatgtgcactgttgccagtatcccatagcgtataatttttttcatagtacattttatgaattacatttaatgaattggttataaaacaaaccaaatgatgcataagaatgtttccctacatattgatgtgctacatgatatttggggaaagaagtgtgtatttgcatgaaaaaatgtttgaggaatgctttacgacacatagatgcttttgacttataagggcttgactccagtaataatgtcaatgtctccactgtaaccacagatagtaatatagcataaagatcaatacagacagataacttctagagacagaaatgttctcatagtcacaacagaatagttgtaagcatcaaatctagaaggttctctagcctagaaatgcatgaatgtataatacaacaagtaagaacgtgaaagcactttgtaaactccgatggtaaccagcctttcttaaggtagcttttcctagaaatccatttaattgttggactcctttgggcagtggaattctgattgtcattcattcaggaagactgtatttctgtttttggtcctttcacccacctttcatccttcacataactgtacaaaagttgaaagtcacaaaaccatagaaaagtctcagtttcctactgtagaattcttgtcatttcagtagtcacagttaaacttgttctaggtttttcagatgcccttttccaggacttcatatgttttgatatttttaaaaattctttctttcaacttttttgattataagccttgcttgcttcgatttgggatttaggcatcgttgtcctttattttctttcagggtaataatcacttctattttgtcacagttgttacttgggtacattatggaggctttctcaatatctgccactttcactgcttttaccccagggcctatgcaaagacagcgtcctcttttgaacatggggaagccttgaacaactgtagcacacaatatcacagccaaggctatagccatgcccttcacactcatgtttgttttttgctgttgctgctggtgctgttgctgctacttcagctttgctgctcttcttggaaggagtagaaatgctgaacatgaaaggaaattgataattggcatatatccccgcgatggtcttactgctcggcgataggcgaaagtcccttcgtggttgccaagatgtgtccggaattggtgggttcttggtctcgctgacttcaagaatgaagccacggaccctcacggtgagtgttacagctcttaaggtggcgcgtctggagtttgttccttctgatgtttggatgtgttcagagtttgttccttctggtgggttcgtggtctcactggcnn

SEQ ID NO: 21550 - DNA, 4600 bp, Homo sapiens
  misc_feature 1, 2, 4220, 4224: n = A,T,C or G
nngcctggaggtagcctggcagccgctgaacggcgcggctctcaacgtgacggggaagtagttcggctgcccgcggcttactaccccagggcgaacggacggacgacggaggcgggagccggtagccgagccgggcgacctagagaacgagcgggtcaggctcagcgtcggccactctgtcggtccgctgaatgaagtgcccgcccctctgagcccggagcccggcgctttccccgcaagatggacggtttcgccggcagtctcgatgatagtatttctgctgcaagtacttctgatgttcaagatcgcctgtcagctcttgagtcacgagttcagcaacaagaagatgaaatcactgtgctaaaggcggctttggctgatgttttgaggcgtcttgcaatctctgaagatcatgtggcctcagtgaaaaaatcagtctcaagtaaaggccaaccaagccctcgagcagttattcccatgtcctgtataaccaatggaagtggtgcaaacagaaaaccaagtcataccagtgctgtctcaattgcaggaaaagaaactctttcatctgctgctaaaagtggtacagaaaaaaagaaagaaaaaccacaaggacagagagaaaaaaaagaggaatctcattctaatgatcaaagtccacaaattcgagcatcaccttctccccagccctcttcacaacctctccaaatacacagacaaactccagaaagcaagaatgctactcccaccaaaagcataaaacgaccatcaccagctgaaaagtcacataattcttgggaaaattcagatgatagccgtaataaattgtcgaaaataccttcaacacccaaattaataccaaaagttaccaaaactgcagacaagcataaagatgtcatcatcaaccaagaaggagaatatattaaaatgtttatgcgcggtcggccaattaccatgttcattccttccgatgttgacaactatgatgacatcagaacggaactgcctcctgagaagctcaaactggagtgggcatatggttatcgaggaaaggactgtagagctaatgtttaccttcttccgaccggggaaatagtttatttcattgcatcagtagtagtactatttaattatgaggagagaactcagcgacactacctgggccatacagactgtgtgaaatgccttgctatacatcctgacaaaattaggattgcaactggacagatagctggcgtggataaagatggaaggcctctacaaccccacgtcagagtgtgggattctgttactctatccacactgcagattattggacttggcacttttgagcgtggagtaggatgcctggatttttcaaaagcagattcaggtgttcatttatgtattattgatgactccaatgagcatatgcttactgtatgggactggcagaggaaagcaaaaggagcagaaataaagacaacaaatgaagttgttttggctgtggagtttcacccaacagatgcaaataccataattacatgcggtaaatctcatattttcttctggacctggagcggcaattcactaacaagaaaacagggaatttttgggaaatatgaaaagccaaaatttgtgcagtgtttagcattcttggggaatggagatgttcttactggagactcaggtggagtcatgcttatatggagcaaaactactgtagagcccacacctgggaaaggacctaaaggtgtatatcaaatcagcaaacaaatcaaagctcatgatggcagtgtgttcacactttgtcagatgagaaatgggatgttattaactggaggagggaaagacagaaaaataattctgtgggatcatgatctgaatcctgaaagagaaatagaggttcctgatcagtatggcacaatcagagctgtagcagaaggaaaggcagatcaatttttagtaggcacatcacgaaactttattttacgaggaacatttaatgatggcttccaaatagaagtacagggtcatacagatgagctttggggtcttgccacacatcccttcaaagatttgctcttgacatgtgctcaggacaggcaggtgtgcctgtggaactcaatggaacacaggctggaatggaccaggctggtagatgaaccaggacactgtgcagattttcatccaagtggcacagtggtggccataggaacgcactcaggcaggtggtttgttctggatgcagaaaccagagatctagtttctatccacacagacgggaatgaacagctctctgtgatgcgctactcaatagatggtaccttcctggctgtaggatctcatgacaactttatttacctctatgtagtctctgaaaatggaagaaaatatagcagatatggaaggtgcactggacattccagctacatcacacaccttgactggtccccagacaacaagtatataatgtctaactcgggagactatgaaatattgtactgggacattccaaatggctgcaaactaatcaggaatcgatcggattgtaaggacattgattggacgacatatacctgtgtgctaggatttcaagtatttggtgtctggccagaaggatctgatgggacagatatcaatgcactggtgcgatcccacaatagaaaggtgatagctgttgccgatgacttttgtaaagtccatctgtttcagtatccctgctccaaagcaaaggctcccagtcacaagtacagtgcccacagcagccatgtcaccaatgtcagttttactcacaatgacagtcacctgatatcaactggtggaaaagacatgagcatcattcagtggaaacttgtggaaaagttatctttgcctcagaatgagactgtagcggatactactctaaccaaagcccccgtctcttccactgaaagtgtcatccaatctaatactcccacaccgcctccttctcagcccttaaatgagacagctgaagaggaaagtagaataagcagttctcccacacttctggagaacagcctggaacaaactgtggagccaagtgaagaccacagcgaggaggagagtgaagagggcagcggagaccttggtgagcctctttatgaagagccatgcaacgagataagcaaggagcaggccaaagccacccttctggaggaccagcaagacccttcgccctcgtcctaacaccctggcttcagtgcaactcttttccttcagctgcatgtgattttgtgataaagttcaggtaacaggatgggcagtgatggagaatcactgttgattgagattttggtttccatgtgatttgttttcttcaatagtcttattttcagtctctcaaatacagccaacttaaagttttagtttggtgtttattgaaaattaaccaaacttaatactaggagaagactgaatcattaatgatgtctcacaaattactgtgtacctaagtggtgtgatgtaaatactggaaacaaaaacagcagttgcattgattttgaaaacaaacccccttgttatctgaacatgttttcttcaggaacaaccagaggtatcacaaacactgttactcatctactggctcagactgtactacttttttttttttttttcctgaaaaagaaaccagaaaaaaatgtactcttactgagataccctctcaccccaaatgtgtaatggaaaatttttaattaagaaaaacttcagttttgccaagtgcaatggtgttgccttctttaaaaaatgccgttttcttacactaccagtggatgtccagacatgctcttagtctactagagaggtgctgccttttctaagtcataatgaggaacagtcccttaatttcttgtgtgcaactcgacggtttcgccggcagtctcgatgatagtatttctgctgcaagtacttctgatgttcaagatcgcctgtcagctcttgagtcacgagttcagcaacaagaagatgaaatcactgtgctaaaggcggctttggctgatgttttgaggcgtcttgcaatctctgaagatcatgtggcctcagtgaaaaaatcagtctcaagtaaaggccaaccaagccctcgagcagttattcccatgtcctgtataaccaatggaagtggtgcaaacagaaaaccaagtcataccagtgctgtctcaattgcaggaaaagaaactctttcatctgctgctaaaagtggtacagaaaaaaagaaagaaaanccgncaagacagagagaaaaaaaagaggaatctcattctaatgatcaaagtccacaaattcgagcatcaccccttctccccagccctcttcacaacctctccaaatacacagacaaactccagaaagcaagaatgctactcccaccaaaaggttttaactggccccaagtacagagctagggaatggttgtaatgatacctaaattctgtgacttgggaaaaagttagctatccaaggattctgagagaaaaagctggtggctttatttttcccttcttcattgcttataatttatgctttatagcccattggggaataaagaattaaggtcacaatttctcagttaaaactggaaaaaaaaaaaaaaacggacgcgtgg

SEQ ID NO: 21551 - DNA, 235 bp, Homo sapiens
  misc_feature 234, 235: n = A,T,C or G
acacgcctgcccttcggctgtgggtgtgtgtggaaggccagccctcaccactcatgccactctgattgggcgccaggtcagctatcaccacggcaaccacgcagaccctgaggagcgggactgccccacagcacgcacagacatcgcagacgtccagatcctgagcagctttgccagagatcacttacctgatctgaagcccgagcctgctgtcattgagagctgcatgtaccnn

SEQ ID NO: 21552 - DNA, 2332 bp, Homo sapiens
  misc_feature 1, 2, 2147, 2148, 2326, 2327, 2328, 2329, 2330, 2331, 2332: n = A,T,C or G
nncgacccacgcgtccgcccacgcgtccgcccacgcgtccgggtttttttttcttaaaaataaaaaaaaaatatataaatgtaacatgttttcattccaaactggtagtggtatatagaattaaagataataatgttgcttcttattcaaactgttggtcatatgtacagtatataaacataaaacacacaaggaaggtattatgtatgcagtagtatactagagtttaggaaaatgaaaattttagaaaatatgttttgtcaccctgttggtcagaaagatgtctttctggttttaacgcatgcaggcatgtaaatatttgtctggagtcacagtattaatgaatgagatcttaagcatctggtgacatcagaactctgtgtcagccacttttatttgtatattgaaccctagctagtgccccaagctgcactattgggaatggattgtggctgaacagcaaatcaaaacaccagaaatatttttatatgttaacgtcatattatgttaatgttgctgaaaacaaaacctaacaaaccttgatgtaccagtccaataccatgtagcgctgagtgataaagttaaaatgtgctgtgcttcccacccttgtcagagggaagggtggctatgtgttattttcactgtctttttgaaagttacagtatgtgttttcactttcgtgcagataactggaagtaaagcggcaaacagtgcttattacatgctaaagttaccttctctttgttttttgcatatctggaattacacctttaaagactgatatgaatcagtacggtcactatacattttatgatttttctgtcatcttaaaattgtatgatcgtaacattatttattaccacaaaacagcaaaatcttcaatgtctaagaaaactagcttaaaatgtttaaatatagttctgattgggtattaattacttgattaagaaaaaattaacattatagatactctggcattacgcttctataccttttaggtcttccttgcaatactggaacataattcttttgtgtagctcactattagccagctaagttcatctttttaataccataaaaaggttatatgtacagttcctattttagcttgcttacaaagggagcattatttttatttaaagtattgctagtaaatgatttgtagaaacttggttttctaagcatagttcttccataaccaccttttgttgtttgagcacaagggattcttttcctagttctatgtgtttgtttccctatatgcagtctttaaaggattacaacacttaaaattgaatggacttgtgtcaagctttttgcatcatacattttttgaaagatttttaaaaaagcctacaacttacatatgtagtagaatcagccattgctctgctcctggcatagagtcacctgttatgtggattaaatagttttaaaatacatatttgaagacctttgagaatgctttagtgtttgatttgaaataaaaggaaattttagcaaggattaaagaaaaaagctatcagctgtatgttaagagagactcttactaacatgttgtaaatattacaattcatgaaatgttattgtaagtctgtaacttaattttttccctgttttagttatacaggttggtttggaaatttgtgttttggcataaacaagtaaaatgtgcccattttatggtttccatgcttttgtaatcctaaaaatattaatgtctagttgttctatattataaccacatttgcgctctatgcaagcccttggaacagaacatactcatcttcatgtaggacctatgaaaattgtctatttttatctatatatttaaagttttctaaaaatgataaaaggttattacgaattttgttgtacaaaatctgtacaaaaatctgtttttacatcataatgcaagaattggaaatttttctatggtagcctagttatttgagcctggtttcaatgtgagaaccacgtttactgttattgtatttaattttcttttccttttcaacaatctcctaataaaactgtctgaaatctcaaaaaaaaaaaaaaaaaaaaaaaaaaaaaaaaaaaaaaaaaaaaaaaaaaaaaaaaaaaaaaaaaaaaaaaaaaaaaaaaaaaaaaaaaaaaaaaaaaannggggggggggctttttattttttaaaaaaaaaacccccccccccccccccgggcccggaaaaaaaaaaaagagccccttgggggggtaaacttttttttggcgccttaaaaggggccaaaaaaaaaaatttccccccaaaatttcaaaaaaaaaacatttttttcaccggctttaaannnnnnn

SEQ ID NO: 21553 - DNA, 589 bp, Homo sapiens
  misc_feature 1, 2: n = A,T,C or G
nnctaattgtatattctgattcgggggcgtacatttacaaagggtaactgaaacaagtaagtcattttcgtatgatttagaatttagaacaaatgaaaactgtatagattcccctttaagggaatttgccattgttctacatattttaagataaacttctgttgcatttctgcacagaatagaggctagacagagcacccttatgtgcagaaatgaatagaatgtacttgtgtaatataacgtacttgtgtgtatacttgttccatatactcaggcatttaccttggaaatggcctacactgagccaccgcttgtgaataatattgtctctataggtgtgcaagcatttcctggaagctattgaaaacaacaagtatggctggttttgggtatgccctggagggggtgatatttgcatgtatcgtcatgcacttcctcctggatttgtgttgaaaaaagataaaaagaaagaagagaaagaagatgaaatttcattagaagatctaattgagagagaggtaactggtatccttttcctaccataaaaactgaaagcagtatttattgtgaaattctaatacttaccact

SEQ ID NO: 21554 - DNA, 538 bp, Homo sapiens
  misc_feature 1, 2, 87, 199, 538: n = A,T,C or G
nngcagtattggagtttataaagctgtaatgacagccatgaacacagatgaagcaattatgaacttttatctattgtgaatagatanaaatccaattggaaaatgaggcctaccccactgaacacctgtttatggtcttaattttgccttaacgagacactactgatgtcattcaacacaacaaaaatcaatagtggancaatatggataaacatgttgggtacaaccttttgtcctaagagacagttaacagctgggtttagttttactgggatttactcgaagacttgtaaaagtaaataatggtgcatttaagaatatttgcctgttttgatttagtgagtttggcaggtggcggtggcctttcaatgacatatggctttgaaattacatcaatatatgcatacagtgtgtctgtgcctttagttcatgcatcaagttaattaataaaggacccctggtttaacattttatacgcaaatattccccagtgttggttgaagaaaatacagtgcaaagataaagtaaaaaagagccn

SEQ ID NO: 21555 - DNA, 2853 bp, Homo sapiens
  misc_feature 1, 2852, 2853: n = A,T,C or G
naacgcaaccccccctcgggagaacgggggcaaccaaccccccccgtccacgcggtttaccggccgccacgccgcctccttaggcctatgaaccatgggcagcaagaggactggtgaccgggggacatggtgaggtccagtgtgccaggaacatggtaagtgcccacattgcgggggagggaacaattcagagacaggctcagctggaggccgcacagaggagaaatgtcactctgtcccatcttccctgcattcagctgagctcagaccaagtgagcacctaagaatcatttacccccaaaggatgtttcaagtgagatgcaatgttctctaaccattattctctcagaaattaggggtggcggggcgggaatcaagcagatgtttgaattgcctttcattcctccatagttgtctaattgtctggctcttggtttttatatagcagaaataaaacaaaatggcaataaaccaacctacaacctgtgtacaagatacagcatacaaaactgtcccacggactgggatcaaaagacttctattcctagccctaaattagaggttctgttttggttagggaagtttgttgtaaacagcagctgagaagccatttatttgattttggcaatagagacagacagcaatgcacatacacttatttcattgaactgtaaacggataaggtcaggagaggaaaaaccctactgtttatgtaatagaaccctactaaatggttttggaagggactaaaagttaggtagcagcctactttcctactttccaaggctggaattatatatatattgagtaataaatcaaatattagtaatccatccacttgtttttcagagtccaacaatttgataccaccttcctccctatcccaccctagtcccgttagatttgactgcattaaagtagttgttcaaccaaaacactctgtactgtcgccttcctttagcatttatatgaaaagccaaaaccagagagaaagaatccttacacctcctctccactaaagtatcactgtagagaaaactaagctcagaatatactcaataacataccaaggaaaaaagtgagtgtgactgaggggacccccgtcaccaaccgcagtacgccctgctaaacggtagttatcttcttgtccttggtggcttgcttgatggcagcctgctcgcagatgatctctttgagcctctgcagcctcgtgttctgggtggtcagttcccccaccccagtttggctgcggtgcagcagggtcagagcgtggatgtactccagctccgtgtacttcacaccctggtccaccaccaggttcaggagctcgtcagctgtgttgtaaagcatctcgtagtactgccttgcaaagtccaggtctgcctcccgcgacatggtgatgttggtcaaattctgctgaagaacaaaaatgttcctacacattttcttgatgccagactcactgatgcgcctgaagtactgggcaccattaatgaggatgcaggagatcaggtggcccaggccttcgaagatatactggaacttgtgctgctgaaggctggcgctcatggcctcttcaatggcgctgatatctttgttgagcttgaccaccagggggtcataatccatactttccacattagccacaatggcatagttcccctcctttgcaagagggataagatagtggaaacagtgaaccctcacttccagatgtaagacaagcaagcagcggtcagccatatcctggaacgatttggcaagttcactgagagtctgcatgatctgctctgacactggggggagatccgtgttcgtgtggctgtcttgagcaggagaaagcatctgggatgtagaaagattggagaaagctgactttgttcgacttgccaaccattccaggctttcatgcatgttggccaaggctttgaggtcactgacgtcacgaaggatgtcttgtggagggattaatttatcacccaggttcccaataagaacttcagactccttgccaaaagctgcccttatgaaatcttcttcctcctctctttttggcctcagctgtttgggttgagccatattcatccagtttggtagagatttcaagagtctgctgatatcatcatcttttgcccaggatgcactgatgacaagtttttcttctgactggacaatacccctgtaagctgcagtgcaggtgtccttgtactcctggagcttcacgcacaccatgttgaggaattgatctgaatatgcactcaagtcatgcatcaggttcaggaggtcttgaactgtcttctccacaatgattgtgctctgtaggagaggccgctgcactcccagcaccttcatggtgtctgcgttggccagaatcttcaaagggtcagatgttttagtgactccttcaatctccttgttgatctcagccaagacttgattgagaaagatgtttttgatgtacacggtgagaaactctcgaagaggacactgtttggctgggccaagacccagagcatgctcaatctcctgaataaatcttagtaatgggtggaatatgacggtaatgtttctggctccaggtttgcagacaaattttgttcctccaccttcaattaagttgtcatcaggacccccttgcagttctccactccgactatagagctcccttctctgttctcgcagataggcgctcatactgatggcatgggaggacgattcgaacttgaaaagagaattttttggcctttgaggtttcttcttggcaaaaaaggctgcaaactctcgtccagtgctggcatagcttagttgagctgatggttcagaggccgtacgagtatttttcatatccaagnn

SEQ ID NO: 21556 - DNA, 415 bp, Homo sapiens
  misc_feature 318, 410, 411, 412, 413, 414, 415: n = A,T,C or G
acagtcatgaaattttgtggtcttcctgacatgttcttccggcataacgttgccaccttcagttggaaacgtatccttatctaataattaagccctggagaaaaattaatttatatattttattaattacataaggacattgttattagctaagcagagtaagtaaatcgaaataaaactttaaaaatgcctttatggagagaatgactatctctgaaagcttgtttttaatgatgataaaattcatgatcagaatttgtttctgtttactttaattcaggggtcaaaaactgaaataccatcagaggcccaggaggngtacgttgtaactggcaaatatagtaaattaatttgctctggttgataggtagcaagcagggtttatatacattgtcacctacttttccagnnnnnn

SEQ ID NO: 21557 - DNA, 3731 bp, Homo sapiens
  misc_feature 3721, 3722, 3723, 3724, 3725, 3726, 3727, 3728, 3729, 3730,3731: n = A,T,C or G
acgcggggcccgtgggctacggtatccggaagctacagattcagtgtgtggtgggggacggcaagtcgggggtagcaagatggccgccgctgaggaaggctgtagtgtcggggccgaagcggacagggaattggaggagcttctggaaagtgctcttgatgatttcgataaagccaaaccctccccagcacccccttctaccaccacggcccctgatgcttcggggccccagaagagatcgccaggagacactgccaaagatgccctcttcgcttcccaagagaagtttttccaggaactattcgacagtgaactggcttcccaagccactgcggagttcgagaaggcaatgaaggagttggctgaggaagaaccccacctggtggagcagttccaaaagctctcagaggctgcagggagagtgggcagtgatatgacctcccaacaagaattcacttcttgcctaaaggaaacactaagtggattagccaaaaatgccactgaccttcagaactccagcatgtcggaagaagagctgaccaaggccatggaggggctaggcatggacgaaggggatggggaagggaacatcctccccatcatgcagagtattatgcagaacctactctccaaggatgtgctgtacccatcactgaaggagatcacagaaaagtatccagaatggttgcagagtcatcgggaatctctacctccagagcagtttgaaaaatatcaggagcagcacagcgtcatgtgcaaaatatgtgagcagtttgaggcagagacccccacagacagtgaaaccactcaaaaggctcgttttgagatggtgctggatcttatgcagcagctacaagatttaggccatcctccaaaagagctggctggagagatgcctcctggcctcaactttgacctggatgccctcaatctttcgggcccaccaggtgccagtggtgaacagtgtctgatcatgtgaaacacaacacgttttcctctctgagtcccagctatggggaacatctggagtcagcagaaccattgggacctgaggcaggagtgtcacctgcgggagaagtctgcccgctgccctctgtcatcccattcaagattgtgccataccagctgaggtttttcctctgtctctctaggaatagggtctgtttcacaggccatttctgtgaaccctactccattgtggtttctgccactatcaaagttccagctacctgcaaggtgaaggaaggcatcccttttggggcatgcactttctttcctttctcaaaataatgttatatgtggccacactgatgttcacctttacgtccagggtctttgtgccttgtctctactccctctcttggatctggggaggaggggcagagacctgggactctgtatttctatagttctcctggcagagcctttgagaatggggagaaacagcctgggctggggctacaggtctgtcactatgctctcttgccttcagacagaccattctgaattctctaaagggaaagggcttttgcatctaatcacaatagagttgaaagagaggccttaggattctcctctctctaggtgctgagccctcacctccctgttccaggctgagaactcaaatggttaccctgcttcttcctacaatgctgtgtgatatgggtgaacccagcccctgaccttcctctatcccctgcccatcctcccttttacctcctctcttttttaaacacctgtttatcccaacctttttgagctcaagctgtgataaagaagggcccatcctatttcccctcatctagtccatttacgattctcactgactccccgtcttcctggcagacacaaataaacccagtgtcaggtctaggaaattaatggctattcttccccagatacattctggcttatttgagatacatgattctcttagaatcctgtcccttggttcaggaaagtagcttggaaaaggagtaggggtatagcttgggtcccttttcctgcaaggccccatggggcagaatataataaatattctgagtgaggagtgtggtctttttctgatcttcctcagcttccgtaagttgcagagtgaggtatattaggagactagttctacacaatattgtaatgctgggttccatcaacacccaccttccacaactcagtctgcacctcagttggcaaaggagactggatggccatctttcctcatgttcccttgagtatttcaatgtagaaagcccttcaagtggtattatattttaaccttttacattattgttattaatgttagtaatatattgttatgttttctaaattatttttctttaagctgacgtggctttttttctgtggctcccagtgggtctacggaccttggctgacatatgttggtaggtactctggtcagctcagctggctgtcctggttcactcagaagataagtctctccaaagcaaattcacatgcattatgagtcgctttgagcttctgacatgtcacttgccccgaggttaaaacttttcaccccttgaagaccttacatgttttatggtattggtgaggaaggaaatgttctcaaggtctcaggctatttgggaaattccaactcctataccttaccagagcatggaagagcccagatctgaatgtaaaacgtctctgttctgccagagatggaaaaaatacaggtatacttgtgatatagtcatggggcttcagtgtcactattttctccttaaagctccagccaaaaactggacaaggatagagaggaggagggaagaacaaaagagcccttctctatgaaccttgtgccttctgtcctaccagttttcttttacagattctcacttctgctagcctagccagggcttactccaggaatctaaatagatgccctagtccactttatctttgttcccaaggcactcatttttattttgattttgattgaatgtgagcaggttgacctcaggtcacactttgttccaaaaacttttggaattattccaggacttgtggtggagttatggtactctagggcagtctttctcaaactatgtatggtaaaggaccaggttttttgttttccagtccttcacttatcaatatgcattcctattgcccatgacaggtatggagttcacactgtgtgctgccgacccggcaagtttgacagcacccaaactggccagactgttctgtaggttaagtccattgatcatgtacttggatatcacagcaacattgaaatgctaaaaagtttttaaacactctcaatttctaattcaccatgtcacagactggtgaaaaaaaaaaaaaggtgttcactgaccagcacaagtctgcagatcatctttgagtagcactgttttggggccctcggtctctctgaagaccctagcagaactgatacctacctgtatctcttgttctctcctatttgagtttcacttccagagaacttgttcttcagcaagaatgtgtcactagtaaggacatctctagcatttctctagccttccttttctgctgctcaaaaataatcgttacaaagcttaggtttaagctgtatatgaaatatttatgcgactctcaaactttaaaggagttgctcctttgttccaaaattaaatgtgttagataaatttgtgattgtatgggtggcttcatgaattaagaattgaattaatacagactctttgataataannnnnnnnnnn

SEQ ID NO: 21558 - DNA, 875 bp, Homo sapiens
  misc_feature 1, 2, 861, 862, 863, 864, 865, 866, 867, 868, 869, 870, 871,872, 873, 874, 875: n = A,T,C or G
nncaagataagtatgggcaacgtagcaaggcccatccctacaaaataaaaaaaataagccaggcccttggcatgtgtctgtagttccagctactcaagaggccgaggcaagaggattgctcaagcccaggagtttgagagtttgagcagtgagctctgatcttgccatttgtactccagcttgggtgacagagcgagaccctgtctcaaaagaaaaaaaaggctagtttttatgacttcaacctgaactttgaaatttcttcatgtgccttccctacaggcctttcactgtggtctgggaaagaatcagtaagatgacagggctgacttcattagatgaggagcgtttctatccagtttcctggaggaataaggacactgccttttcagattaaagattgtctgatttagagaccatggaggtggacagagaataacaaaaccgtgatggcagtcatcatgcttattgcagttagcacacacttttcctgacaggcacagtgctgctgtgctctacaaatgaccatgaaatagagcacgccatgactttaggacacagggatttttatgggaagagagttcatcagggactgattacgtaggagagacgatgcaggggaaatggtggccaccgtctccattgaatagcaatagctgctgtttagcaaagactgattaaaaagtactctgatttttcaaatggaagagagaacagttaaatcagagtagagagtttaatcaaaactaccagtggaacatgttcttgagtaggattcacatttaactgctggcataatttgcaactgttggattttctcatgtttggaacaataaagttgaaattttccaaagtgtgaatgannnnnnnnnnnnnnn

SEQ ID NO: 21559 - DNA, 452 bp, Homo sapiens
  misc_feature 451, 452: n = A,T,C or G
acccaccagatgtgtctgtcacttccctacatccacctctattgtggttctcatgtttctgcctccctagagaccatttctctgtagagcagcgctttcgaatagaaatacaatgccagacacataagttgttttagattttctagtagtcactttagaaaagttaaaaagaaacaggtgaaattaatgttttatttcacctaaaatgttagcattatccaaaatatcacttcaacatcttatcaaaataaaattattaatgagattggttaccgttccgataaataggtgaactgagagcatacacagtagtattctgttctaatttctgcttcactgtgagtgtcttgacatagtcttaaaagagtattgctgtgaaatattatacatgtaactcataacctctacaattctgcagttgtaattggttgtcttacctaataatcagttnn

SEQ ID NO: 21560 - DNA, 906 bp, Homo sapiens
  misc_feature 1, 901, 902, 903, 904, 905, 906: n = A,T,C or G
natctccaagtttgctgattcttctgtctgctcatatcttttgttgagctcccctagtgaattttcatttcaattattgtaaccttcagctccaaaatttctctttgcctacttttaaaaatttctctttattgatattctctatttgttgagacattattatcttgaattcctttacttctttgtccatggtgtcctttagctctttgagtatacttaagacagctgatttaaagtttttgtctagtaattctagtattagtgcttcctcggggtagtttctgttcatttcttttttcttgtgaatgaagcatattttctagattcttcacatgcttcgtaattttttttaaaaaaactgaacatttataatgtgtaaaaaataaaaacaaaaatagatgggtacagtggtgtgtgcctgtaattccagctactcaggaagctgaagtggaaggatcgcttgaaccaacgagttcaagattagcctgagcaaggcaagaccacatttcaaaacaaataaaccaaaaagaaaaaaaaaggaaagaaaaagaaaagtaaaatgctcgccaggtctctactgattagctgttggggcactccttcaaaacttacccagggcctttataaatctaccttaatattcacttcctgtttgtgttgaacctaaagacaagccagaggtgaaagctaatggccttctcaggtcttttctgagcacacatactgccctgagctgtgcacttggctttctagtttctcatccacaatagcttttcaaagctcctattcctctaccaaaactcactgctacagcttttcctctcaggctttcaatatcttatttgtttgccctgttttttttttttctttttttggttttatttgtttgttttttgcaccnnnnnn

SEQ ID NO: 21561 - DNA, 293 bp, Homo sapiens
cttttaagtaggctctgatggaactttgctccatagcaggaatctcagataagactttgtaaaacccgtaaaacccagccgagccatggatttatgccattaaatacccatgagttgggtgaaatttcctctccttttgagggcccaagataaacctggggcgtctgcacttgtcaaaaagtgatattctttacttacagggactgtgtatacagaatatgaggccagtttttccaagggctttattggctccgtaagtcaagtttgattccttataaggaaagcacccgcgt

SEQ ID NO: 21562 - DNA, 566 bp, Homo sapiens
  misc_feature 1, 57, 542, 543, 544, 545, 546, 547, 548, 549, 550, 551,552, 553, 554, 555, 556, 557, 558, 559, 560, 561, 562, 563,564, 565, 566: n = A,T,C or G
nactttcacaatagctaccagttactaaacaacctcactggtaaagatcatcaatcncaatgtacacatgaggaaattaagaatgagagaggttgagtatgtcacccaaggtcaaacaactacaatatggagaaacaaagccctgttttgtctaactccgaccctcctaccaactgccttcagaactataaatgaatctgtgattgattgatttattttttgtttgaggcaaggtctcactctgttgcccagtctggagtgcagtggcatgatcatggctcatagcagcctcgaactcccgggctcatgtgatcctcccaccttagcctcccaagtaactgggactacaggtgcatgctactacacctggttaagttttaaaataaattttggtagaggtgggggtcttgctttgttgccaaggctggtcttgaactcctgggctaaagcgattctcccacctcaacctcccaaccagctgggaccacaaacatgtgccaccacacccaagctgattttattttttaacagctcaaagaggnnnnnnnnnnnnnnnnnnnnnnnnn

SEQ ID NO: 21563 - DNA, 1341 bp, Homo sapiens
  misc_feature 1, 1315, 1316, 1317, 1318, 1319, 1320, 1321, 1322, 1323,1324, 1325, 1326, 1327, 1328, 1329, 1330, 1331, 1332, 1333,1334, 1335, 1336, 1337, 1338, 1339, 1340, 1341: n = A,T,C or G
naggtaccctccctcagacttgggaagatccccatgaaaaagataagagcacgaactgctttgaagataatgatcctattgatgtttgcgaaataggctcaaagattctttcttgtggagaagttattcatgtgaagatccttggaattttggctcttattgatgaaggtgaaacagattggaaattaattgctatcaatgcgaatgatcctgaagcctcaaagtttcatgatattgatgatgttaagaagttcaaaccgggttacctggaagctactcttaattggtttagattatataaggtaccaggaaaacagatttctaaaggaaatcaaattaggataagatttgtatctgatgaatattttccttctgaaccgcccatctcatctgtgtgaaaaagtatcctttgttccaattcacagaagctgtgagtccttcagtgctacccccttcagcttgccactggacctgcttaataatgctataactgcctttagtaccttggaagaccttattcgatatcttgaaccagagagatggcagttggacttagaagatctatataggccaacttggcaacttcttggcaaggctttgtttttggaagaaaatccagagtggtggatctgaaccttctaacagaggaggttgtctcctggttaaacgctgtggtgggaactgtgcctgttgtctccacaattgcaatgaatgtcaatgtgtcccaagcaaagttactaaaaaataccacgaggtccttcagttgagaccaaagaccggtgtcaggggattgcacaaatcactcaccgacgtggcctggagcaccatgaggagtgtgactgtgtgtgcagagggagcacaggaggatagccgccaatcaccaccagaaggctctagcccagagctgtgcagtgccaagtggcctgattctattagagaaacgtatgcgttatctccaatccttaatctcaggtgattgcatccaaaggacctgttcaatcttcaggatttacagtgccttctgacagacgggaacaatcacacagaattaggagtaggcaacagcccttgagacgaggctacaggaccgagcacaggtcctcatcgtgcaagacactctcagtgtttaataaatacagaatcaaagttacaggtacgatcaaccggatcgattaagataacaggatagaacgcagacggacaaaggacgacccagacacacggaaaatagcagcaggcacgaaacagagacgaaccgaacactaacaccagcccgaagcaacacacaaaaagacaccaaccaaaaaaacaagannnnnnnnnnnnnnnnnnnnnnnnnnn

SEQ ID NO: 21564 - DNA, 1440 bp, Homo sapiens
  misc_feature 1, 2, 3, 4, 5, 1434, 1435, 1436, 1437, 1438, 1439, 1440: n = A,T,C or G
nnnnncgacctttttttaaatataattctccatgcagttggagggttaaacaggcatactgagagtcagtgtaaatgtttagtcttaccttcactgagttctaaggcctgaattaaagcaatgagctcagcttaacgacagtgtccagggttatcactgcatatcctgcacatctctctccttgtgggttgatgaagctgctcccgtccatgtatagctcccagtctactgatgcccaaggctggtctcggaggtcaggtctgctagagtaaacttgagtccaacacctctacacagttaatgctcgacagggctttagctgccgggagcaaggtggtgggttcagggtgtttccagtttagtagatcaatggttgaaaagggctgatagatgaaagtctgttgtcccccccaaccccccggatgtgggcctggtcattataatagacaggtcctcgtgtctccctgagaggcatttgcatagctcgagcaagaccagatctgagagggcccacttgactatcttgacttccttccttggcctctcgaggctccgatcctccccttcgaggtgagacctggggcgtgttagctcctgaatctcatttctgagggggctgttggcctcggtaaagcggggtaggctgggacatatggagaaagaatttctgttatctctggcggctcccgcaaaactggcttctcttgctgtttctgggactccctttttaactccatgtctgccggcgaagctgctcttacttttacttttggctttttcgcaataagctgttcaacagggctaagtttatgctggttttgcctatattatatttaaccatgagtcaatataaaggaatttgatctaggtacactggctgccctctgacccctgtcaccaccttaaatacatggccaattgttccctgtctatagctccttcggtgggccatccaacaccaaaagagggcaattctaattcacacagagttcttacacctctagggggttaacttaactctataatctcccgcagaacccttcctaaggttctgtaacctgcattttaatggagtaagttttgatgctttgatgactttccttttatttttctttttgaaaattttttttaacacagttcttagcggagtgggcttactttgtgtctgacctatttttctcttgagacaaaacaacattcacactacaagaaggaaaggataaaaggtcactcactcatctaattcacactaaatcaaaatgaacactaaaaccaaagtgttgttaaaggcacacctgttcgtcaagcaatttaagccaagtcaaaatcagaaccaaaaccaaagtgccaataaaagcatgtctgtttatcaagcaattcaagtcaagtcaaaatcaaaactaaaaccaaagtatcaagcaattcaagtcaagnnnnnnn

SEQ ID NO: 21565 - DNA, 8328 bp, Homo sapiens
tttttttttttttttttttttaccatgaaaaaaatatattttatgattttttaatacttagacattacattccgtatcaaaatttaccaacatgctattctataaattcatgtctttttaccatagtttgattttttttgtttcatgctaaaaagcccactctcataattacctttagtatacattacctggaatataaaaatttcattaaatgttggcaaactcttccccatgacatgtaaaacaattagaaatgtctagttataaattttcttaagctaatgagcaaaagaaaagccccaatacactggcattttcacttaacagtggctcatagttacaatgatcagaaataaacctacttgctactgtgctatatagggcagttttgccaagtgcccacctttaagagctaggtcaatttctaagaaaactgtatggaaacattcagttgttaacaaaaatttaatattaaaattactcagttatttaaattattgttaatttaggaaaaagaaaacccatgtattaatcacccataaaataacttttattttaataaataacagtgggctcaccaaagggcagggattttaacgtgtcaggttttatgcttattggtagtaagtcttaaacaggtgaaatgaactattcaataaaacccaaaaggccctaaaaataaaatactttaataataaaaattaaaaagaaatttccaaaagaaaatagttcactccttgaccatgcttatttattcagagtaccagcgatttcagtaagtgcttcatttttcctgcaaatctgatgttgcacagggaatgtacacattttcataccatcacaatatcatcaatatctcaggccaataatattgtgaatgcaactgttttataacaaacacaaaataaaaaaaaacaatgttactatttacggcaaacagaaacaaaagtaaatattgcaaagatgttttcttatgtttctactactgattttagttggactttaaatgaaggtcatcaactctcctggaataacctctacctctcgctgtgaatccacagtataaatatggtgaataaagctaaactgtaagagctaactatatactgaataaccaaaataattataactaatactgttcttgaagaccaatctaatgaaaaaagtatcattagatatggtgagaaatacagacaaatctgtacaatctaacatctataaacagtaaaatcaaaacatccaacttccttatagaaagtgttttatctatgtaattataaatgttaaggactcttgtattttataaacacaagatgggctcactttgatgatatcaattttaagatttataaaaatgtttaaaaaaatctttccacaaaactttatacagtttaaagctatacaccaatctataaatctcagaaaatggaaaacaaaacaaaacaaaaaatctttataagatcacatgtataaaacaagaaatgaaatgtgattttatttaaggcaatactgggctacttcacaaatcaccacctcaaatatttacactgctccacactactagttttctatcacattcacaaaggatttttttttaataccaaatgtttaaaatcttcaatgtagtaaattctttattcacatttccattgtatttcatggactcatagtaactatatccaattagaagcaatgaaaaaaaaaaactgtagctataggaaactgctagagaatctgctttaatttcacatgaataccaccccaaaatcctggatggcaaatttacaaagcagagcaaagtgttgatataatgtgcctattttgtgaaaagtaatcttgatatcatcttgtaaataaatgtttcatgtaaaaatcaatgaactatggcagagtttctggttttagttcaaaaagttcttaatttaaaacaataaaagaacaatttaaaaaacttgatcgcttagttaaaaattaaaattccaaatataaatgtgtcatttaatagtttagacttacagactgctggtggcagcacatgatttacaataataaatatatacaaaaaaggtatctacaaataaagagtactgttatacatgagcagtgacctggtgaaacataccaatcacacagataattgtttagttcatgaaaagggcaactgggtgatagaaatttgaggtttagctcactatttacaataactgaagtactgattctgttcctcaagtcccatagggataaaaaaaagttttacatgacaaatgtcatgttttttttttcttttttgtttttggccaggttaattcatgtcaacaacaaaaaaatataatgaaagtttcacaattctagcatgcttgatggcttcctatttaaaataaaatggtaaatgatgtatttatactacattaattatcagtactgacctctgcctgtggctttacctatactgatatctttcataacagacatatctggatcatttgaatgtacttcaagttttttcagactgacggtaggtttcatttcctgaagttgctttaagacaagctcagtgcaatctttaagattcttgtctaaaacaatttttacattatcactgcactgaagctgtgatggattggcaaactgtacaaacgtttcgctttctttacaaggacatacatgatttccactagtcacagcagtcttatcaatattttttcttgaatttgaatgggatccttttttgtttccagtattcggatggtctttgtcagtatttttcttctgcttcactgcagactcctcaagaaacttcagaaatgatacttcaaatcccattggcttaaaagagctccagtcaaaagatgcaggatgctcctcaatggtttgaatggcaacagcagtttcttcttctttacgcacgctacttaactcagctgctgatgctggttcagctttttcaactttcctttttttattttgtgagacatttttttccttattaactctcttcaaattacttgctttttgtctttctgactggcagaggttatcttcctgaaaatcattacttacatttgaagaagtattagcttgggtctctacacttgtgctatcttcatttattaattttgtaataaacaattctgttagttcatccatttcatctttttcatttttttcaacttccttttgtgaaactgtagctgttgttcttgaattatcattgctctctgatacacacgtgtcagaatctttcacatcattcttagcaccttcttgctcagacgtttcctttacttgtgagttgcaacaccgtttgaatacaataagaagatttcggtgttgtgatgtaaatgccttagataatttatggcacttataatgtctaattatattgctttcacttgtaacaactgaagtacatccctttatcatacatggatactgggttacaaatctgcttgtacactcagacagggcatcatttctagcctttatagaatatacatgcttcccacgtttcagagaataaggcttattttcttcaatctgcacaatctttgcattcttgttttctaaattattttttttctttcgtttggtcttgggcatttttattccttcctttccacatctgctgtgcttcgtcccccgatgtttagactttgatttttcttggtttgccttgcttgacatattttcctggcctggtgttaatcttcttggacgaatcaaatgagccttatgtttgtcattatgcttattaaaaatgtgtcggaggagattcgaccgggttgcatatatacggtcacagccttcacaatcacatttgtatacaccatcttcttctgttttacttgcccttagtccaatcccgtggtctgcctctagatgaacaacatagttcaaatatgtagtaaatgaagatttacactctaactggtcacatggaaacttcccaacatccactgaagcagtcatactttcaatttcttcaggagtcatttcatgaagtttcatgtagtgttgtattaggccagtaattgcttggaaaattcgagaacagtcacttacctgacatcgaaattctttcaaagtttgtttagtttcagtttcttcactttctttaccagcttcactttcctcttcgacctctgctgaaaatgcaggtagatctgatttgtgtacagcctggtaatggagaatcaaattttgctgtatcgtaaaggcagcaaagcatccctggtgaacacatcgataaggtctgtaaggactgtatcttgttggaaactcaagggattgggaaactggcttctttcgttttttctcctccttttcttttttatgcctcctaatcttccgtcctttggtttgtgtgtttgtgagtgcatttgtattacattgttctgaagtaactgtaatcacttgtaaagaactttctgttttgtcaggactttttttttctacaagttgtttttctgggatcactgctacattactgtgggtattttgggtctctgctctcaattctaaagcaggctgagattcctttttattttcctctgtcatagctagctgttttttcacttgtgtacttcgtgaggccggcacattttcactctgagattttcttccataaggccttttaatttttaactttaccatttcttcagttgtaaaatgatgcaccaactgacagtgtgcccggaggttagaatttcttgtaaatgtttttgtacatgtaggtactacacatttaaagggagcaaatttcaattgattcttcttaatttcaagaatcatttctggagtgtattgatgaattttaccatagtgcttaaatagtgcatcctttgtcatagcactgtagttacagccttggttttgacacacaaagggtttattaactttgtcattaaattgaatgtttatcatttcagaaactggctgaataactgtgatatctgcagttgatttaacaggcgtgggagtcagtgtcactgatgtatttatcagtacacattgggatgctggagtggataggtcattttctaattttaatttctgtaagccttctaaaatttcctgtatttgatcctccttatgtgatacttcagactgaggaatgttactttttgttggcatgacacttataaaggaggaaaacggagaagaatcgggtaatttgttattttgcacagtgtttactgaaggaagctgaatgttataatttatttgagcattttgtgaagtttcaccagcaccctgagatccactttttacctcaagtatttgagaattcatagcagttttaataatttcaagagtcttttcaaagttttgtataacattgtcttcagaaatctgcaaatcagaatttattgaagttgtgcatgaattcaaagccatcatttgggaatcaccattttcagtttttaatgttaaaggggctaacactgtatgggactcaagactggttttgaaattctcttttacatcagtcataaataactgattgttaacattatttaatttctgtgttagattttccaccaaactctgaggttcacaagttggaattacatttgaatgaaggttagtagttgggatttcaacactctttgctatgagtcccattgttgttaagtcacttgttaccaagttttgggaagcgttaggtgcaattagtggaggagcaactttctttcttctcttagaagcactgtttccctttttatttaaatgactggatcttgtgttctgaggaccacttataacagaaacacgagaactgttactggtaaaattttgtgatggcccaccagaattaggaaatgaactagagcacaaaccattttcaacagtcttcagtagtaagtcattcgttggaaaaacaggcaagctgctacattcctcaatggaggaagttttggagtttgacgtcctattctggttggtcagcaaggtgtttggatggcatacagtgtgcaacaggggtggtacagttggatttggcatcaccgttgcatttacttgtgatgcatcagagacacaacctgttgaaacatgagaaagcatttcggcaccctcaaatgtactgggaatgccagcagtttccaaagcctgtttaataatttcactaccttcttgactgacactggtattaaagttagtcacaccagatcgaggaaatgtatttggtaaaaatgctggcgagcgattttcagcaagaagctgtagaaatgatggatctttaaaacatgcttctggattgaaggtagattgttgtggctgctgcaaatttactgcatttgtggagagaatcatgctggcaagaagagaaggctgtccattactctgtagaagttcttgagcaatttcggctccatccagtggtttacagtaagatcgcttggataagtgcccacccagtgatctgggattagtaaaagccctgtaacacctgctacagataaatttcccatctctgataattgcaggccatttagcccttttgttgtgcttaggttttctttccttcccatttgggccccgcccacggtcttttttaactttttcaggtgcagactgttgggcattggtgctactgaagttatttgcaacattcacttgtgaaggaaaaactgcattttcaccattacccccctttagaaaggaggaattagtgtttccttcaatctgtgaggaataatgatttgtattattttccagttgggaaaaaacagaattagtcccactatctgctggtgaagggaagagagacattgaactactttctgcaggtaaaggaaggaaaggatctgagccactgtcaatattcaaaggcagaactgttttggttagatcttccatttgtgctggcaaggcagtactaggtaaattttccatttgggaacataacataccaccttgttcatttttatcctgagaagttatatttggatttatgacactttccattgaggacaacaatggagttgacacacttgctaaatgagctggaaaaatgggtggcgagacatgctgcaactgggccgaacaagcaggattcccattggctttggtctgtgatgtaaaaaatggatttgagctgttcaccggtgatggcaaaaaataaacaaactttccattatttggtgtatttaagttgttagctttctgaccttttttacttttgcgctgcattttaaatgcagcatattggtcagggtgtgctgtcttcatgtgtttcccaatactctgtgaagaattataggttcgagtacatccctcgacctggcagctgaatttctgaactggagcttttggaggcactgatggagttcctaatgaattacttaggtcggactgcggtggaacaaatgcaatactttctaatgtcttaagaggtaaattataaagattggatgatgttttaacattatctccacattcaaatttggaagttggtaaattgttttgaaatgctgcctgattttgcacagaaaaggtcatcaagttgttcacttgtctttctaagttttgtggggtaaggtcacctattttgagagtttctgaatttactaaagaattctgagtaacatgggcatcattaaagcaatcttgttcttttctctcctggaaacctggatgacacaaatcattacaagtatcttcaactggcgtatgtaagtctgtgaccagtgcttcaccactgccttccacagttgagttttcttgctttccaaagttatcctcaatcccctgattgagagacaccttaatggacacagctacttcactggattgaagtagaggagtagtagcagggttttccaaaccatttgacaatggtccattagcttgcctgagctcagaggcagaaatctggtcttgtttggtcacagctgattctgctttgcttttatcccaagcatcacttctatctgctagtaagctgttttcaatgttattttctgaaggaagcatagatctttctttctcaatattctctgctgtgttctgattcacttcagaaggctgaatggaatctccagatgaattaagttgggcttcaggaggcagcactttttcaggaggagtactgtgatcatccagatgcttttccagctcaccctgagaacgataaactttaccacaacctgtgaacttacaagtgtacgtattataatgttgtgcttcatgatcatatagtaaataagcttccgaaaaaattcttccacatttaggaaacatacattttgctctaaagacttgatgctcctttcggtgggttaaaagctcggcgtaactattaaaaccagctttacatttcatctg

SEQ ID NO: 21566 - DNA, 2598 bp, Homo sapiens
  misc_feature 2598: n = A,T,C or G
cgacccacgcgtccgcgcggcggtctggtttccccgacgtgttttgtttgcgacgctgtcgtgtaacagcgcgctttacggccgcggggacggagcgagccggcgccagggcccctcgggccgggaagaggggaaggggagcgaggttgatgcccggcggaggggcgagcgcggcgtctggccggcttctcaccgccgcggagcaaagagggtcccgggaagcggcagggtcggcgtccaggagcggcttcgggggctccggcggcggcagaggcggagcaagcggccccgggtccgggagcggaggccctgggggccccgcgggcaggatgagcttgaccccgaaggagctctcgagcctgctgagcatcatatcggaggaggcgggcggcggcagcaccttcgagggcctgtccaccgccttccaccactacttcagcaaggccgaccacttccgcctgggctcggtgctcgtcatgctgctccagcagcccgacctgctgcctagcgcggcgcagcgcctcacggcgctctacctgctctgggagatgtaccgcaccgagccgctggccgccaaccccttcgccgccagcttcgcgcacctgctcaaccccgcgccgcccgcccgcggcggccaggaacccgaccgccctccgctctcaggatttttacctcctataactccaccagaaaagttttttctttcccagctgatgctggcacccccacgggaactcttcaaaaagacgcctcgccagattgcactgatggacgttggaaacatgggccagtctgtggacattagtgggcttcagttagccttggccgaacgccaatctgaattgccaacgcaaagcaaagcgagcttccccagtattctcagtgacccagacccggattcttctaattctggatttgacagctcagttgcctctcagatcacagaagctttagtcagcggaccaaagccacctattgaaagccattttcgaccagagtttattcgtccaccgcctccactccacatttgtgaggatgaacttgcttggctaaaccccacggagcctgaccacgcgatccagtgggataaatcgatgtgtgttaagaatagcactggtgtggagatcaaacgaataatggccaaagccttcaaaagccccttatcctctccccaacaaacacagctacttggtgagttggaaaaagaccccaaacttgtctaccatattggcctcaccccagccaaacttcctgaccttgtggaaaacaaccctttagtcgctatagaaatgttgctgaaattaatgcagtcaagccagatcactgagtatttctctgtcctggtcaatatggacatgtctttacattcaatggaagttgtaaatcgactaactacagctgttgatctacctcctgaatttattcacctttatatatcaaattgcatctctacttgtgaacagattaaggataaatatatgcagaatcggttggtgcgtcttgtgtgtgtgtttctccaatccttgatccgtaacaaaattattaatgtacaggatttgtttatagaagtgcaggcattctgtattgaattcagtaggatacgagaagctgctggtcttttccggttgttgaagacattggatactggggaaacaccttctgagaccaaaatgtcaaaataatacctcatcagaaccatcccatccattcactgttcagctgtactgtgatttagtttttacaccgttaaaaccctgagtggattgcttggtttaatgcatataaacagtactttatctacttaaagcaaagttttgctttcttgaatgactttttctgtgagatgaatttttgataagaactagggaaaacatgtcttttaggtgtcttgctgatgactatccataggaggaatggctatcccaaaaaaagttccgcaaaaaagtagatgagtttcttttttttttaagcactaaagaacaaaatgcatttttcattaatacaggcttctgatgaaccaggaatcctgttttcgtaaagttccaatgttgatgagagtaaattcttaagcatttgtcctagaggtgaaagcagctgaatgtttctgaaccatcaagaggcaaacaaacaggagtttgtttcttgaacctgcttatgcacacagctcttaactcctcatgaggcacacagctcttaactcctgatgaaccaaggatttactcataactttctccttgtcatggaggcttaatagacaacagaataaatgcatttcttgggcctcttataaacttgggaattcttagaaagctgcttctattaccaggctgtaatagctggtatagttttttttttttctcttaagatgttctgttattagtctgagacagccatttttttgttttacggagatttagcagggcgcggggattcggtggggtggcccctgtgggggggtgggtgtggaacagaggggggcggggggctcccttttgtttgggaaggcctaagtttttggggaaaaaaaaaaatttgggggcgagattaaatggggggaaaaagaagagtgttaacaggggagttaaggatcggtgagan

SEQ ID NO: 21567 - DNA, 341 bp, Homo sapiens
tccaccgcggtggcggccgccgggcaggtacccaggggcgtgtatgattaccagagggattcagggaggggcgtgtgtgattaccagagggaatcggtgttacatcctctaggattccctccaggaaacctcctacctacctgttacaggtaaggaccttaggtgtattcttagatgggggttctcaaaccttcatgtgtgtatgaattactggggagccagtgaaaatacagattaaaattctgtaggtctggagtggagccatgtggtgctgatgctgctgatcctcctagctataaggaagaaaacttttgtatcctagtgaaatgaattgatatacc

SEQ ID NO: 21568 - DNA, 2721 bp, Homo sapiens
gcgtgatggtcggccgtgtttggtggcgacggctcacttgtgagcgcttggtgggtagttcgttgatgatgtgactcgtcgtcacgcattgactgcggtacgtcactggtccggtgtcctgtttgtcctactagagcgtattggggttgggtgttggctgcttgcgataagtgtcgacagcacgtcctccggttgcaatactgttttgtcgcgggtcaggcatttgcgctgtggggttataccccgtgttgatcgtgtgttggatgttgtaaatgcttacccttggatgcgctgtgcaaatgactccgtgaggtagtggggtgggtccccaattgagtggtcaacgccgtctccctgatattaatgttctctttcgcgaatggtttccacgtgactcagttgttgacaagtgaagatcgttgttaatacttgaccggtccagtgtctgtatgctgtatacatttcctgattgtcactgatatgtgaccaacttttggtatctatgtaaattctggggtatacgcgttaagcgttggtcccctttgaggtataatcttagatctgttctcctctcctttttttttttttttttttctctttgataatactgtttattgtccacggaccgagcgattgctcaagaatgatacaaagcatcagagacatgcgcagtctgcttgtcaactttcaacaactcttgtgtgttcccagcaccggaaggtctcagacttcatattccagcataaacacagtgctcccctcccccaaaaatccaaacggaaacaaaatcaacagagctttaaattacggcagcaagtccaatctttgcttaatacttatcaagcaaagattggacttgctgccgtaatttcttaatacttatcaagcaaagatttgaaaataactacaatgtaaactttattttaaatattttgagttgcttgcaggatgaaaataggagaagagagctgtgcttagaacataacatataaattaaacgatgccaaatggagagccttcttaaactatatatatattgccactatttattgtgaaggtatttgagcggcttcctctgtcagctgccacccggctcttcttaacctgttttgttttctgctcagcacggttaaaagaccaacgtgtgtggatcaaatataaaggccacacctttcagaccgaacctactcaaagatcctttactttgcaataatttgaactggagaaccaaagacgggagacgaatgaaagcaaagatgctcaaagaaccaaaggaaagacctgaaggaatccacctgcataggccacgcgttccactctgggtcaaatgcttccacgatgcagaaacctttttttaaaaaaaaagtgcaagtctaatacctaccaagggtaataaaaaacacagcacaggaatgattacagctgatgtcaaaaacaaaccaaaacattaaaaaaacaatcagcagaaacaggagtaaatgttacatatgatatcaccatacaggaagcgaacaggggtggggtgttatatgggttggaggggtctggtggagttgtatatactgaaatcacatggactggtccattatgacatcttaccaactttaggtcactgtacagcatgaaaacgcccgtggggcaggggccgattcctggataccctcccagtctgccctagaaagggaagtcatcaagatctgtgctgaccaggtcccggtgggcatgggggctgcatgccacttgggggtcaggagtcttaacaggtgctttggggttgccgctgaatagaacaggctaaggtggctttggaagcattttgcaagaccacgcccaggccgccaagcttcggtttcattgcgtgtgtatgtttacataatgtgcctgtatatcgtcagtttatctttacaacacaggtgggaggaaacaagagattctccttatcattaccgagaaagttcttcctatcctaacccccatatcactggcttcaggaaaccacactgagggaacacataggttccctagttccctaggaagtttcttagctaggtaatctttgtcatttaagaaatacaagcagaagttggtatatctgcaactcaggttcacctatcatctgagaattcacctttagaaaaataagatgtctcttaaaacaggccatagtgtcctggaggctgagaaagaagtgagtgtgtcaccaaagccacctacctccaaaatccttcccttcctaggctggacttcttactatgcttagctggcgtcacatgcagaaagccccgtgcagaacgatggctgtcagtctttgagggagggaacactaagcctgggagggcacagcaagacccagctttttctgtcctcaggatgtgcagatggggagcccagccgggccctgcacacaagcccggataaagcaaagctgtgcaactcaatccaggtgcctgatgccagaacaggcaagaagcaatggcaaccgcagcagctagggaagggaccttgagggcagccaccggccccggacagcagcctcaggacaggacctcaccgattcctcctgcaagctggggagcatgtgggcgggggggggggtgggggggtgggtgcagaccaaaaagactcagctgaggctggaacgcagctcagctggggtttctcgctcccatttctacaaggctcagagggagcggacgcgtgggcggacgcgtgggcggacgc

SEQ ID NO: 21569 - DNA, 763 bp, Homo sapiens
acacatacgcatttcttcctcccttcatgtaagtctcccatatgaagtttgccataaagtcctgtaagttcaccccaaagcttcattcaattgtttttaatccattatcaagggatgaaaatgtcaccactctaattcaggcccttgtaatctctgtgatataccatagaagattctttctatttttcagggttttaatcttcaagttaacttccatagtgtcaccgtatgtatcttagcaatcagaagcgtcctcataaacgggagatgaaacgtcagagtcacattaggaatcctgaggctggaaacagaggttcgagtgatgggaggaagccactaggaggcagggaatgcaggctccctagaaggagaaaaggcaaggaagcaaattttaccatcagagccccagaagaaaccagccctgtccacacccatatccccaagatttaactttatttcataagatcagttttaggttactgaccctcagaactataaaaaattaaatttctgttgttttaaactgcaaagcttgtatttatttggtaaagaagcaatagaaaagtaatacggtacatcttcttccacacttacttcaagcccacactctggcacttccaaaagaagaagagtaacagatgaacgcgaactgcgtattccattggaatatggctggcagagagagcaagaataagaaactttggagggcgccttcaaggagaagtagcatattatactccatgtggaaagaagcttaggcagt

SEQ ID NO: 21570 - DNA, 497 bp, Homo sapiens
  misc_feature 164, 168, 169, 170, 171, 172, 173, 174, 175, 176, 177, 178,179, 180, 181, 182, 183, 184, 185, 186, 187, 188, 189, 190,191, 192, 193, 194, 362, 495, 496, 497: n = A,T,C or G
accatctgacttggcaatgtaagacacacacgttagtgtggggcacaaacgtggaatattaggagagagctggttccagcaccaaatccagagtcactcggggaaggaggtatggtggcaacactttatgcttaatgttcaattctgctccagtagaacatggnactnnnnnnnnnnnnnnnnnnnnnnnnnnncacattccaagtttgaaatctctgtgatgcttttgagagggatgtgaagacactattcttagaaaattaagacaatcctctgccttggaaaataacaactcaatctgtttttctagaatgaatggataggcaaatattatttctgtctttaaaatattaaagttattntaaatcatagcatatatggcactttgctcaaggggaggaatggtgtggatataaacattctggagtaaaaaatatggccattattgacaattagttgaagcctgcctctgttcctgaacagagacattggaannn

SEQ ID NO: 21571 - DNA, 3947 bp, Homo sapiens
  misc_feature 1, 2, 3, 4, 5, 6, 7, 8, 9, 17, 47, 54, 60, 81, 87, 116, 153,164, 3946, 3947: n = A,T,C or G
nnnnnnnnnccaggaanagatccagctgcaggttagggcctttgaanaatctgnaaatgntctcccaaaagttgatcccanaccatncatccacgaagaacttgggcttccatctnctctcaagagcttgcaaccccaagaacaaagctgaanatgcctcagtnaactttggatgctgatcctactcaaatgggaggcctgagtatgctgctgttagctggagaacatgctcttggcacaccagaggtatcctctggcacatgcaggcctgatgtttcagaatctcctgaattacgtcagaagtcaccattgtttcagtttgccgagatatcttcaagtacgtcccactctgatgcttctacaaagcagtgtcaaacatctgccttgtttcagtttgcagagatttcttcaaacacttcgcagttgggtggtgctgagcctgtaaaacgctgtggaaagtctgcactctttcaactggcagagatgtgcctggcatcagaagggatgaaaatggaagaatcaaagctaataaaagcaaaagaatccgatggtggaagaattaaagaattagagaagggaaaggaagaaaaagaaattaaaatggagaaaacagatgaaactaggttacagaaggaagcagaatttgaaaaatcggctaaggaaaatttaagagattctaaggaattgagaaattttgaggcattgcaaatagatgacataatggctataaaaatggaagatcccaaagaaattagaaaggaagagttagaagaagatcacaaatgtagtcattttcctgatttttcttattctgccagtagcaagataataattagtgatgttcccagtagaaaggatcatatgtgccatcctcatggaattatgatcattgaggatcccgcagcattaaacaagccagaaaagctaaaaaagaaaaagaagaaaagcaaaatggatcgacatggaaatgataaatccacacccaagaagacttgcaaaaagaggcagtcttcggaatctgacattgagagcgtcatatataccattgaagccgtcgcaaaaggagactggggcatagagaaacttggagatacccctcgcaagaaggtccgcacatcctcaagtggcaagggaagcattttggatgccaagccaccaaagaaaaaagtgaaatcaagagagaagaaaatgtcaaaggagaaatcctcagacaccaccaaagagtcaagacctccagatttcattagtatttctgctagcaagaacatttctggtgagacaccagagggtataaaagcagaaccattgacccctatggaagatgcactaccacccagcctatcaggacaggccaagcctgaggacagtgactgtcacagaaaaatagaaacttgtggttccaggaaatccgagaggtcttgcaaaggtgctctttataaaaccctggtgtctgagggcatgctcacctctctgcgagctaatgttgacagaggaaaacgaagctcaggaaaaggaaactcctctgatcatgaagggtgtggaatgaagaaagctggacatttagtcagagtgggaccagtggagcaagaagttcaagaagacaaagccaaaagaagactgtctccttggctccgcaaagctggatgaagaatttgaaaaaaaattcaacagcctccctcaatatagtcctgttacatttgaccggaaatgtgtacctgtcccaagaaaaaagaagaagactggaaatgtgtcctcagaaccgactaaaaccagcaaaggaagtggggataaatggtcaaacaagcaactcttcttggatgccattcaccctacagaagccatattttcagaagacagaaacaccatggagcctgttcataaggttaaaaatatcccatccattttcaacactccagagccaacaacaacgcaagaacctttggtgggcagccaaaagagaaaagcaaggaaaaccaagattacacaccttgtcaggacagcagatggccgggtatcaccagcaggaggtactttggatgacaaaccaaaggaacaactgcagaggagtctccctaaagcaactgagacagactgcaatgacaaatgctcacacaacaccgaggtcggggagacgcggagcagtactccagaaatgcctgccgtgtctgcgttctttagcctcgctgcgctggctgaagtggcagccatggaaaatgtgcacagaggtcagaggtcaactccgctcacccatgatggacagccaaaagaaatgccgcaggctcctgtacttatttcctgcgctgaccagtgaagcgccctttcattgtaaaacattgtgctttacctactaccctagccttgtctttaccgagggatgctagtgagtccaagtggtggaaaatatagactgcaaacaagtgcttgttgccccacacggcccagattcacttgaagcagaagttagcatcctgggccagtttgttctctcagaacccagaatctttgagggtaaggttatctgtctgatactgagcagaaacagaatgatcctggagctttgctttctattgaaggcttttgacggtaataggtggtaacttggtaaaaggctgcctttactgtagctcacccagcatctcttttaccaaccagagagtgtgaaactagtttcatatattacctagttattctttccaaacaacagaaaaacaaatggggccggccctttaaaaacaccaccttattagatattcttagtcttttttgtacatggagatttaagtttaagatggtttatataataggttatacctacatttatattgtagaataaatattaaaaagcctgttccagagactcccaagcagcctgggcaggcagatgtaccattgttagtggtgtatgctcggcctcgtggtccatatattctgcacttttatatttgccaccagaatggtagtttgctggcaaaaaaaaaaaaaagagagagagaaaaaattacaactcttacaatctgaatttttttcttagccttgagtgaccaagaagaatttgcttgaggcaaattgtggcaaatattttcccagacaggggaagagtcctgcagattacagattactggtgttttcatgccttgaggattcttttatttttacataggggtctaagtgaccaatggattgttcatacaaacaaaaaaaaagacaaaaatattattcagaagtgaccttagtattacttcactattctaaacacattgaagacactcacttcatgtggacttggagctacagaccttttacatccatcacagattggctggacgggttgcaattgctatgcacagcctgattggcactgcaggtttttagagccattttgagtttgtgttgtttaggaggtactgagtcaatgatgagggaggtatgcctgaccagagtgggactctcagtcatagatccacctgcaagtctctgtttcctttttgtgttttgttgcttttgaacataaaaccaaccatacataagcagcgccaagtggattaactggcttagaacattcaacatattgacttaaccacctgacattcacagtgtcttgtttcctagcaacagatgcaaagtgataaatcaaaattagtctgaggctacagattttacagggtatttgttctatagcacaaagtatttccccactcttgcgtcacagacaaactaccaatttaattatgggtcccagcacatattttaaggtttccactgcggcatctgacagctaattcaatttgagccttgaataaattctaaggggaacgcactggcacagcgccttttactggccgaaggagagcccacaagtggggagcacccaaagaactccacaggcgggagataacggggaataacacgaaaaaagttcttccagagacactaactccgggaagann

SEQ ID NO: 21572 - DNA, 3171 bp, Homo sapiens
  misc_feature 1, 3164, 3165, 3166, 3167, 3168, 3169, 3170, 3171: n = A,T,C or G
nccagcggtagcaactgcagaactgcaggagactatctttctagacaaggcagttgaggaggagggagcgcttgagggggactggcctggcgtgcactccgcacctcggggacattattgcgcgtggaacggctgcttttggaaggcacaacttcctgaatggaccatgactcccaccaaagatccctgtctctgattcaccaaacagcttcaaccctgaaaccaggacgagaagttgacaacatctgagtggacagctaattgacctaagacttcagaccaggcctactattgcccagaagaaaagatgtttggttttcacaagccaaagatgtaccgaagtatagagggctgctgtatttgcagagctaagtcctccagttctcgattcactgacagtaaacgctatgaaaaggacttccagagctgttttggattgcatgagactcgttcaggagacatctgcaatgcctgtgtcctgcttgtgaaaagatggaagaagttgccagcaggatcaaaaaaaaactggaatcatgtggtagatgcaagggctggacccagtctaaagactacattgaaaccaaagaaagtgaaaactctatctgggaacaggataaaaagcaaccagatcagtaaactgcagaaggaatttaaacgtcataattctgatgctcacagtaccacctcaagtgcctccccagctcaatctccttgttacagtaaccagtcagatgacggctcagatacagagatggcttctggttctaacagaacaccagttttttcctttttagatctcacttactggaaaagacagaagatatgttgtgggatcatctataaaggccgttttggggaagtcctcattgacacacatctcttcaagccttgctgcagcaataagaaagcagctgctgagaagccagaggagcaggggccagagcctctgcccatctccactcaggagtggtgactgaggtttttatgtagaaggggaacaaaaaaaaaaatatctgaattttgaaaaaccacaaagctacaaactgaccctcttttttttttgagacggagttttgctcttgttacccaggctggagtgcagtggcgtgatcttggctcactgcaacttccgtctcccgggttcaagtgattctcctgcctcagcctcccaagtagctgggtttataggtgcccgccaccagacccggctaattttttagttttagtagagacggggtttcaccacgttggccaggctggtcttaaatgaccctcttatttttaacttggatacctgctattctgccaaaagacaatttctagagtagttttgaatgggttgatttcccccactcccacaaactctgaagccagtgtctagcttactaaaaaaagagttgtatataatatttaagatgctgagtatttcataggaaagctgaatgctgctgtaaagtgctctttaagtcttttttttttttaatccccttctaatgaatgaaactaggggaatttcaggggacagagatgggatttgttgtatgataaactgtatgtagtttttagtctttctgttttgagaagcagtggttggggcatttttaagatggctggctactcttgttttccctcatgataataaatttgtcataactcagtaacatgaacttgcccctagaggtagttgttaataattttgaaatattaaggtcttgccaagcttctgatgattcacacctgtactactgattattaagcaggacagactgagctttctgttgcaaataccttggaggagaaagtaatttctaaatatacagagaggtaacttgactatatatgttgcatcctgtgcctcccttcatattaatatttgataaagattttaatttatgtaaaacttctaaagcagaatcaaagctcctcttggggaaatggcaagtctttaggataggcaagaccctgtatgaatagtaccaaagcattaccgcatggtagagaacacactcgattaaaaatgttaagctatctgaaaaataaaatgtgcaagtcttcaggatggcacaaaacaaaggttaatgcttcttggggcacatttcttagagggcttgctgagtgtgtaaatataatcgacttttgtttgtgttacatgacttctgtgacttcattgaaaatctgcacaattcagtttcagctctggattacttcagttgacctttgtgaaggtttttatctgtgtagaatgggtgtttgacttgttttagcctattaaatttttattttctttcactctgtattaaaagtaaaacttactaaaagaaaagaggtttgtgttcacattaaatggttttggtttggcttcttttagtcaggctttctgaacattgagatatcctgaacttagagctcttcaatcctaagattttcatgaaaagcctctcacttgaacccaaaccagagtactcttactgcctcttttctaaatgttcaggaaaagcattgccagttcagtcttttcaaaatgagggagaaacatttgcctgccttgtaataacaagactcagtgcttattttttaaactgcattttaaaaattggatagtataataacaataaggagtaagccaccttttataggcaccctgtagttttatagttcttaatctaaacattttatatttccttcttttggaaaaaacctacatgctacaagccaccatatgcacagactatacagtgagttgagttggctctcccacagtctttgaggtgaattacaaaagtccagccattatcatcctcctgagttatttgaaatgattttttttgtacattttggctgcagtattggtggtagaatatactataatatggatcatctctacttctgtatttatttatttattactagacctcaaccacagtcttctttttccccttccacctctctttgcctgtaggatgtactgtatgtagtcatgcactttgtattaatatattagaaatctacagatctgttttgtactttttatactgttggatacttataatcaaaacttttactagggtattgaataaatctagtcttactagaaaataaaaaaaaaaaaaaggggggcaaagatccccggggggccaatacgaaccgttgtaaaagggcccaannnnnnnn

SEQ ID NO: 21573 - DNA, 1697 bp, Homo sapiens
  misc_feature 1, 2, 3, 4, 5, 6, 7, 8, 9, 10, 11, 12, 36, 69, 76, 86, 102,111, 120, 143, 1694, 1695, 1696, 1697: n = A,T,C or G
nnnnnnnnnnnnccaaaaaaaaacccccaaaagggngcaaaccggaccacgggtaacccccccccgccnccggttnggtaaaaatntgccccaccgggtttntccctgganccatagccnatttgtgcctggaaccttaatgncccaagatgccagtaccccgtaccagcctataatatccccccataccaaagtccatggggaaacaaacattattttgtttcttggtttatttaatacctatattccgccatacagtactttaaatgcccaattacagtgcaatctttatttattgtaaaattttttaagtgtacttatgtactaattttcccttgtagcatgttatatttttgtgttttatacttttgtaattttaggtcagtcttgttccttggcaacatctgtagtattattaatcttctgacattttcttatgtttttaaaaagataagagcatctagtgcattaaatgccaaaaaaaaaatacattatcagtgattgaaacgtttacatgtacccaaaaaccataatcatctcttggaagaaaatgctgagatcaatgaattattctgtgtgcctatattgacgtagtgagtactagagagttctgtattttattattgactataataattagtttaattagctttgcaaactgatggcatcaaggtaaatatatttttgccaaagttctggccttccaaaactcacccccttatttaaatgtgtgctatgacccactatgacacagcatctgcattttctaaaaaattccatgcaggtgttttggggagaggtattttttaagcaatgaaaattcaactgagtacaaagccccctcttggggggttggggaagtctcttttttgaaacacttcagaactgctgctataaagaaattctctaattggttgaatttttttttaagtaaatagtactttaggccaaaatttatatgaatatttgatcttcttgagattttcatactatcatttaaccaccaggaagctgaagtgtgtgaagtacaaagctgacagcactttattttattgctctccattatttggtattcattatattccttcagtcagaaaattattactctctatggcactgttttttatcacaaatatgtatatgtgatattgatatataactatatatattgccatcacacacgaacaataaaataaagtgttctattaacctgatctctttgcccttttgctatgtgaggagtgaatgagtggccttctgatgctctgactcttctctgtatgtcaaactcatccctggcacaagaaattccagtcatgtgaagcaaactgccctttgtcctcaaagaaattgttgaaaaagaaaactttttaaagagattttttgcatattctctgccttgttcttatcaacttgaaatgttggcattttctaaccttgttttgttggctacaataattcagtattcatgtcaaaattgagaagtgccctaattgaatgtgtttgaatgttatccttgcacaatcttacttggacgcacacaggttcccctggtggcatacatcagcgttcacctggaacaaaacggttccgctggatgcacatcacatgttacacgcaatgatatggcattttcccgtggggttattccagttttaaaaaaagcgcccatggcggaaattgtcgcggccgcnnnn

SEQ ID NO: 21574 - DNA, 247 bp, Homo sapiens
  misc_feature 1, 2, 238, 239, 240, 241, 242, 243, 244, 245, 246, 247: n = A,T,C or G
nntactgttaaaacttaactgtatttagaggtcaaatccaaattaaatggtaaggtaacatggctcttggaggatgagataactcattttttgagggaaaaattagtatatttcattagtcaggcaagatacagctaaggagttgtgtgatcacactaatgtaaccgcgcaaggacaattaggagtaaatctatcccaggagctatacccagatcataaatgggcctccatggagtcnnnnnnnnnn

SEQ ID NO: 21575 - DNA, 2175 bp, Homo sapiens
gacccacgcgtccgctggtgtttggcgtcgggtgagtcgcgctcgactctgctcgcgatgacccctcgggccgtcgtctccgtacccccgcgcccccctcccgtcgcgcgcctgcggacggaccccgccccagggcggtcaggcggcggcaggacctgtcagactggctgagaaggaggcgcggggccggaggtggagggaggagggttgctggcgaggccctggcccggacgtccaggggccgggaggctccaggcgatggagccggtctggggagacgccctgctggagaagtggccgggtcccggccgtgcgtgggccggccctgcgccacctgggtgacctcagacacctgggccttggacggcccggctgcccggcggccaacgcctgccctcccggcgccgcggcgggtcctggcggtggattggggccgacccgggcgtgttcgtgtggagcacctgccctgtgcccaacactatcctagatgctttggagggtggaggagcctcctgttgcacggtcttgcctaagaattaaacaaccaccatgtcgagcaaaaaggcaaagaccaagaccaccaagaagcgccctcagcgtgcaacatccaatgtgtttgccatgtttgaccagtcacagattcaggagttcaaagaggccttcaacatgattgatcagaacagagatggcttcatcgacaaggaagatttgcatgatatgcttgcttctctagggaagaatcccactgatgcataccttgatgccatgatgaatgaggccccagggcccatcaatttcaccatgttcctgaccatgtttggtgagaagttaaatggcacagatcctgaagatgtcatcagaaacgcctttgcttgctttgatgaagaagcaacaggcaccattcaggaagattacctaagagagctgctgacaaccatgggggatcggtttacagatgaggaagtggatgagctgtacagagaagcacctattgacaaaaaggggaatttcaattacatcgagttcacacgcatcctgaaacatggagccaaagacaaagatgactgaaagaactttagctaaaatcttccagttacattgtcttactctcttttacttctcagacacttcccccaccctcatccccatttccagtctgattatacaagtgctaagtggcagaaaggtctggaataaatacatcaaaaagaagaggcaaagctgtgaaactaagttgcatgcaacaggttctatgagggtgggggaagtgtctgagaagtaaaagagagtaagacaatgtaactggaagattttagctaaagttctttcagtcatctttgtctttggctccatgtttcaggatgcgtgtgaactcgatgtaattgaaattcccctttttgtcaataggtgcttctctgtacagctcatccacttcctcatctgtaaaccgatcccccatggttgtcagcagctctcttaggtaatcttcctgaatggtgcctgttgcttcttcatcaaagcaagcaaaggcgtttctgatgacatcttcaggatctgtgccatttaacttctcaccaaacatggtcaggaacatggtgaaattgatgggccctggggcctcattcatcatggcatcaaggtatgcatcagtgggattcttccctagagaagcaagcatatcatgcaaatcttccttgtcgatgaagccatctctgttctgatcaatcatgttgaaggcctctttgaactcctgaatctgtgactggtcaaacatggcaaacacattggatgttgcacgctgagggcatttcttggtggtcttggtctttgcctttttgctcgacatggtggttgtttaatttctggccaagcactgttatgaaggcatagggcttcctcaaagagaaagtctccaaagttgatttcttactctgacaaagactgtccccatttaatcctcacaacagttgcctatggtaggtactcttattcccattttactaccagtataacataacctctctgagcctcaatcctcttattcccattttactaccagtataacataacctctctgagcctcaatttttcatcagtaaaacatgatatctacttcaatgcaaagaactaattgagataacatatgtaaaaagactagtcagttcaaaaaagcgg

SEQ ID NO: 21576 - DNA, 1768 bp, Homo sapiens
  misc_feature 1, 2, 3, 4, 5, 6, 7, 8: n = A,T,C or G
nnnnnnnnagcgtggtcgcggccgaggacttccgcttgacctggcccggacgccagaaaatgttccacgtgggataccctgcgtggggttcactgtagtagctgcactaggtgattcttggagcgggcctgagagacaaggacatgtggatcccagtggtcgggcttcctcggcggctgaggctctccgccttggcgggcgctggtcgcttttgcattttagggtctgaagcggcgacgcgaaagcatttgccggcgaggaaccactgtgggctctctgactcctctccgcagctgtggcccgaaccggatttcaggaatccgccaaggaaggcgtctaaggccagcttagactttaagcgttacgtaaccgatcggagattggctgagaccctggcgcaaatctatttgggaaaaccaagtagacctccacacctactgctggagtgcaatccaggtcctggaatcctgactcaggcattacttgaagctggtgccaaagtggttgcgctcgaaagtgacaaaacttttattccacatttggagtccttaggaaaaaatctggatggaaaactacgagtgattcactgtgacttctttaaactagatcctagaagtggtggagtaataaaaccacctgctatgtcttctcgagggctctttaagaatttgggaatagaagcagttccttggacagcagacatccctttaaaagtagttggaatgttcccaagtagaggtgagaaaagggcactttggaaactcgcatatgacttgtattcctgtacttctatatataaatttggacgaatagaagtaaatatgtttattggtgaaaaagaattccagaaactaatggcagatcccggaaatccagacttgtatcatgtattaagtgttatctggcaattagcttgtgagattaaggttctgcacatggagccttggtcatcatttgatatatacacccggaaagggccgctggaaaacccaaagcgtagggaattattagaccaattacaacaaaagctgtatcttattcaaatgattcctcgtcaaaatttatttaccaagaacttaacacctatgaactataatatattttttcacttgttaaagcactgttttgggaggcgcagcgccactgtaatagaccacttacgttcattgactccacttgatgcgagagatatattgatgcaaataggaaaacaggaggatgagaaagtagttaacatgcaccctcaagacttcaaaacactttttgaaactatagagcgttccaaagattgtgcttataaatggctgtatgatgaaaccctggaagataggtagcaactagactgtcgtttttggtggagcggttcatttatttggaaactatgacatgaaaaccaaatttgaaaactcacatcctttcagcagaaggtaactgttcttgtcttgcacaagccaggcagatcatttctcctaagctgatatcattggcttattggatgaaacagtgtctgctattttattcacaattgaataaaatgaaaacttcaattaattgtggatttgatcagattgaattcgttttgtttcagattcctatttaaatatttcacttgtactgttgctgatttttgcatcttcttgaagagcaagagtctgtacattattaagcttagaaagtaagcaaaactgatttactggtttgcctttcagtttgttgaaatgtattgtcagtcctgtcactgaatgttaactttatatgagttagattt

SEQ ID NO: 21577 - DNA, 3390 bp, Homo sapiens
agagcggcggctgcgcctgcgccaacgccgtcagtccgcggggcccgatcccgacacctaactccacagagaagctctgctcctaagggaaagagaagacttcagccacagtttcgcagccaacctggcgacctcacctctctggcgacctcacttcccagccggctccgtttaagaaaaccccgcgcaggaccgcgcccgcccccgcctcctcgcgcccgccccctcgggtaacaaacatggcccccggcggggcggaagcgcttccgcacccaacgaagatggcaggaggggggggcgggactaaagggcgtaggtggatcgccgggggctgacgagtgcaccatggccaccgcggcaacctcacccgcgctgaagcggctggatctgcgcgaccctgcggctcttttcgagacgcatggagcggaggagatccgcgggctggagcgccaggttcgggccgagatcgagcacaagaaggaggagctgcggcagatggtgggcgaacggtaccgcgacctgatcgaggcggccgacaccatcggccagatgcgccgctgcgccgtggggctagtggacgccgtgaaggccaccgaccagtactgcgcccgcctccgccaggccggctcggccgcgccccggccaccgcgggcccagcagttctgtgccttcccctgcagccacagcagccatcccaggagaagttctacagcatggctgcccagatcaagctactcttagaaattccggagaagatctggagctcgatggaagcctctcagtgtctccacgccacacagctctacctgctctgctgccacctccacagcctgctccagctggattcttctagttcccgatacagtcccgtcctctcccggtttcctatactcatccggcaggtggcagccgccagccacttccggtcaactattctgcatgaaagcaagatgttgctcaaatgccaaggtgtgtctgaccaagctgtggccgaggccctgtgctctataatgctcttagaagagagttctcctcgccaagccctcacagacttcctgctggccagaaaggcaactattcagaaacttctcaaccagccacaccatggtgctggtatcaaggctcagatttgctcattagtggagttgctggccaccactctgaagcaagctcatgcccttttctacactttgccagaaggactgctgccagatccagccctgccatgtggcttgctcttctctactctggagaccatcacaggccagcatcctgccggaaagggcactggtgtcctgcaggaagagatgaaactctgcagctggtttaaacacctgccagcatccatcgtcgagttccagccaacactccgaacccttgcacatcccatcagtcaggaatacctgaaagacacgctgcagaaatggatccacatgtgtaatgaagacattaaaaatgggatcaccaacctgctcatgtacgtgaagagcatgaagggtctcgcgggaatccgggacgccatgtgggagttacttaccaatgagtccaccaatcacagctgggatgtgctatgtcggcggcttctggagaagccgctcttgttctgggaagatatgatgcagcaactgttccttgaccgattacagactctgacaaaagaaggctttgactccatctccagtagctccaaggagctcttggtttcagctttgcaggaacttcaaagcagcaccagcaactccccttcaaataagcacatccactttgagtacaacatgtcgctcttcctctggtctgagagtcctaatgacctgccttccgatgcggcctgggtcagcgtggcaaaccggggtcagtttgccagtagcggcctctccatgaaagcacaagccatcagcccttgtgtacagaacttctgttctgccctggattctaagctgaaggttaaactagatgacctcctggcttacctcccctctgatgactcatcactgcccaaggacgtttctcccacacaggccaagagttctgcctttgacagatacgcagatgcggggaccgtgcaggagatgctgcggactcagtccgtggcatgcatcaagcacatcgtggactgcatccgggcagagctacagagcattgaagaaggtgtgcaagggcaacaggatgccctcaacagtgccaagctgcactcagttcttttcatggccagactctgccagtccctgggagagctgtgcccccatctgaagcagtgcatcctgggaaaatcagagagctcagagaaaccagcaagggagtttagggctctgagaaaacagggaaaggtgaaaactcaggaaatcattcctacacaggccaagtggcaagaggttaaagaagtactcctccagcagagcgtgatgggctaccaggtctggagcagtgcagttgtgaaagttttgattcatggattcacccagtcattacttctagatgatgctggctcagttctggccacagccaccagctgggatgagctagaaattcaggaggaggcagagtctggcagcagtgtcacatccaagatccgactccctgcacagccgtcctggtatgtacagtccttcctgtttagtttatgccaggaaattaatcgggttggaggccatgccttgccaaaggtgacattacaggagatgctgaaaagctgtatggttcaagtagtagctgcctatgagaaactctccgaagaaaaacagattaagaaagaaggtgcatttccagtcacccagaaccgggcgctgcagctgctttatgatctgcgttacctcaacattgttctgacagccaagggtgacgaggtgaagagtggccggagcaagccagactccagaattgagaaagtgactgaccacctggaagccctcattgatccatttgacctggacgttttcacgccacacctcaacagcaaccttcatcgcctggtgcagcgaacttctgttctgtttggattggtgactggtacagagaatcagctcgccccccggagcagtacgttcaactcccaagaaccccataacatcctgccactggcatccagtcagatcaggttgggacttctcccactgagcatgacaagcactcgaaaggctaaatcaaccagaaacatcgaaacaaaagctcagtacgatgccaactgttaagcctgcaggaatcctcctgggttgtcccccccggcacgctccacagctggtgacccgacagttcctggctccttgttcagacagcttgtcagtgaagaagacaacacgtctgcaccttcattattcaaacttggctggctctgctagtatgactaagtaacatggcaacacatctgtctctccctaaataaatactaccaca

SEQ ID NO: 21578 - DNA, 874 bp, Homo sapiens
caccaagatgtttagctttataccttggccacagagagggatgaactgtcatccagaccatgtgtcaggaaaattgtgaacgtagatgaggtacctcttttttttatttcaaaagaagtgcttttctgtaggctgccttgtgggactcccaaaggatgccatttcctgagacacgtcaaggtatctgcatcttagacagtggtgttaccatgtccgcacatcagtcagtgcattttctcttggccccaggccagtaatgtggttgtgtacactggtcacagctcaaaaaactgaaaaatgaactctgagctttactgcaaagaatgccagctaacaaaaataactctgccagagcagtgccctggacaggtttgcagctctgagatctaacagtgctgatgtatgggagtccagtagaatgcttaaaaagaaaggaaaaaatagaaaaaatccatctgctgtgccgttaacattccaaaaaggtaatgcccaagaactccaaatgggtcctaatgtgctgtttaagactcagaaaactcagctttaagttctacaccactctgtgctcccagactgggaacaaaaacagggtatttccgtgaagtgcaaatagatgattgtatggaggaatcagtgggtaggaattattttgctagcatgttaaagatacttcaggtgtaggcatttcaagaaataataaagcccaatactctaacccttagaccagaacttggggctacagatggaatacaatgctttgaataaaactataacccctaccagagacctctttgaaaacacagcagtgctagtatggatgtgcttcccctagcatgcaattccccatggatccagccttattgcgtttctctgt

SEQ ID NO: 21579 - DNA, 2757 bp, Homo sapiens
acagtaacatgaccagtccccgaacgtgacagagtttaaggcccatctccagcgtaatctcggcgccggtgacatccctactcgctggtcaccaggaccggcaccagaaaactgtgaaggtcgaaacagctgcgtttcctgttttaatgttagcgttgttaatactacctgcttttggatagaatgtaaagatgagagctattgttcacataactcaacagttagtgattgtcaagtggggaacacgacagacttctgttccgtttccacggccactccagtgccaacagccaattctacagctaaacccacagttcagccctccccttctacaacttccaagacagttactacatcaggtacaacaaataacactgtgactccaacctcacaacctgtgcgaaagtctacctttgatgcagccagtttcattggaggaattgtcctggtcttgggtgtgcaggctgtaattttctttctttataaattctgcaaatctaaagaacgaaattaccacactctgtaaacagacccattgaattaataaggactggtgattcatttgtgtaactcactgaagccaaaatactatcttttaagatgtcccacatggaagacgctattccaggatctttaaatttccatggatgcatataggatgtttgggagcatcatccgtgaagaaaaaatcaattaaatcattgtgttcaacaggaatatttaaaatattctgcatgaatcctgtggctgtcttattttaaatagctgctgctgtgggattatattttttttccttaacatgccaaatataactttctgaaagtgatggaaaatgttgtcttgtgcagacaacatcatggctcttggcagtttaaatttagtaattttaatttagtgaacagaattgagaagaacgtgccaaatgagaatcaattaggtggatttttggctgtcatttcaaaagtggaataaatttattaatttagtagtactaaatggtatccttagattaaaattttgtgcttgataacagctgttttttctacattagaaataagatgccacacaaggaactacattccagatttaaagaaatgaaaggataccattagtgtgtataacagattattgttcatacttgtaaagcaccttatgtcattgagaatataaagaacagtgccttagaagacagtgaaaggtaagctctagcttaatgtctatgatttgttctttgacattaaggaaggtaaggattggtcagaggatgtaacttgatgtgagcagtagtaaacctgttttagatatcatactgttaatattttattgaaaatttatttcagagcggagaaacttaagctaaagtctgttatacagaattgaaagccttcgtatcttgaacctcccaacatttttcttatggctgttgaaaagtatagagctaaattgatttaattacactttcctttgtactttaaaaaaaagtatgctagcactattgtaccttgaaaggatttccaccagactgtcttgagtagtgacttctttggtgaggcaagaaggatatacattattttagaatcatttactatttaaatgagacaatcatattattttagaatcatttattttaaatgagacaatcattttaagttttaagataacagaagtgaccaatgtaatttcacaacacctaaggattttttggttgatcaggttactgtagatttttactgattgtcctggatgaatagactgtgctttttctttttctctcccttccttcttggtttcccatagtataataagcatgcatactttaacttctatagttttctcctttagagggtcttcttcagttttagaggtttacttctcccttgcctttgactcattggactagtgcagaggctttaagtagtttaaaatgggcttttgcttttctaggtcattaacgttttttatttagtttctttagccaatagtggctgagtttcgcacttgattttcaatattttatagtaagaaatgacaaactgctttggttcatttcataaacaaactctgcatttagataactattaaaggttgttaagatgaagatttactgtttctttgttactcgttggtacagctgtttgttttacttgcacatttgtacatatacttaatgttttcaagtgccttaattgtttaaaatctctggcttcaaagtttcttggggaaaggtcggtttacctcacattttttgtttccattagtaatattctaggtacctcacaaaatgtattatggtgccatggctgttagtttttagtgagtgctgtaggattaattcgaaaataggcagaattccattcctcccaaggcggcaaaaattagctatactgatgtaattgtcatttacctgggtatgaattccctgacacacattcatgtcaacatatgtagcaaattttgtgaaacaaataacacttgaacacaggaatttgaacaatggctagtacagctaaattaactaggaaaatagacagtacaaagtgatctgaacaaatcaagcgataactattgcactattacaaggttattctgagaccatatcggggagaaaaacaaggtatttacacataaatacacaatgtagtacatttctaagagtataataagaataacacacggtataccattacgataaacagataaaaaacgtatgaaacagtctcaatgagctgataaatcgacctccactcctcaataaag

SEQ ID NO: 21580 - DNA, 1095 bp, Homo sapiens
acaaggcatgatgagtccttttgcttttaggcttttgacttctggttttagactttctttagcttctgttgttagacaacattgtgcaagcttggtttttataagtttgcatggattaaactgaacttaatgaaattgtccctccccccaaattctcagcacaatttttaggcccacaaggagtcaagcacctcaaggagatcttcagtttgaacttggtgtagacacagggatactgatgaatcaatattcaaattagctgttacctacttaagaaagagaggagaccttggggatttcgaggaagggttcgtaagggagattttagctgagaaataccatttgcacagtcaatcacttctgaccaagttatcagaaaaaggagaaaagaatgtctccccactaaatgttctagggtggtgagaaatctagggtggttatctaaatcaacaatatttagatattccaatatctaaatattgttggaaatactctcctgaagtgttcattgaactctaagagagacagcttgtgtatcagtggcagggtttaaggttcattttttattcccatattaatccttaataatttagacaaatttccttctgagtttaaggataaaatgggatgggttctgcctgggcctggccctcatggggacatcaaagggcaatgttgcaaaaaaaaaaaaaaaaaaaatcagaccatcagattgcatggggggaaccacccccataattaaattacctccacccagtcccacccttgacacctggagattatggggattgcaattcaaggtgagatttgggtggagacatacagccaaagtatattattcaaataagaaatcaaaagagaaattggaaagttcattgagctgaaaatgaaaacccgatatatcagaatcagggagttgcagctaatgtatgcttgggggcaaatttaagcactaagatcctatattataacaaaaaagaaaggtctcaaatcagtgacctgagttttcaccttcagaaactggaaagagaagagcaaattaaacacaatgtaagcagataaagaaaataataaaaagaacagaaatcaatgaaa

SEQ ID NO: 21581 - DNA, 936 bp, Homo sapiens
  misc_feature 936: n = A,T,C or G
ggccccctgttgtgttgctgcggagaggcgcagtcatgcaggaaaacctcagatttgcttcatcaggagatgatattaaaatatgggatgcttcatctatgacattggtggataaattcaacccacacacatcaccacatggaatcagctcaatatgttggagcagcaataataactttttagtaacagcatcttccagtggcgacaaaatagttgtctcaagttgcaaatgtaaacctgttccacttttagagcttgctgaagggcaaaagcagacatgtgtcaatttaaattctacatctatgtatttggtaagcggaggcctaaataacactgttaatatttgggatttaaaatcaaaaagagttcatcgatctcttaaggatcataaagatcaagtaacttgtgtaacatacaattggaatgattgctacattgcttctggatctcttagtggtgaaattattttacacagtgtaaccactaatttatctagtactccttttggccatggtagtaaccagtctgttcggcacttgaagtactccttgtttaagaaatcactactgggcagtgtttcggataatggaatagtaactctctgggatgtaaatagtcagagtccataccataactttgacagtgtacacaaagctccagcgtcaggcatctgtttttctcctgtcaatgaattgctctttgtaaccataggcttggataaaagaatcatcctctatgacacttcaagtaagaagctagtgaaaactttagtggctgacactcctctaactgcggtagatttcatgcctgatggagccactttggctattggatcttcccgggggaaaatatatcaatatgatttaagaatgttggtatcgccagttaagaccatcagtgctcgcaaagtatttgttcagtgaatagcatttcagn

SEQ ID NO: 21582 - DNA, 924 bp, Homo sapiens
  misc_feature 1, 2, 3, 4, 5, 6, 7, 8, 924: n = A,T,C or G
nnnnnnnngctaacccccgataaagtttacctcctgaagccaaccgcatccccccccggaaaagggtaaataggttctccacgcctataaaaaggttaatacaggacccaaaactttcaccgaattagtcactaaccccgggaaaccaaacttgtgaatggttttatatgatttgtcactaaacaatatacatatgctcaaagcacttttaaaaacttttaagttgtgatttaaccagaacttctgcaatatccacaagaaattaggtaaaattctaacgttctggtaatcgacatgttaggaaacaacagatattacatctgaaacttaggaaataaaatacacaaaataaaaggactattttaaagtaagggcataagaataggaattgctaagaaactatcagccctgaagcttttccttggaaacgtcttaaacttacagggaagacaaggtgggcaaaatatgcagagctacaaaacaaagcaatgataagctacagcagaagagggaatgcattctgtaatccacaggatcagataaatggctctaagcagttaccagtaagtattttagtgttctttctattatattaatttaaaaatttaaaccgagttaacagcagttttacaagttaagagttgacacaagcaaattagaagaactctaaaattagccttccttaattgggtaagatttaccatatccatctgaacaacccattttcccatcctgagatctaaaagaatgtgaatattgacccattttaatacttttcaagttcagatggaagtcatactgtacaccagtctctgattttagcggacgcgtgggcggacgcgaactcctaaaatcaacaactcacttagaaaagaaaggagggagagggttctgggaattaatccagccacaagtcattccaan

SEQ ID NO: 21583 - DNA, 428 bp, Homo sapiens
  misc_feature 427, 428: n = A,T,C or G
gtgtgaagtaagcaatctattttcacttgctattaacagcaaacgtacaactttatctgttatttggctggattatttggctttcaaattaacaacatgaaaactatgcagaaattagtctgtgccctataagacagagatgtagataatttgttcaaaacatgagatgatattcagatattctctcaaaggcaggactccaacaccgcaggtggaaaaccaacaaaaggaagaaaacagaaaggaggaaagggaagatgaatgaccgactttgagaactaaagcacagaacaaaggaaattgaactttctagagacaggcatgtttcaactacagaaacagaggaacaaggggtgtttgtacagcaagctgttatttatgaaagagagcctgttgctgagagacacctacatgaaatccagaaacnn

SEQ ID NO: 21584 - DNA, 1301 bp, Homo sapiens
  misc_feature 1, 2, 3, 4, 5, 6, 7: n = A,T,C or G
nnnnnnnagcatcctgctgggcacttggaacctgtccttgcaatgtatcagtccacttgaaattttgaattaatttccatgggatttaatgtagctttatggtataccaaatatgcttcaagactggctggaaaagaaaatataacagaagatgaagcaaaagaagttcatcgaagcctaaagattgcagctgggatttttaaacatttaaaggaaagtcatctcccaaaactcattacacctgcggaaaaaggaagagatttagagtcacgactcatagaagcatacgttattcaatgtcaggctgaagctcaagaagtaacaattgctcgagcaattgaactaaaacatgctcctggactaattgctgcactggcgtatgaaacagccaatttctatcaaaaagctgatcatactttatccagtttggagcctgcatattctgccaaatggagagaatatcttcacttgaagatgtgtttctacacagcttatgcttactgttaccatggtgagactttattggctagtgataaatgcggtgaagcaatcaggtctctccaagaagcagaaaaattgtatgcaaaggcagaagcactgtgtaaagaatatggagaaaccaaaggacctggaccaacagtcaaaccttcaggacatctgttctttaggaaacttggaaaccttgtgaagaacaccctagaaaaatgtcagagagaaaatggatttatttactttcaaaaaaattccaacagaagccccacagctggaactcaaagcaaattatggtctcgtagagcctatacctttcgaatttcctcctacaagtgttcagtggacaccagaaacattggctgcatttgatctcaccaaaagacccaaggatgacagtactaaacccaaaccagaagaagaagtgaaacctgtgaaagaaccagacatcaaacctcaaaaggacactgggtgctacatctcctaaaatacaacttgcacttagaatttctctagcagtaaataagataaaccacagaatttcagttcttatttctcaaaatgatttctctgaagcttgtagaataactattatattcagagggttatctgccttcagcttacttgttcttaatttttaatacagcggagatgtttcttgctttgttttcagactctcctttttaatcaggacaacatttgaaagattttattgtgcctctaaagggtatatttgggggttgggtctttttgttaaactctggatagtaataagtttcaggtcagtataggcccgaatcatgtggtattag

SEQ ID NO: 21585 - DNA, 2587 bp, Homo sapiens
  misc_feature 1, 2, 2587: n = A,T,C or G
nnatgtgcattggcccgcacttgggatcccctggtgacggtatttccgagtggtcccaatccccttaggatggttcctgtggtaacgaacaaatttgatttctgctgccaattacagcagaactcagtcatatataaacctgagttagcatgtctagtcacatttttctccggtcatgatgtctctcttctgtggttcctcttctttggcaagtggcttggcagcaaatatacccactagggacctctctgccttctcttagtggcaagttccccatcaacaaccttgagaatttgggcctccctttgctaactacttgcaagagtatgactcgcctgtaaccagcaaatttttactcttagctttcaattcaaattagtgtgtctgaggtcaccagaccaaacagcaactcagacttgtgctgtcacttctggaaatagaagtctgcattcaaagagcacggcaatggaaaatacttttggattctccataggggggccttggaaaccacagacacacttgcccatgtctttatgatgaatttgatgactgcccaacctctgattctttaacaggggcagggaaactgaatattccagacctggctccctaaccatgcacatagattaaaccactgggaagttccaagaatgtatgtgatgttttttcgagtctgcagagtattgatctgctcagaaaagcaccatgccgccagtctaatgctgtcaatgggctgctgggcctgagagggaaaccaccctactggtcccctgtcatacatgttaacattcctgtgctccaattgtcctgtcccactaccacctgctctgcatctgccctctaggcatggccactctggaaatgcattcaaaattaaagttgggccctagtcagggttactttgtatttttatggaatatataaaatatacttgtcgattggtacatttgtgcaaagacagatatgacttccaaacaagacagacattcattatagttgtcttacttcacaataagctactaaaaacagtcttctggaataagattgtattagtgctcactaaacatgcatttcatttaaacaaggcaaaacacttaatttggtctgcattacccaatatgttatatacagccgtctttttattttatcacaataggcaacaagatgggtctggttttggaatatgttaccatttgtgtttaatttccaaagacacgcatattagctcaactagtgtaaacctgtgaaaaaatagctgagccatctttttcctctcctctgttaatttatcttgaaatgttcacagcttagaaactacagcctgctggggaagagaggggagtgggcccccatggggaaatgtcccagctcgctggaatagcctcaccccagagggtaacttgttcttggggaatccagcatccggtgccatccatcacccctacggcacgtgtgacaacagacccaggtggggagttttgtctttcaaacaaaagccccttgaagcttgcaatagaatcacaggactggatgggtttcccttcttttgccccaacccccgagtcttacgttttagaacagagacattagaataaaaaaaaataatagtaacgattaaaaatcatcaaacaatgaacaccacgaagtctgtccatgctctccacaagcacactggggctctgggcattcccacgaagcatccacgacaaaagaagctgaaggcgtcacggaggaaggcgcatcagaccgcacaggggacggcatcaccattgatattgtttggcaaaaaaaaaaaaaattgttaaaaagaagaatcaaaagggaacacaagcagctctacaattcgattggtgggcgcagggctcagaactggccggcactgctcgggtcgcactgcaggaggcgcacaatggacgggtcgcttttggctcctcggatgaactcttccagggagagttttccgtctctattggtgtccatctggcggaagatcttttctgttcttttctctggggttgactcatcttcaggcattttcattacagaggaaaccatcttatagattgcctgcacgatctctagcatctctgccttgctgatatagccatttccgtccaggtcgtacatgctgaaggcccatttcagcttctgctccagcttccccctcgaagttacactcaaggcgatgatgaattctctaaagtctattgtcccatctccatttgcatcgaaggtgcggaagacatgctctgcaaatttggaagcatccccataagggaaaaagttcccatatattttcttaaactcttccattgacaaatgtccactggggcagtctctcaagaagcctttataccattcctggatctcatgctctgtaaagtctgtgctttccagcaagtcctgcatgacctccgggcgcagcttgctgttctgtttccccatcctggcggcaagaattcagctcactcagaagaagtgcaagatttaacagtccatgctctgcagcccctggaaacagcagtagcagcagcagcaaggtccagcatccaccagattctcacaagccattacggacgcgtggtcn

SEQ ID NO: 21586 - DNA, 2755 bp, Homo sapiens
ggcacgaggcagccttcctgaagaattctcagcccctgattttgcaaacctgaagcactatcaaaaacagcagagtcttccaagtttatgcagcacttctgacccagacacacctcttggggccccgagcactccagggaggatctccctccgaatatctgagtctgtcctgcgggactccccgccacctcatgaggattatgaagacgaagtgtttgtgagggatccgcaccccaaggccacgtccagccccacatttgaacctcttcccccacccccacctcctccaccgagtcaggaaaccccggtgtatagcatggatgacttccctccacctcctccccacactgtatgtgaggcgcagctggacagtgaggatcccgaggggccacgccccagcttcaacaaactttctaaagtgacaattgcaagggaaaggcacatgcctggtgcagcccatgtggtaggtagtcagacactggcttccagactccaaacttctatcaagggttcagaggctgagtccacaccaccctccttcatgagcgttcacgcccaacttgctgggtctcttggtgggcagccagcacccatccagactcaaagcctcagccatgatccagtcagtggaactcagggtttagaaaagaaagtcagtcctgatcctcagaagagttcagaagacatcagaacagaggctttggccaaggaaattgtccaccaagacaaatctctagcagacattttggatccagactccaggctgaagacaacaatggacctgatggaaggtttgtttccccgagatgtgaacttgctgggtagcaggcagatccaaaggatatcatgaagtttccagggcctttggaaaaccagagattgtctttcctgttggaaaaggcaatcactagggaagcacagatgtggaaagtgaatgtgcggaaaatgccttcaaatcagaatgtttctccatcccagagagatgaagtaattcaatggctggccaaactcaagtaccaattcaacctttacccagaaacatttgctctggctagcagtcttttggataggtttttagctaccgtaaaggctcatcctgaggaagatgagagaattccagtactaaaggtattggcaagagacagtttctgtggatgttcctcatctgaaattttgagaatggagagaattattctggataagttgaattgggatcttcacacagccacaccattggattttcttcatattttccatgccattgcagtgtcaactaggcctcagttacttttcagtttgcccaaattgagcccatctcaacatttggcagtccttaccaagcaactacttcactgtatggcctgcaaccaacttctgcaattcagaggatccatgcttgctctggccatggttagtctggaaatggagaaactcattcctgattggctttctcttacaattgaactgcttcagaaagcacagatggatagctcccagttgatccattgtcgggagcttgtggcacatcacctttctactctgcagtcttccctgcctctgaattccgtttatgtctaccgtcccctcaagcacaccctggtgacctgtgacaaaggagtgttcagattacatccctcctctgtcccaggcccagacttctccaaggacaacagcaagccagaagtgccagtcagaggtacagcagccttttaccatcatctcccagctgccagtgggtgcaagcagacctctactaaacgcaaagtagaggaaatggaagtggatgacttctatgatggaatcaaacggctctataatgaagataatgtctcagaaaatgtgggttctgtgtgtggcactgatttatcaagacaagagggacatgcttccccttgtctacctttgcagcctgtttctgtcatgtagtttcaacaagtgctacctttgagtgtaaactaaggtagactactttgggaatgagaacatgcaaaatcaggaaaggctgtagaaggaaatataccttaacaggctgatttggagtgagccagaaaaaaaaaaataaaactctcattatttgtgtggctaattataattcagcgttatttaagcacataaagaccaaaaaaaaaaaaaaggaattccaaaaaatccaaattttttttaaatttaaaaaatcttttggtggtatgtcagtggccttttttcctggccataatgtaacgtagtttgccccgtcaaaatttcaattaaatttcggggccggcattcctgttccccctcagcttcctgatttattttcccggtggctttggtggttctccatttaatagttctgactttatgcatgtggatctataatcgatttgcactgcagttgaatgagccattttttcgtgtgacagcatgactcaaggttcccattagtctgaaacggggtgcttgggaagtggtctcattttaatcacgagattgcgcgaagaaaaagtctccatttacccggtggattgtgggtctcctttccaatatcatttacactcatggctttccacgtcggtgacctcaaaggatgcctcaaatgggtgtatttggccacctcacgtggtggcaagcctttcgcgcttgttcaaccattgtctcacattctcgggtcccccgaacgtttttcatcaatgattttaccgagtaccctaatcaagaagagcaattgggggcgacaagggagtaataataacgctgggagatataataacccccc

SEQ ID NO: 21587 - DNA, 3472 bp, Homo sapiens
  misc_feature 1, 3464, 3465, 3466, 3467, 3468, 3469, 3470, 3471, 3472: n = A,T,C or G
ncacccacgcgtccggtcctccgcgcggaaagcgctgcttttgcctggccgccctagccgctggctcatccaagtggccttcgccgctctcttgcgtcccaaccagagcgctggccacctcgccgcccagctcacgccgcgcccgcgctcccaggctccgggttttcttaaatgttttcttggagccttaaagatggagatgacagaaatgactggtgtgtcgctgaaacgtggggcactggttgtcgaagataatgacagtggagtcccagttgaagagacaaaaaaacagaagctgtcggaatgcagcctaaccaaaggtcaagatgggctacagaatgactttctgtccatcagtgaagacgtgcctcggcctcctgacactgtcagtactgggaaaggtggaaagaattctgaggctcagttggaagatgaggaagaagaggaggaagatggactttcagaggagtgcgaggaggaggaatcagagagttttgcagacatgatgaagcatggactcactgaggctgacgtaggcatcaccaagtttgtgagttctcatcaagggttctcgggaatcttaaaagaaagatactccgacttcgttgttcatgaaataggaaaagatggacggatcagccatttgaatgacttgtccattccagtggatgaggaggacccttcagaagacatatttacagttttgacagctgaagaaaagcagcgattggaagagctccagctgttcaaaaataaggaaacccgtgttgccattgaggttatcgaggacaccaaagagaaaagaaccatcatccatcaggctatcaaatctctgtttccaggattagagacaaaaacagtggatagggaggggaagaaatacattgtagcctaccacgcagctgggaaaaaggctttggctaatccaagaaaacattcttggccaaaatctaggggaagttactgccacttcgtactatataaggaaaacaaagacaccatggatgctattaatgtactctcccaaatacttaagagtcaagccaaatatattctcctacatgggaaccaaagataaaagggctataacagttcaagaaattgctgttctcaaaataactgcacaaagacttgcccacctgaataagtgcttgatgaactttaagctagggaatttcagctatcaaaaaaacccactgaaattgggagagcttcaaggaaaccacttcactgttgttctcagaaatataacaggaactgatgaccaagtacagcaagctatgaactctctcaaggagattggatttattaactactatggaatgcaaagatttggaaccacagctgtccctacgtatcaggttggaagagctatactacaaaattcctggacagaagtcatggatttaatattgaaaccccgctctggagctgaaaagggctacttggttaaatgcagagaagaatgggcaaagaccaaagacccaactgctgccctcagaaaactacctgtcaaaaggtgtgtggaagggcagctgcttcgaggactttcaaaatatggaatgaagaatatagtctctgcatttggcataatacccagaaataatcgcttaatgtatattcatagctaccaaagctatgtgtggaataacatggtaagcaagaggatagaagactatggactaaaacctgttccaggggacctcgttctcaaaggagccacagccacctatattgaggaagatgatgttaataattactctatccatgatgtggtaatgcccttgcctggtttcgatgttatctacccaaagcataaaattcaagaagcctacagggaaatgctcacagctgacaatcttgatattgacaacatgagacacaaaattcgagattattccttgtcaggggcctaccgaaagatcattattcgtcctcagaatgttagctgggaagtcgttgcatatgatgatcccaaaattccacttttcaacacagatgtggacaacctagaagggaagacaccaccagtttttgcttctgaaggcaaatacagggctctgaaaatggatttttctctacccccttctacttacgccaccatggccattcgagaagtgctaaaaatggataccagtatcaagaaccagacgcagctgaatacaacctggcttcgctgagcagtaccttgtccacagattagaaaacgtacacaagtgtttgcttcctggctccctgtgcatttttgtcttagttcagactcatatatggatttcaaatctttgtaataaaaattatttgtatttttaagtttttattagcttaaagaaataatttgcaatatttgtacatgtacacaaatcctgaggttcttaattttagctcagaatataaattagtcaaaatacacttcaggtgcttaaatcagagtaaaatgtcagctttacaataataaaaaaaggactttggtttaaagtagcaggtttaggttttgctacattctcaaaagacagcaggagtatttgacacatctgtgatggagtatacaacaatgcattttaagagcaaatgcaacaaaacaaatctggactatggataaataatttgagagctgccacccacaaatataaatacagtactcatgctgactgaaataataagacatctacaaatttataaacaaaaagtgattgtcattatcctgcttatgtactagattcaggcaagcattatagactttttggttgcggtggcttttgcatttatattatcaatgccttgcaggaacgttgcattgataggcccattttatttttttattttttttttcgagacaggatctcactctgtagcacaggctggattgcagtgcaatcctgcaattctcaatcttgcactgcagcctcgacctcccaggctccagtgactctcccacctcagcctcctaagtagctgggagtacaggcgcgcaccaccacgcctagctgatttttgtatttttttgtagagacgggggtttggccatgttgccgaggctaactcctgggattacaggcatgagctgtgctggccgggtttttttttcttgatgtaaacgtgtacagctgttttattagttaaggtctaatttttactctaggtgccttttatgttcagaactctttccactggactggtatttgctcaaaaataaataatggtagagaagaaaactataaaaatggacaaggctttcttctatcagtagcgtttaccctttgtcaccagtggctttggtatttccatgtctggcattgcataaacttctctggtgtgaaaggataaatatgcctttctaaagttgtatatcaaaattgtatcaatttttattttctatgatttctagaaacaaatgtaataaatatttttaaaatctcctttctactggttatgtaaataaatcaaataaatatatcaaaatgagnnnnnnnnn

SEQ ID NO: 21588 - DNA, 631 bp, Homo sapiens
  misc_feature 1, 2, 3, 631: n = A,T,C or G
nnnatcttgaaacttctttattaaccaaattattttgtagtgaaatgccatttcccttctaagaaatgaatggaaataaacaatagagttattaaggaaaaatatagtatttgctgtgataattttcctggtaagatgtaagaattaatttacttttaacttcagatgctatcattttttaccccctaggatactgtcaggcaccaacccttcaccagaaattgtttaaagatttatttggagagagagatgtggctcggttatagtatatgtatttcaaaactcacacagtacactttaaatatatacaatttcaattctttgttgttgttgttgttgttgttgctgttgttgttttgagaccgagtctcgtactgtcacccgggctggagtgcaatggtgcgatcttggctcattgcaacctccgcctcccgggttcaagcaattccctcgtgccgaattcttggcctcgagggccaaattccctatagtgagtcgtattaaattcttaatcatgtcatcactgtttcctgtgtgaaattgttatccgctcacaattccacacaacatacgaagccggaagcataaagtgttaaaccctgggtgccctaatgagttagctaacttacan

SEQ ID NO: 21589 - DNA, 1238 bp, Homo sapiens
  misc_feature 1, 2, 3, 4, 1236, 1237, 1238: n = A,T,C or G
nnnnaacaaatttcctaatggcgtattttagccaacatccacatttaactaaacagataggaataaagaagaggtatgaaatgttttatattcatgtagctcaaaatatgtttgtgtgcctatatttaaagtgaaagttttttgatatctaggaccacatattttctatattctgctgatctattccaatagacaataataactatgtaaattttatcactataggcaataaatagttttcttaatagggaagtgatctttccaaatagtaaaattacatctttattttataacccaaatacattatctacctacttttgagcaacttaatgtacgtgtccctggctttgggaagaccttctcactggagttcctggaccccagcaaaagcagcgtgggttcctatttccacaccatggtggagagccttgtgggctggggctacacacggggtgaggatgtccgaggggctccctatgactggcgccgagccccaaatgaaaacgggccctacttcctggccctccgcgagatgatcgaggagatgtaccagctgtatgggggccctgtggtgctggttgcccacagtatgggcaacatgtacacgctctactttctgcagcggcagccgcaggcctggaaggacaagtatatccgggccttcgtgtcactgggtgcgccctgggggggcgtggccaagaccctgcgcgtcctggcttcaggagacaacaaccggatcccagtcatcgggcccctgaagatccgggagcagcagcggtcagctgtctccaccagctggctgctgccctacaactacacatggtcacctgagaaggtgttcgtgcagacacccacaatcaactacacactgcgggactaccgcaagttcttccaggacatcggctttgaagatggctggctcatgcggcaggacacagaagggctggtggaagccacgatgccacctggcgtgcagctgcactgctctatggtactgggtccccaaccagactccttctactatgagagcttccctgaccgtgaccctaaaatctgcttggtgacgggatggtactgtgaacttgaagaagttgcctgcggtgcaaggactgggagagcgcaggagcccaagtgttgctgccgagctgcaggacggagacatgaaatgtggcaagcacaccttggctattgaaggtggtctggggcggacctggcagatctgggtgggcggcccgnnn

SEQ ID NO: 21590 - DNA, 793 bp, Homo sapiens
  misc_feature 786, 787, 788, 789, 790, 791, 792, 793: n = A,T,C or G
acgcgggggctgcacagcctgcggcgcagcggaggcggaccgcagtcgagtctgcagagtgttggaatcgtccgcactaaagtcccctgcagcgtgaccatgtcgagaccccggaagaggctggctgggacttctggttcagacaagggactatcaggaaaacgcaccaaaactgagaactcaggtgaggcattagctaaagtggaggactccaaccctcagaagacttcagccactaaaaactgtttgaagaatctaagcagccactggctgatgaagtcagagccagagagccgcctagagaaaggtgtagatgtgaagttcagcattgaggatctcaaagcacagcccaaacagacaacatgctgggatggtgttcgtaactaccaggctcggaacttccttagagccatgaagctgggagaagaagccttcttctaccatagcaactgcaaagagccaggcatcgcaggactcatgaagatcgtgaaagaggcttacccagaccacacacagtttgagaaaaacaatccccattatgacccatctagcaaagaggacaaccctaagtggtccatgaagagtttgattttgttttgagcctggaggaaaaggaaccaagttaactgagatactgctgctggaatgggcgagacattgctgcaaagaagtcaagcttttttcagacaaaaggtgtgagggggcttgcttggtatgcttacctgggcttgtgtacctcagtggtttttgtgtacttttttcaataaaatatcaaagttgaagaannnnnnnn

SEQ ID NO: 21591 - DNA, 540 bp, Homo sapiens
  misc_feature 540: n = A,T,C or G
acagaaaagggaacatctccgatgggtgttaaggtaggagtttccatgcagccctttatgtctgagaaatagtctcctctgccattggggtccctgcggaatcttctacaggaattgcagctcttcacgtcatgctaggttaccagcatgggcttcccagagcacttcactctgtttctaactccactgacttttctgacttgtttcttgagggacttggaaaaggggaaggtattattcatccattttttttctattgtttctcctctggggggaaatggtgttttgtttttgtttgagttttgtgttttagttttttggttttggttttgttttgtttttttgtcattcagattcactaaatttggggatggttttattaaagtatattaacttctttttaaccaaagctttctgaatatgaccagcctcaggtgctagcgcattaaagagcaactaaacctaattccagtgtcgatttgtgaaataataaaagctaattgaatttctctaaaggtgagagagaacataatgatgaan

SEQ ID NO: 21592 - DNA, 277 bp, Homo sapiens
  misc_feature 1, 2, 3, 4, 277: n = A,T,C or G
nnnncgtgaccatgtcttccaagaagaatagaaagcggttgaaccaaagcgcggaaaatggttcgtccttgccctctgctgcttcctcttgtgcggaggcacgggctccttctgctggatcagacttcgcggcaacctccgggactctggcggtgaccaacttattagaaaaggtagatgacaaaattcctaaaacattccagaattcccttattcatcttggactcaacactatgaagtcttgaaatatatgtataggtcgaccagtgttgcttan

SEQ ID NO: 21593 - DNA, 1107 bp, Homo sapiens
  misc_feature 1, 2, 3, 1107: n = A,T,C or G
nnngcagtactactatagcagcagtgaggatgaggacagtgaccacgaggacaaggaccgaggcagatgtgccccagccagcagttctgtgcctgcagaggctgagctggcaggcgaaggcatctcagttaacacaggcccaaaaggtgtgatcaatgactggcgccgcttcaagcagttggagacagagcagagggaggagcagtgccgggagatggaaaggctgatcaagaagctgtcaatgacttgcaggtcccatctggatgaagaggaggagcaacagaaacagaaagacctccaggagaagatcagtgggaaggagagatgaggctttgccatgttggccaggctggtcttgaactcctgacctcaagtgatccgctcgtctcagcctcccaaagtgctaggattacaggcgtgagccaccgcgcccggcccatattaactgttatcacgagtgttcagttttcatatttatgctcacttgctggtccgcctgcagatgactctgaaggagtttgccataatgaatgaggaccaagatgatgaagagtttctgcagcagtaccggaagcagcgaatggaagagatgcggcagcagcttcacaaggggccccaattcaagcaggtttttgagatctccagtggagaagggtttttagacatgattgataaagaacagaaaagcattgtcatcatggttcatatttatgaggatggcattccagggaccgaagccatgaatggttgcatgatctgccttgccgcagagtacaaaaataacttatatacctttgtgtgagaaagatatttcataattttttaatggtaaaaataaatgaatataggttgtgcaaacagcataagtgtaatttttagcctatcaaggaatgctgatatgatttgttgaaaaacttggcttaaataaattttctagtgaaatttgaaaatcatggaattatttggcaatagaagcagagtgtttcaagtctaaatggatgggagaaagcaaaactagtgaaattatgcttgctggggaataggaaaatgagaaccaggtggcaaatgaccagtcactcaaccagtttcttgttacagtcagaatan

SEQ ID NO: 21594 - DNA, 1457 bp, Homo sapiens
  misc_feature 1, 8, 15, 1429, 1430, 1431, 1432, 1433, 1434, 1435, 1436,1437, 1438, 1439, 1440, 1441, 1442, 1443, 1444, 1445, 1446,1447, 1448, 1449, 1450, 1451, 1452, 1453, 1454, 1455, 1456,1457: n = A,T,C or G
natagaantcccttntctagggacgcgcgccattgtgttggtacccgggaattcggccattatggccgggggcggcggggggactgggacgttcaggcggaagtccggcacaagggggcgctttagggactggacttgcagtgtaaacagagacgctgcaaattgcttgtggacggtgtaggccgctgcaggccaccatgaaccggcttccggatgactacgacccctacgcggttgaagagcctagcgacgaggagccggctttgagcagctctgaggatgaagtggatgtgcttttacatggaactcctgaccaaaaacgaaaactcatcagagaatgtcttaccggagaaagtgaatcatctagtgaagatgaatttgaaaaggagatggaagctgaattaaattctaccatgaaaacaatggaggacaagttatcctctctgggaactggatcttcctcaggaaatggaaaagttgcaacagctccgacaaggtactacgatgatatatattttgattctgattccgaggatgaagacagagcagtacaggtgaccaagaaaaaaaagaagaaacaacacaagattccaacaaatgacgaattactgtatgatcctgaaaaagataacagagatcaggcctgggttgatgcacagagaaggggttaccatggtttgggaccacagagatcacgtcaacaacagcctgttccaaatagtgatgctgtcttgaattgtcctgcctgcatgaccacactttgccttgattgccaaaggcatgaatcatacaaaactcaatatagagcaatgtttgtaatgaattgttctattaacaaagaggaggttctaagatataaagcctcagagaacaggaagaaaaggcgggtccataagaagatgaggtctaaccgggaagatgctgccgagaaggcagagacagatgtggaagaaatctatcacccagtcatgtgcactgaatgttccactgaagtggcagtctacgacaaggatgaagtctttcattttttcaatgttttagcaagccattcctaaacagcccaactggcatttaattacccaatactgtatataaggcaaatatggacagttactttcctcttgcctgttcatatccttcagtgacattgaggaagcagtgtttctctttttaaaggagaatagttgtcaaccttcattcatctcttacatctctcaccctctccttttttttttctttgattttcccccttattgatgggactgatattcattctgtttttgatgaacatttggaaactgtcgggctttttattaaagctctgtagaattaaaatgttctggaattataagcaatctttgtttctgagtgttatttttattttggatatagctttgatgtaattaaactggaaactctttccaaaaannnnnnnnnnnnnnnnnnnnnnnnnnnnn

SEQ ID NO: 21595 - DNA, 317 bp, Homo sapiens
  misc_feature 312, 313, 314, 315, 316, 317: n = A,T,C or G
ctgataagacccgaaaaaggaaaattcttttaattttctataaatttagatgtctgatcctcatctttttaaaaaccaaaatgataaaacatatttcttaaactgttgggttctgaaaaagtcacccaatggaatcagctagttcacatttgaaaatgcaactgctaaaagctgtgggatactgcaatttaagccctgcagctcacaaggcaaagtgtgtaattctaagaagcatcaaaagatactatcttcaaggagattcaggactagaaaaggagcatgttcttcccattacaacctgggattatgacnnnnnn

SEQ ID NO: 21596 - DNA, 1741 bp, Homo sapiens
  misc_feature 1735, 1736, 1737, 1738, 1739, 1740, 1741: n = A,T,C or G
gtccgaacaaaggattcagaatactccatagacttagtttatgaagtagcagcatggtttgagaggattgactctaactttggaagttttactggccgggtgcgggggctcatgcctataatcccagcattttcagaggccaaggtgggcagatcacaatgtcaggagttcaagaccagcctggccaacatggtgaaacccaagctctactaataatacaaaaattagccgtgcatggtggcacacgcccatagtgccagctactcatgaggctgaggtaggagaattgcttgaacccaagaaggtggaggttacagtgagccaagatcgctctcactgcacttcagcctgggcgaaagaacgagactctgtctcaaaaaaaagttttcctgtggtttaaaaaaaatctttcatgaaaagaattgtcaatcaacgtgacaaatttcattattgtcttattttaagaaactgcaacagccaccccaactttcaagcaccaccttgatcaacagccatcaacattgaggcaaaaccctccaccagcaaaaagattatgactcattgaaggctcagctgatggttagcagtaaaaaatattaactttaatcatctcgaccattcagtactcatctaatattctctataacaaaatgggaaatgcacataaagcacttctgctacatgctgaattatgattgttgtctccaggaaaagaacttgtgggaacgtttgagttgtaagctgaactaactagctgcttttttcatgaaataccgcttttactggaaagaactgacagataaactgaggtattcaaacctagatatttggcagacattttcgtgaaaataaatatgttcgtgccacttcaaggaacataattctcagtacttgttgccaataatgttggaattttcatgcaaaaattcaaataaaaaacaaacttaaaaccatcaagaacttggtgactttatgtggaagccagtgctacaatactttagcttcccaatacttaaaaacttttctgatgagattactagtgatattaacaatgtgattgatattgaataatgaaatgttttagcatttggaagatctgtttaattcagtaaatcagtattttccaaatgaccaatgcatgacatttcaacatcacgcacaggaaaataggcattcgaggtacagtcaaaaataatgagttttaatgtaacaagtacaaaatgtccattgaagtggtttcaaattccaaatagtaattggaaaatccaccactcgtgttttggggtagtagtatcgaaaaagaataaccaagataatttgaaaaggctattaaaaaatacttctcaattttcaaactgcatacagcaggtgctcattcatttctttgtaacattgatgagaaaaagactcccagccaggggcactgtctttgtggtgtttacgtgttctcgccacacctgcataggttttctctgggtgctgcagttcttgccacatcccagaggtgtgcacgtgaggtgaaactggtgtgtcctcactgtcccattctgagtgtgggtgtgtgagtggccctgtgatggaatggcgtcctgtccagggctggttccctttttgtgccctgagctactgaaacaagcttcagctacacatgacccagaactggaataattaagtaataattaatcttttattcatctttcttaaatgtatgtatagctcacatttatttcaatgnnnnnnn

SEQ ID NO: 21597 - DNA, 2301 bp, Homo sapiens
  misc_feature 2298, 2299, 2300, 2301: n = A,T,C or G
acgcgggtataaggatatcactgacgtggatgaaatgaaagttccagattgtgcagaaacttttatgactctactcttggttataactgacaggtataaaaatcttcccacagcttcccgaaagcttcagttcctggagttacagaaggacttagtagatgattttaggatacgattaacacaagtgatgaaagaagagactagagcttcccttggctttcgatactgtgcaattcttaatgctgtgaactacatctcaacagtacattctgctattttggggaatattactctataaatgataggtcaaatcggttgacagtttttttcaagtcttctgtatacttgctgattttttttttttttggtctttgtcctatcaacaagtgagagatgattgttgaaatctccaaatataattatagttttttgtttctctttttagttctgtcaggtttgcttcatgtattttgaagctgtataattatatgcaaatatgctaaggattattatgtatttttaatgacataattctttcatcattatgaaatctccatctttatcgctgataatattccttgtcctaaagttcaaagagcattgaggtgtgttttggcaggcagttgagttactattgggtcgacttgatcctttggaatcttgtttgtttttaatgtttgttagggtgggtgtaaagttgtctttatttaaggacggtggttgtcaactttcagtctcatgaccccctgaaactctaaaaacttattgaggactccgaagaattcttgcttatgtggattgtattaatgcttaccatatcagaaattaaaactgagaaataagtaaaacaatatttacttattagttccttttcaaatgacaataataaacccatttcatgttcagctctctcttaactatgttctttcttattagttttcgtttccttctaaccacaaataaacatataaaatcttgacctgccttgtggaaaatgttttctctcaaggatgagaaataaaatgagaattctggacttacttcttatcaacattaaaaaagccatgggggttgtatttgttgacctttcctgtttgtatattagttttctgatatggagaattgttctgctttttcgtcctctaccagtctgattaattcgtaggcttaacacttcctttttctttctccttggaatgcctcttgggatatgcattagttggtcttatgtcttttcttggtctaggtggtgtgtgtgtttggcttgtttggggcacttttagaggctccagctgcacatttccactcctctctgtgtgttcctctctgcatctgctgtttgtgtgtgtacactttttttctgagcaatctttctccttagccacattgagttctttaacagtttttctgttttcttcttcattaagataattaataatcatactactcacatatcatgttttagaacttcctaagcctttccctttcccaccttttggacctcctaactgaatttcaaagtcttcattccttagattaaaaaaataaatccaaagataaaagaatgtaatgtcttataagtcgtatcagtgtatattttctctgttattgttgttagtgttataataaatcctaagtgacacaattcctttctcctacattaattcatttgcttgtacaacaactatttattgagcactgtgattaacaatataatcaaattccctgccttggaatttacattccaattcaaagagacaaactgtaacaataaacactatgtccttatattaagtagtaataagtgctgtggagaaacagcagagtaaaggggataaagaacgtattgttaggttgttctaatataaagatgtgtcaggagaggccttggtgacatttaagctgaaacgtgaaaggagcagagggaattaggtggatatgtgggagacgagtggtcgaagcaaaggagcagcacgtgtggaggttccgaaacagtaatgtgcttggtgtgcttgacccaaggaggccagtgtagctggagtgcagtgaacaacagggagaggggctggagattagatcagagtgttaatggggtggtggatcacgtaacaccataaaagccttggtggaaggactctggctgacatcacgccccaagttgccccatactttccagaataccaagtaggtccttgctgttcagaattctgttcaatgtagcagccctcccattgcgtcttcaatgtgtgagagagacattgacagcagagtagtcatggcttgattacagacatgcannnn

SEQ ID NO: 21598 - DNA, 2161 bp, Homo sapiens
gcccccttaaaaggcccaaaaaaaagttttcccccccaagggcgtttttttttttttttcgggttcgggggggggggggggggttttttttttaaaaaaatttaagggccccccccctttttttttttttttttttttttttttttttttttttttttttttttttttttttttttttttttttttttttttttttttttttttttttttttttttttttttttttttttttttttttttttatgttaggctgatttataagtgctgctttgggcagttacacagtttgtttacaatgaggagttatttgactttgaacatactgtacatggcaattagaagttgtcatggcaaaagaaaaccacagctggcctgccacagccaacacaagaaccagaaaatggtagatgaaatgaaggaataaaggtggggtttattccttattataaaagaaaaaaaaataattcttcagcagtcttaacaaagacatcaagatacaaaattacaagtgttttgactccagccctgtccccatctcctccaagagcagaggtaggagacagttgaagcaaacaagcaattctgtaaaaattacctagaaaccctacaaatttgattaaaatctaaacttctataattttgctttttaaaaaatttaatatcaaaaggcctgctttagtgacatgctattcctaccagaaaataaccccaataccccctctgtcagtaacatgctcaagttgaccagccaactcttatctctaaacctatgtggacaagtgtgtcttttaaaccaaagccacggagatcaagtgactgctagtaacgtgttgtctgttaactaatccagtgcccaccttctccagagggtgggcagggcagaaacccaaaagggtcttgagggcctaatcccagatcaccatctaagaaccacttcccttgctctctactcaaaatgagatgctttatttctaatccgactatttgtctcaaatttggtgccccgtgacctggatggttttttcctttagcaaaacacacataatccacaaaaccatacatatagtttttttgtctttacatttaaatataaaaatactattctgctttgtcccaaaggaccaagcagaaaatgttaaggcacaacggatgctcagaaaacgtaagaagctgaagggaaaacacatcatctgtgtactcagacacacacactccaacccatcacacgaacacaccctcgcccgcccatcagagaagaattcgcctggaatcagctggggggcggtggctcacgcctataatgcttctctcctaattcagatagattctctccttctggggcagttgagcaatcaggtgtggagggaagatggctatggtaaggcctttaggttacggactcttagctccatggggatcactgaagaggccaatgagaatgttctgatttgaggtcttttaagacagatgttcttcaggggttgcagctctgcagacctcctggttatacaaccagggatgtgtgacgtgctgaagtctaaaagtttcatctcagttcatctgtaccatcacggtgatataggaaaaggggcccttcctagcaggggaattccagaccccccctgttatcttggtgaaatggtaaaaaatgtaatgactatgggcctttggagaaatagtgtggcaaaatgacccaatagggtttgagacctgcagttaggaggagcagagcttagcagcttctgcaaggaaggagagcaaggacacagtaaacacagatcccaggacatgtgaccacacgtggccaggccagcccaaaccagggagctgtcctgggtggttgcatccttcattttctgtccatgccctcatagggcctcagggaaactgctagatttaggtgaagagcaacgtgcaaaactgtctttgatttatgacctgagtctggacttaaaccgagtacgaggcatttggaataaaaggtaaacttttctctctcagttctgaaacatatcgctttatgattctatgaatgggaagttgggaggggcattattgtcaaaagcagctgtccatttttcataggctcttttggataactgcaagatcgtagaccatttgtcaagtgagatttgagacagggcaggtattgagctcgtgc

SEQ ID NO: 21599 - DNA, 1951 bp, Homo sapiens
gtggcctcttaaagataaaacctacaacccaataaaagtcatgctgtaacgattgcaaaaagaccattgtatgagacccagttttggattatcataggcgaagaagtcagacatatatggttgtatgtacatgtgtatagtatgtgggtgggggtagatacatacctgttcatctgtatacgtatgtgtgtgtttaatatatactttagtttgcctttacccagatgtctcctcctctctctgcctctggaaatggggcaaatttttcttcagttaaaaacagaaatagaagcgacggttttgacccattttacacctatttatttcaggctctcaccacacacttgttcatgggcgcagcaaagaagagggatccacagagctggagccatgagggctgacacattggaatgaaagctggcagaattcgtagggagagctttccgggaagaggaggctctgtacctgcagtgctgcttttcttgcctagactctaggaactatccgagctccactccccacaacatactcaaaggaacggagagaaccgggacccccctgcggggacccggaactgatctgacaggatggcatctgatgactttgacatagtgattgaggccatgctggaagctccctataaaaaagaagaggatgagcaacaaaggaaagaagttaaaaaggattatcctagcaataccaccagcagcaccagcaacagtggcaatgagaccagtggaagcagcaccatcggggagacaagcaagaagaagaggagtcggagccataataaaagcagggatagaaagcgcaatcgtagtcgagatcgggatcggtatagacggagaaatagtcggagccgaagtccaggtcggcagtgtcgtcaccgtagccgtagctgggatcgtcgacatggtagtgagtcgcgaagtcgggaccatcgtcgtgaggatcgtgtgcattacaggagtcctccacttgccactggttatagatatggacacagtaagagtcctcatttcagagagaagagcccagtcagggagccagttgataatctgagtcctgaggagcgtgatgcccgcacagttttctgtatgcagttagctgcccgaattcggcctcgagatctggaggactttttctctgctgtaggcaaggttcgcgatgtacgtatcatttcagatcggaactcacgtcgttctaagggcattgcctacgtggaattctgtgaaatccagtctgtgccactggccattgggctgactgggcagcggttgctgggagtgcctatcattgtacaggcttcacaggcagagaaaaaccgactggcagccatggccaacaacctgcaaaagggcaatggtggaccaatgcgcctctatgtgggttccctgcacttcaatatcactgaagacatgctccggggcatctttgagccctttggtaaaattgataatattgtcctgatgaaggactcagatacaggccgctctaaaggttatggtttcatcacggtgagtctctagtcttttaatttttttattttactttgggtttgtccacttgtctgattttgcagcttagcttcatcctcctcctttaggaactgtctaaatgacccataaaccctggtgcctgaagcttggactagccttctaccccttgagatgagtgcattgcttgagatcttggctttgctcctacactctgtcagtggccctggtatgggggtgttcaggagttcacccagcttccctggtgctgcaacttggctctttgggtaatagtaaccaggctgcagctaaaaggttgggggtgtgagggaggttaggtatgggcttttaaagacatgctttatagaaatgatgtttctcataacagggatgggaataggaaattatacttccctctggggctacccccaatttgaagcaattttctgctccga

SEQ ID NO: 21600 - DNA, 185 bp, Homo sapiens
  misc_feature 1, 2, 181, 182, 183, 184, 185: n = A,T,C or G
nnatgcacatgtgcaggtccaagcatgcaagcacacttttctatctgggcaaaaggaagggtctaaacagtattgttcacaacgccaaaatagagcattacaccatatttgggtaagttggaagaaattaaaaaactgaaagcatctatttgggccttgggaaatatcggcttatcaaaannnnn

SEQ ID NO: 21601 - DNA, 439 bp, Homo sapiens
  misc_feature 438, 439: n = A,T,C or G
acgcgggggacacgggagcaagatggcgattccgggcaggcaacctctgtgagtgaaagccttcagagggaagctgctagaagcaggccatgaaacagaccaaactggaaatccagaaggcccttgcagaaggtgctactgtgtatgaatatgacagtatttatgatgaaatgcagaaaaaaaaggaggaaaataatcccaaattgcttttggggaaagacagaaagcccaagtatattcacaacttgctaaaagcagttgagatcagaaaaaaggaacaggaaaaaagaatggaaaagaaaatacagagagaacgagaaatggaaaagggggagtttgatgataaagaagcatttgtgacatctgcatataagaaaaaactgcaagagagagctgaagaagaagaaagagaaaagagggctgctgcactggaagcann

SEQ ID NO: 21602 - DNA, 1020 bp, Homo sapiens
  misc_feature 1: n = A,T,C or G
nactgactatttatgactgtgataccaatagaatggttaaacagatacttggctttcatggtattatactacttaaagtgaattccttttattaaaaaattttagacaaaacaatcaagtaattttcaaataataacaaagtatgaactactttcatttgaacttctccttagaatgattaggggatttttaaatcagtgctgggcatggtggctcacgcctataatctcagcactttgggaggctgaggtgggagggtcgcctgagcccaggagttcaagatcagccagggcaacacagtgagaccctgtctcttgaaattttttttttttaaatcggaactgattgtttgcaaaaaccagaattaatatattacagttgaaaattcatcttactttcgatctttacatttattaaaagatgtaaaggatcacattctgtgatcacaatctctgaaatctttgctttttaagtttttcagcatattttaaaggccaaaagcagtataatcttgatgtggactatgtctctaaatcaccaagtatctcatttgcatcttgattggtaatatcaaaaattttttttaaagacatgaaatatcttacttccacattgatgatttcatattcttcttgtggctgtgtttctaattttgttctcactttttcaaatgcatccatgttttctggaaggggtttttcgttttcttgtttaacaggctgaagatccttacatgagaagctccgacttgggatgtttcttgctaactctgatatcttgggtttattctgaagacacttggttaggtgatattttttcaattttattctattgtaacaatgatcagcgaagttatagtgattcaaatgctgtttctgcatgcattttccaaggtgaggaatactatacttcaaagcttggagaaataatttggtcttctgctgcatgatatcaaagtccctggtttatgctccttttggggccagagccgcctagagctggtttgcagcacgccaatct

SEQ ID NO: 21603 - DNA, 2746 bp, Homo sapiens
ccacgcgtccgccctgcccgaggggtcccggcgcccgccccccacgcggtcgcactggaattcgcagcccctctcgggtccccggggcgcattttgcagtctgagtggcaatgcacttgctccaggaccggcggctaccccgccgcagcggaggcgcggacttttcttttcgggggtctcgccggctcgccgcgctccccaccttgcctgcgcccggcccggagccagcggttctccaagcacccagcatcctgctagacgcgccgcgcaccgacggaggggacatgggcagagcaatggtggccaggctcgggctggggctgctgctgctggcactgctcctacccacgcagatttattccagtgaaacaacaactggaacttcaagtaactcctcccagagtacttccaactctgggttggccccaaatccaactaatgccaccaccaaggcggctggtggtgccctgcagtcaacagccagtctcttcgtggtctcactctctcttctgcatctctactcttaagagactcaggccaagaaacgtcttctaaatttccccatcttctaaacccaatccaaatggcgtctggaagtccaatgtggcaaggaaaaacaggtcttcatcgaatctactaattccacaccttttattgacacagaaaatgttgagaatcccaaatttgattgatttgaagaacatgtgagaggtttgactagatgatggatgccaatattaaatctgctggagtttcatgtacaagatgaaggagaggcaacatccaaaatagttaagacatgatttccttgaatgtggcttgagaaatatggacacttaatactaccttgaaaataagaatagaaataaaggatgggattgtggaatggagattcagttttcatttggttcattaattctataaggccataaaacaggtaatataaaaagcttccatgattctatttatatgtacatgagaaggaacttccaggtgttactgtaattcctcaacgtattgtttcgacagcactaatttaatgccgatatactctagatgaagttttacattgttgagctattgctgttctcttgggaactgaactcactttcctcctgaggctttggatttgacattgcatttgaccttttatgtagtaattgacatgtgccagggcaatgatgaatgagaatctacccccagatccaagcatcctgagcaactcttgattatccatattgagtcaaatggtaggcatttcctatcacctgtttccattcaacaagagcactacattcatttagctaaacggattccaaagagtagaattgcattgaccacgactaatttcaaaatgctttttattattattattttttagacagtctcactttgtcgcccaggccggagtgcagtggtgcgatctcagatcagtgtaccatttgcctcccgggctcaagcgattctcctgcctcagcctcccaagtagctgggattacaggcacctgccaccatgcccggctaatttttgtaattttagtagagacagggtttcaccatgttgcccaggctggtttcgaactcctgacctcaggtgatccacccgcctcggcctcccaaagtgctgggattacaggcttgagcccccgcgcccagccatcaaaatgctttttatttctgcatatgttgaatactttttacaatttaaaaaaatgatctgttttgaaggcaaaattgcaaatcttgaaattaagaaggcaaaaatgtaaaggagtcaaaactataaatcaagtatttgggaagtgaagactggaagctaatttgcattaaattcacaaacttttatactctttctgtatatacattttttttctttaaaaaacaactatggatcagaatagccacatttggaacactttttgttatcagtcaatatttttagatagttagaacctggtcctaagcctaaaagtgggcttgattctgcagtaaatcttttacaactgcctcgacacacataaacctttttaaaaatagacactccccgaagtcttttgttcgcatggtcacacactgatgcttagatgttccagtaatctaatatggccacagtagtcttgatgaccaaagtccttttttttccatctttagaaaactacatgggaacaaacagatcgaacagttttgaagctactgtgtgtgtgaatgaacactcttttgctttattccagaatgctgtacatctattttggattgtatattgtgtttgtgtatttacgctttgattcatagtaacttcttatggaattgatttgcattgaacacaaactgtaaataaaaagaaatggctgaaagagcaaaaaaaaaaaaaaaaaaaaaaaaaacagaacaacaaacaacagggggcgccaaaacagaaaacccacaggggacaaaaacacacgaaccaacaatactaaaaacaggaaggtcaaagaggcgcacttagaaaacacaacacataccgaggacacaaaccgacggcacagggaaaacgcagaacagggaccaacaaaagagcacaacaacagaggcgagaccacggggaacacccaaaaagcaaaaccacggggaaacacaaagccccgcgaaaagggcaaccccccaatgagccggcacaccgccaaggacatagaaaacggcgagacaaaacagcagacaacatgacacgacagcaaagccagagacaagacccagccacaccaca

SEQ ID NO: 21604 - DNA, 2871 bp, Homo sapiens
  misc_feature 2870, 2871: n = A,T,C or G
acttagacctagtgcagcctctaggaaaagtcttgccttttcattagagaaaacaggaccaaggtttcagttttcaaacagctgttgttgaatgtgtagaacccagttccatctgttttggttcattgttacagaacttagtccagtcatttgggctaaagccaaccaaaagcttagttgcctttctcaacaaacactggtacgcggggtccattttcccgtccgggcagaaggagaaggtcgggttgtagaagctggggtggccggcagctcgctcatcggtgttcgtgggctttgtcggtccgtgcctcgtctctccctggaaagggagggaggcttcgacgtcgagagggagccgctgccgcgttagttccgagcttgaagtcactaggacttctctcaaacttgtgtgctgaggagactcagatgttggcctcagctcctaggctgaactcagcagatcggcccatgaaaacttctgtattgagacaaaggaagggatctgtcagaaagcaacacttgttatcttgggcttggcagcaaggaagaggacaggtagtggagatcctgcaatctgaaaagcagactgaaaggtgacaaagaagctgaagatgggtggtggagagaggtataacattccagcccctcaatctagaaatgttagtaagaaccaacaacagcttaacagacagaagaccaaggaacagaattcccagatgaagattgttcataagaaaaaagaaagaggacatggttataactcatcagcagctgcctggcaggccatgcaaaatggggggaagaacaaaaattttccaaataatcaaagttggaattctagcttatcaggtcccaggttactttttaaatctcaagctaatcagaactatgctggtgccaaatttagtgagccgccatcaccaagtgttcttcccaaaccaccaagccactgggtccctgtttcctttaatccttcagataaggaaataatgacatttcaacttaaaaccttacttaaagtacaggtataaaataagacaaatgtttaaatttagttatgttcacggatagttgtcaattggtctgaaacaaattcgctagggaatctatttgtgtagaactaattaatgtaaaaaaaatagaccatctcgtgttgtgtgcactgtgatataatggtagtatcagtgcaacttaaactaatgattgtacttgatattaagtgttctcaactgagtaacttttaagtggaaaccaagtttagatttggggagtggtaaaggaatcagctttttctattgttaggggaagacagtaatttatcattcatggaccagtagattgttgaaagttggtgaatcggattataagcttctagctaacacaaggattcagaattaggtaaacatctgaaggtttagtatattagaaacacccaaaccagtaatatgctaacctgatgcactgctgaaagaaaatgtgaatttttcgtaataattgcattttagtgaattgtacagtgggtggaaagggcatttggagctcattagaatgagacatagtacaccccaatggccctgtttattaaatgtagtggattaagtgtctgtcaacaaatacaccaaaaccattttttatagaaacagtatttaatggtcactcaatagctttcaaaatacatttttgtattacagcactgcacaagctattctaatagtgctctggcctcatcattcctgcaaagcttgctttggggagttggataatgtgaaaattttaagtacctaggggagaaagagccatgtaaatatctgtaataaacttgtagcatatgtaaagttttcttggcctttatcttacaaaaatggagtattttagtatgaatttgctgaatgtaagaccgtggactgttttttataatatggcctaattttaaaggtccaaaataacttgtttttaaagtttgcccttgtgctaaagtgccagtgtatgtatgttatacttgatttggttgtaaactatatttcaaagtaaaccctagtgtaataagttttataactaaaaaggtttaagctgctaaaactatttttaagagatgtgaaatgcagtatgggactatctttttttcctcctctaagcccaaagattaactagagtccctccaaccttatagattgttggctttcacaatcttataacctaggatacaggtagtttcgagtatggtgccagtgatgttttgtttttgtttggtcaaggggtaggtgcaacccaatggaccacttatgcaaaagatgtaaactcttgcataatacattgataacatgttttgccaactttaaatgcttaaacataagcgaaaccagtagcaagtatgtgggtcagcttaaaaattttgattgttaatgccctattttctaatttggcacctcttgatgcctaagcaggtaagcagatgcctaagctgtatttctccaaataaatcaagatgaagtactgcccaagttaaatattgatagcctaaagacaagtttatgtagtacttaatgtacatgatatgaatgtgaagcataaaattaaataaaatttttccccattggcttggtttaattttaaaaaagaaaaatataaaaaaaacaaaaagagggggggcggtaaaaaatttccttggggggtgccaagttaagcggtaccaggtttttgggacaagggggccacaaggggggataaaagaaagaacgggcgggttaacaggtcgggtggcaaaactgtagtgaattttgaagagacaatttggggggctattggaaatcctaagattaagctaggaaatacattagttggtacacgatgtgggagtgtcggtatttgann

SEQ ID NO: 21605 - DNA, 1805 bp, Homo sapiens
acgcgggggggcatcacggacctaccaatatgtgatgtcacccctggtggcccagctgtgtcatggagaaactccagctgggcccagagattctgcagcgggaaaatccaaggcttatttatgccaggctgagtggatttggccagtcaggaagcttctgccggttagctggccacgatatcaactatttggctttgtcaggtggaaggaacagcatatttaagttcttttctgtggaaaactcagaaattgagtctgtgggaagcacctcgaggacagaacatgttggatggtggagcacctttctatacgacttacaggacagcagatggggaattcatggctgttggagcaatagaaccccagttctacgagctgctgatcaaaggacttggactaaagtctgatgaacttcccaatcagatgagcatggatgattggccagaaatgaggaagaagtttgcagatgtatttgcaaagaagacgaaggcagagtggtgtcaaatctttgacggcacagatgcctgtgtgactccggttctgacttttgaggaggttgttcatcatgatcacaacaaggaacggggctcgtttatcaccagtgaggagcaggacgtgagcccccgccctgcacctctgctgttaaacaccccagccatcccttctttcaaaagggatcctttcataggagaacacactgaggagatacttgaagaatttggattcagccgcgaagagatttatcagcttaactcagataaaatcattgaaagtaataaggtaaaagctagtctctaacttccaggcccacggctcaagtgaatttggatactgcatttacagtgtagagtaacgcataacagtgtatgcatggaaacatggaggaacagtattacagtgtcctaccactctaatcaagaaaagaattacagactctgattctacagtgatgattgaattctaaaaatggttatcattagggcttttgatttataaaactttgggtacctcggccgcccgggcaggtacactttccatattttttctctgttgccccattgtagaagaggaataatttatttctatatgattttaataatgttccctaagtaattagtaatcaagattttcttcaaattcaaattaacaaatatgtttgttaatctaaataatatacatatttatgtatttatatatgtatatattttaatctttctgtaattcagtctttaactgtgaacttttacatgatggaagcagtgaaggactcaatgtcatagtacattttgatagtatttgataggctttttcaggtcaattaatttagttgcttgcaaatataaatcaagcttgctccagttccacaaggactccaccacagtctttaggatggagaaaaatcactggttttccatgtgctcctattttgacctcttcacttagactgcggatcttcttttttttcaaatccatcacagctgcattaatattatccacctgggcccccagaatattcttataaaatgctgcagccttttccaaatctggcactgctatggctacatggttgagtcgacccaggttccacacagaacctgtcacttgatccaagggctgtgatgtggaagaagctcttactgttggaatgggagcttgaagtctggaaaaaagccctttgagtgttcccaacagaaagctggtcacgcttggagttcggccgactagtagttgttgtttttacggaacgtgctctcctttctggtttctccccagtctctttattggtgcgcggtaaaatcccgcgt

SEQ ID NO: 21606 - DNA, 841 bp, Homo sapiens
  misc_feature 373, 374, 375, 376, 377, 378, 379, 380, 381, 382, 383, 384,385, 386, 387, 388, 389, 390, 391, 392, 393, 394, 395, 396,397, 398, 399, 400, 401, 402, 403, 404, 405, 406, 407, 408,409, 410, 411, 748, 803, 811, 833: n = A,T,C or G
agcttggtccgactcggtccactataacggccgccatgtgctggaattcggcttagcgtggtcgcggccgaggttttttccacaacatcccctttttattgatattaatcacagttatgaggtcttgtccatcagaaagcacaatttgcattatgtagaactacatacaaagacataaaaataaaacatacatacaccaaccaccacaccagttaatctcaaccaatcaaacctctgaatgtgtcttcaattttgatcatcagtgcttcggaagaacgtacaagcagactctgaagatgatcagacaaggcaaagcgaaattggtcattctcgctaacaactgcccagctttgaggaaatctgaaatagagtnnnnnnnnnnnnnnnnnnnnnnnnnnnnnnnnnnnnnnncagctcagggaacctgcgccaaggaggctttttgatagagggaaacagtaggaggaggcagctgggaatgaggatgggggaagactacagcagtgtgtgactgtggtctacaacaggcacgaacctcaaaaatagcgttcaacgtgaaaggaaccagacacaaaagatcacatattacgcctgtaatatcagcactctgggacactgaggcgtgtgggatcacctgaggccagggagctcacaaccagcctgggcccaacatgtccctacttaaaattacaaggaaatttagccagggcgtgggtaccacattgcctgttaatccccagcttacttnggaagcttgagggcagggagaatctctttgaactttgggaagggccggaggtttncagttgancccaaattcacggccacagcanttccagcc

SEQ ID NO: 21607 - DNA, 3451 bp, Homo sapiens
  misc_feature 1, 3449, 3450, 3451: n = A,T,C or G
ngcgtccgggagcttctgcatgtgaccccctaatcagaaggcatgtttttagtatttcttgggagtgtcagctgtataatgcagcagctgttcaatcccttacccttctctgcaaggacttccttacagcttggtgcagttctttcccagaggcaccactactagacagtctttcttttatcttatggagataaattggcatttaaaaaataatttcacaaggcatgagataaactttcaatagatgatacctttgtgtcatgcctcatggaattatttttagaacaagccagagtccattgagtggtttacctctgcatgtttggagggaacctcacagatgaaacccttaatgaataatgtgtccggggttttttagagagaaggagcactcttaagttaccactttgagacagctcttaacatcttagtgaccatttgtagttttctttttatgaggaacccatgcttctatacttgggcggacaatcgagcttaatgagaagtgacttcccttcaaattccaacagcagacatgcattgtcatgattctgtcttctttttagtgtggtttattgagttcagcagttctcatattctgtttaaataggtacagcattttcaagggcacagatacagagaagctggctttctaggtattgggcttccaagccaagagttttgtccttccacctgtattagttatctattgctgtgtaaaaaattaccctaaatttagtatgttaaaatagtaaacattatctgtcagtttctgtgggttaagaatttgggagtagtttaacatgatggttctggcccatggtatcatgaagttacagtcaagattgaacaggggctgcagtcagctggagctggagaaaccacttccaagttctctctttgtggccgttggcaggatgcctcagtttcttcccatgtgggtctctgcgtagggcagcatgagtgtcctcacaccatgacacctggcttctccctgagcagctgattccagagatcatggggcagggccaggagaaagctgcagtgccttttaagacatagtcttggaaaggacacaccgtcacttcttatcctagttgttagaagcaagccactaagttcagcctgcactcaaggagagaggaattacacatacctctaccccaatggagcagtagcaaagaatttatggacatatcttaaaagcaccacaccccaactggggatgaaagtaggtcaacagggaggtaggtttaatctagataagctgaaagatagattgctatcaaaaacagttctccaagatgtgcatagccaaactgggatagaaggcaaactccccaaagctacctgctggttttgagaggggtggtaagacatggcaattcccaggagtagtagaaaataatatgcctgactaccaacagctcaagtatgcttatttgcacatcctagacttggtgtctgtaagactcagttaccacttttattttcctgtagctaggagttagcaaaaggaactggggccttccagccgagccactaaacctgtcttatttggaatggggattgtccagcaaagggagcaaacatgaattagatgttaagctattgagctgaagaaaagaaagcagttcacatttaggtgaaatagatgatgttatcaggaagccaggttcccaccagagtcggtgcttggtacctggtctctccagtctcaacagactcaggtcaggtctctcacccaggaagcaaccactcaataaaatagagaacatctgagaattacaaatgtctatgcttgattgctcctctaaatccagtgcataggttaaccctgcatgcccatttcttcctgggcttcttgatggcaatgtgttcttaaataactggtcttgtgttcatgctaaagacaaacttacatgaagtttttcagtttaagacattctagtgaatggctgctatgtgtttctggcactcattcctaaccaagtctttagagatttcagatgaccttaaagatgcaatatctttttctttctttctttctttctttttttctgagacaagagttgcgccctgtcgcccaggctggggtgctggagtgcagtggtgcgatctcagctcactgcagcctctgcttcccaggttcaagtgtttctcctgcctcagccttccgagtagctgggattacaggcatgtaccactatgcctggctaatttttatttctatatttttagtagagatggggtttcatcatgtttgccaggctggtctcgaactcctggcctcaagtgatccgcccacctcagcctcccaaagtgctgggattacaggcgcgagccaccgcgcctggccaaagatgcaaattcttgtttggatttatgctctgcctcttcccagcattttcttatctgtagccctgcttgcttgagagtatacttggataagaagtattgctgttgagggagctataagaaaaggattcttcttccagaagtaaagaactcatctttagagtacctttaaatgaatttggtttttctttcttattttgaggtggattggtcttctctttttttgggtttccagctcactgggactctcagaccttacctttccagctcaaacaccattagttaaattccttcattctcattagaatgcagcctgctgagtatgtgggtttcactgccggagtccatcatttagccagtatacatagaggaactgcttcgaatcaaggcaactggtgaagggcttagcatgttggcagcaatatcccagagattgaatctgtttgcattttcctcatctaggataacagctgcttgaagccagggctcttagccctttgcattccccttgagcgaggaagccacactgcctttctgtgtctggttcagagctcttccttcttggcatgttttctggactacatgcacatgggcagctatagattaatctgcaaaacctagtcacttacctacccataatatctgggaaggtgtggtatttgttttaaagaaacattgtttctttgggagggcagtttctgtctggactttgaggtggacttagttatccctacagttctttaactctcagcttttaataaaagatgaaatcagatattggggcagaggggtgcacacaccctgtaaaggggtggttaacccaagaaacgagccagtcgacaaacaactcgagaaccacaagacatccaggggagcgacattaaggaagcatcacagcagaagaactacgcgaaggcagacaagaaatatcaaactagtacaagtcgacagaacataaaacaacgactatcagagaaaaaatcattactgcggacgagaagaaccacgacatcaagagaaacacccacccaaatagtcaatgtcaagcacgcagcgcacatatattacaacaaaagaaagaaatcacatannn

SEQ ID NO: 21608 - DNA, 277 bp, Homo sapiens
actaaagaaacacaagaactaatgtcagaggcttatcccatcccagaacagaaattaaagttgattcagccccacgttcaagcaagcaacaattgctgggaagaggccatttctcaggtcgacaaactgctacgaagaaatacagataaaaaaggcaagcctgaaatagcatgtgaaaacccacattgtacttcagccttgattcctccgcaacagacacctgaaacttgaccctacattggttcttggccatcgtgatcttccttggacagaatca

SEQ ID NO: 21609 - DNA, 282 bp, Homo sapiens
  misc_feature 1, 2, 3, 4, 5, 282: n = A,T,C or G
nnnnnagacaacgacgccgcttcaccatgatgatggacaacaggcaactttttttttggagtttcagcttgcttccaacagggacagtgagtgtgaggtttattcccatttctaagacgatagaagttttcagcctaagccgtattcctagctccattgggttagagtctccccgagcgagctggtctcggcaagtggcgtccattcgtggaggctcgaatccaggtcaaagggttgctggagcgacggttggaatggaaaactagctgaagacacccaagn

SEQ ID NO: 21610 - DNA, 1199 bp, Homo sapiens
  misc_feature 1199: n = A,T,C or G
acgcggggttggctgtagttagtaaggagccggatgattgcctcagcaggtgtgaagcgtgtgctttagtttcgtgggaggcctggcatccccgagagggaggggaaaggtaaccactcctttgtggaggtcgccagggtcattgtcgtggatttgcacagtcggctgggcggtgcaatggcggaaagaaaaggaacagccaaagtggactttttgaagaagattgagaaagaaatccaacagaaatgggatactgagagagtgtttgaggtcaatgcatctaatttagagaaacagaccagcaagggcaagtattttgtaaccttcccatatccatatatgaatggacgccttcatttgggacacacgttttctttatccaaatgtgagtttgctgtagggtaccagcgattgaaaggaaaatgttgtctgtttccctttggcctgcactgtactggaatgcctattaaggcatgtgctgataagttgaaaagagaaatagagctgtatggttgcccccctgattttccagatgaagaagaggaagaggaagaaaccagtgttaaaacagaagatataataattaaggataaagctaaaggaaaaaagagtaaagctgctgctaaagctggatcttctaaataccagtggggcattatgaacactcccttggcctgtctgatgaacgagatcgtcacaatttcctgacagcagaacattggcttgatcatgtcccgccactggctattcaggcatctccccacgaatgggttcgcaggtagactggcgtcgttccttcaatcaccactgctcgtcatccttactattgattccacttgtcagcctgggcactttcaacattcacgcgaacagcaaccacatccaatttgggcaagcggcaacaacttactcctccccacgcatggccgcctcggcaggcatccgcacagacaaatggcacacctgctggcccacaggaaaactatcgtagcactcacattcgacagcggtagtgacaccaacccatcgttaacctaactggcacgaccagctcaccacacctctccccgctgtgttttgtcaccctaccacctcacacagataagcacacacaacgcgcgacgtcaccccgacacaatcatcacaacgaacggagaactctatagcacacccgcgacagcaaatcaagaaacaccaan

SEQ ID NO: 21611 - DNA, 1981 bp, Homo sapiens
  misc_feature 1872, 1899, 1929, 1945: n = A,T,C or G
ccacgcgtccgtttgtatttagcaaatgctctgctatttttaaaagcttactgatagcaactgactttatctgatgcagggggcttagttgggaatgttgaatctggttgtaatgttgtccgtgattaaaaagataatgtcctcaaggtgtttctgaggaatgtagtgcagcaagagagaagaaatgcctctgcataaacaaagtaggcagactgttatttttaaagttgtttattcttctgcaccagcagtccattgtaaatgtgtgtgtgtgttttggtcatttttccctaagggagctctcttttgggcgtggctccacggcacctgtaggaggcggggctttccctaccatcgttgagagagagccttgggacggcagggatggcgaggtgagtgcccgggagggaagctgtgcgggcagcagtcctggtttactctcttgagcctgtgcatctctgcacctggagtcaagtccttcccatcagacctcagccctggtgcacccgtgggccttttaagaggttcttctctgaagacccttcatcttccttatcacaagtttaagtgctgcatggcatttgatactcttgacagccaagatacatttcagtagtaaggttgctttcctgattattaccttaaagtgaacatttaacctggaattcatttactttatcttagaaaaatagaaaatgatagctttgaaattagcacttatttctgtactgttgtgtcccaccctcctcaaaaggacacgttcaagtggcttccagtgttaaaatggtgagtgatgtgatgttgaaatgtttcacctgagttctgagcttttccatccgtataatcataggtacgaaggtcagggtaggagtcagactgaggagaacctggattgtagcaggagtagctccagagagtcgctcttccgtaaaatgagatgttgaccttccagggtgtccccttctgcagatctaacagtggctttctgtcgtctcccagcttcccgtggaggatgacattgacctcagtgatgtggagcttgatgacttagggaaagatgagttgtgagagccacaacagaggcttcagaccattttcttttcttgggagccagtggatttttccagcagtgaagggacattctctacactcagatgactctaccagtggccttttaaccaagaagtagtacttgattggtcatttgaaaacactgcaacagtgaacttttgcatctcaagaaaacattgaaaaattctatgaattgttgtagccggtgaattgagtcgtattctgtcacataatattttgaagaaaacttggctgtcgaaacatttttctctctgactgctgcttgaatgttcttggaggctgtttcttatgtatgggtttttttttaatgtgatcccttcatttgaatattaatggctttttccattaaagaataaaatattttggacaatgccgataaatgtatgatgtggatactaacttcatacatttatcggcattgtccaaaatatatgaagttagtatccacatcataaattcagagtgatgtttagcagtaaatcaatattttgaagtgatacacagatgtctttcctccccacaaacttttttaaacaaaaaacaagacctcttttctttagatggtgccacctatgcccaccacaacagagattttacatggaaaccgggctcagtgagaactgatttcctgcccaatatttgtctttgggctgtctctagtgactaattattaaggaatctagctggttatacagttcaaggctttctgtgttgttaatgaacctcaaaatagccgttaagatatgaaatacagcagcaggttaccaatgcgaacagtanttcgcatttatgtaaaacattcaaaanatgaagttttgaatctgttggaacattcanaggacttgagagcatnttattgtaacttaaaaaaataaatacaactgtcacc

SEQ ID NO: 21612 - DNA, 1032 bp, Homo sapiens
  misc_feature 1012, 1013, 1014, 1015, 1016, 1017, 1018, 1019, 1020, 1021,1022, 1023, 1024, 1025, 1026, 1027, 1028, 1029, 1030, 1031,1032: n = A,T,C or G
acgcgggggaattcaagcagtgggacaaatgagggtttggcatgcagctcgtcatcttaagagttactatcttcttgccctggtgtttcgccgttccagtgccccctgctgcagaccataaaggatgggactttgttgagggctatttccatcaatttttcctgaccaagaaggagtcgccactccttacccaggagacacaaacacagctcctgcaacaattccatcggaatgggacagacctacttgacatgcagatgcatgctctgctacaccagccccactgtggggtgcctgatgggtccgacacctccatctcgccaggaagatgcaagtggaataagcacactctaacttacaggattatcaattacccacatgatatgaagccatccgcagtgaaagacagtatatataatgcagtttccatctggagcaatgtgacccctttgatattccagcaagtgcagaatggagatgcagacatcaaggtttctttctggcagtgggcccatgaagatggttggccctttgatgggccaggtggtatcttaggccatgcctttttaccaaattctggaaatcctggagttgtccattttgacaagaatgaacactggtcagcttcagacactggatataatctgttcctggttgcaactcatgagattgggcattctttgggcctgcagcactctgggaatcagagctccataatgtaccccacttactggtatcacgaccctagaaccttccagctcagtgccgatgatatccaaaggatccagcatttgtatggagaaaaatgttcatctgacataccttaatgttagcacagaggacttattcaacctgtcctttcagggagtttattggaggatcaaagaactgaaagcactagagcagccttggggactgctaggatgaagccctaaagaatgcaacctagtcaggttagctgaaccgacactcaaaacgctactgagtcacaataaagattgttttaaagagnnnnnnnnnnnnnnnnnnnnn

SEQ ID NO: 21613 - DNA, 422 bp, Homo sapiens
  misc_feature 1, 2, 3, 4, 421, 422: n = A,T,C or G
nnnnccggttctgactgcgccgaaccttatgagacctctccttgtctgcatggacgagtggccaactctggagcccaggctgttgcttcccagtctggtggtgaatcctccatagtctggtgagtgtaaatacatatatatatcttttcccttctcccttcccattgcaatttgcttattatatcatttgcttatatctgcactgccatttgggataaagcttgtttacccttaaaggtattgtgtgtgtgtctcctccccgcgcgcatttcccacacagaacacctaagaacctattttttatgatttttacgagaaatgaattccaagttgtgcctcagaattcagaatatatctttcaacctcctactcatcccctcaccaccctggtgaacacagtgtctggccatcaggaatgaann

SEQ ID NO: 21614 - DNA, 676 bp, Homo sapiens
  misc_feature 1, 609, 676: n = A,T,C or G
ncataaaatgggctagaaaatatttcctccttttcaattttctggaagaatttgtgtcaaattggtattatttcttccctaatgtataccgttcaccaggagagctatctgggcctgaagttttctttctgggaaagtttttattacatattaaccttcttcagtacatatagggccactcaggttttctattcttattgagaaagctttggtggtttgtttatctttcaagaaatttgccaagaggctaaacaatctgtccaagatcacacagctataagggctgagccaggctttggcccctagcagcttgccaccagagcagacgcacttaaccactgcactatactaccatctctctaaggaagaggagtcggggatgaggaatgcagatgatgattttaaactactggtagcaaacatttgttgaggtttactgtatgccaaaacctatcctgcggcagattttattttccataaatggccaccgcattatctttcaccttccatgctcttctggaaccttgctgcttctccacacacaggtagaagctgtgtttcttcctcttgaaatcaggtgagcctttatgactgctgtgactaacaganaacagggaacctcatgacttctgaggttataaaaatactttcacctttttctcttggggcacttacn

SEQ ID NO: 21615 - DNA, 3636 bp, Homo sapiens
cttctcactcgctctctgctcgctgcgggcgctccccgccctctgctgccagaaccttggggatgtgcctagacccggcgcagcacacgtccgggccaaccgcgagcagaacaaacctttggcgggcggccaggaggctccctcccagccaccgcccccctccagcgcctttttttccccccatacaatacaagatcttccttcctcagttcccttaaagcacagcccagggaaacctcctcacagttttcatccagccacgggccagcatgtctgggggcaaatacgtagactcggagggacatctctacaccgttcccatccgggaacagggcaacatctacaagcccaacaacaaggccatggcagacgagctgagcgagaagcaagtgtacgacgcgcacaccaaggagatcgacctggtcaaccgcgaccctaaacacctcaacgatgacgtggtcaagattgactttgaagatgtgattgcagaaccagaagggacacacagtttttgacggcatttggaaggccagcttcaccaccttcactgtgacgaaatactggttttaccgcttgctgtctgccctctttggcatcccgatggcactcatctggggcatttacttcgccattctctctttcctgcacatctgggcagttgtaccatgcattaagagcttcctgattgagattcagtgcatcagccgtgtctattccatctacgtccacaccgtctgtgacccactctttgaagctgttgggaaaatattcagcaatgtccgcatcaacttgcagaaagaaatataaatgacatttcaaggatagaagtatacctgattttttttccttttaattttcctggtgccaatttcaagttccaagttgctaatacagcaacaatttatgaattgaattatcttggttgaaaataaaaagatcactttctcagttttcataagtattatgtctcttctgagctatttcatctatttttggcagtctgaatttttaaaacccatttaaatttttttccttacctttttatttgcatgtggatcaaccatcgctttattggctgagatatgaacatattgttgaaaggtaatttgagagaaatatgaagaactgaggaggaaaaaaaaaaaaaaaagaaaagaaccaacaacctcaactgcctactccaaaatgttggtcattttatgttaagggaagaattccagggtatggccatggagtgtacaagtatgtgggcagattttcagcaaactcttttcccactgtttaaggagttagtggattactgccattcacttcataatccagtaggatccagtgatccttacaagttagaaaacataatcttctgccttctcatgatccaactaatgccttactcttcttgaaattttaacctatgatattttctgtgcctgaatatttgttatgtagataacaagacctcagtgccttcctgtttttcacattttccttttcaaatagggtctaactcagcaactcgctttaggtcagcagcctccctgaagaccaaaattagaatatccatgacctagttttccatgcgtgtttctgactctgagctacagagtctggtgaagctcacttctgggcttcatctggcaacatctttatccgtagtgggtatggttgacactagcccaatgaaatgaattaaagtggaccaatagggctgagctctctgtgggctggcagtcctggaagccagctttccctgcctctcatcaactgaatgaggtcagcatgtctattcagcttcgtttattttcaagaataatcacgctttcctgaatccaaactaatccatcaccggggtggtttagtggctcaacattgtgttcccatttcagctgatcagtgggcctccaaggaggggctgtaaaatggaggccattgtgtgagcctatcagagttgctgcaaacctgacccctgctcagtaaagcacttgcaaccatctgttatgctgtgacacatggcccctccccctgccaggagctttggacctaatccaagcatccctttgcccagaaagaagatgggggaggaggcagtaataaaaagattgaagtattttgctggaataagttcaaattcttctgaactcaaactgaggaatttcacctgtaaacctgagtcgtacagaaagctgcctggtatatccaaaagctttttattcctcctgctcatattgtgattctgcctttggggacttttcttaaaccttcagttatgattttttctttcatataaagataaaaatatctttacatttaaaaagtatgcagtatagcacattttcagttatgtacacagtttaaaagtaaaactatatccatgccagtgtctgttttaaatgcaaaaagtcaaagtaggtaacaggttggtaattaaagtgtcaggaagactggaagaggcaaaaatcaagcagagttccaataagtgtatgaaaaaaaaatcataactgaaggtttaagaaaagtccccaaaggcagaatcacaatatgagcaggaggaataaaaagcttttggatataccaggcagctttctgtacgactcaggtttacaggtgaaattcctcagtttgagttcagaagaatttgaacttattccagcaaaatacttcaatctttttattactgcctcctcccccatcttctttctgggcaaagggatgcttggattaggtccaaagctcctggcagggggaggggccatgtgtcacagcataacagacggttgcaagtgctttactgagcaggggtcaggtttgcagcaactctgataggctcacacaatggcctccattttacagcccctccttggaggcccactgatcagctgaaatgggaacacaatgttgagccactaaaccaccccggtgatggattagtttggattcaggaaagcgtgattattcttgaaaataaacgaagctgaatagacatgctgacctcattcagttgatgagaggcagggaaagctggcttccaggactgccagcccacagagagctcagccctattggtccactttaattcatttcattgggctagtgtcaaccatacccactacggataaagatgttgccagatgaagcccagaagtgagcttcaccagactctgtagctcagagtcagaaacacgcatggaaaactaggtcatggatattctaattttggtcttcagggaggctgctgacctaaagcgagttgctgagttagaccctatttgaaaaggaaaatgtgaaaaacaggaaggcactgaggtcttgttatctacataacaaatattcaggcacagaaaatatcataggttaaaatttcaagaagagtaaggcattagttggatcatgagaaggcagaagattatgttttctaacttgtaaggatcactggatcctactggattatgaagtgaatggcagtaatccactaactccttaaacagtgggaaaagagtttgctgaaaatctgcccacatacttgtacactccatggccataccctggaattcttcccttaacataaaatgaccaacattttggagtaggcagttgaggttgttgcggacgcgtgggtcgactccctatagtagtcgt

SEQ ID NO: 21616 - DNA, 607 bp, Homo sapiens
  misc_feature 1, 2, 451, 509, 514, 550, 564, 597, 605, 606, 607: n = A,T,C or G
nncgacccacgcgtccggtctggtgccagattcgtgagagatatgcatgttgacgctgtctctctgaggactgctctttgaaaaacaggcttatatcacagcaagaaggaggctggcccactagcttttaagtatttagctgatttcctgctgaaatagtgcaatgtggttaacagtgagccttggaagagatgagtaaaggtgatgcttcaaagacatgctgagcaaactgaaaagcaagttaaagcgccgtgacattgcttccaaaagccaaggattgacagcagctgacagtcatgctggtacctgtgtcacctttgaatacaaagaacattgggcattttgacttatttcagcagggataaaatgttagggaggaaaatattcccctaactgccttcctcctctgaaacatcaatgtagaataataatgccttcttactcatgtatncagcttttccaattcaccaacttatttggaagggcatcacaaaaggaggacctttttnaaatncatctacccttagggccaaataggtacattttcttngaatttcccttggnattgttggaaaatggtacttttttggaaaaggnctttccannn

SEQ ID NO: 21617 - DNA, 393 bp, Homo sapiens
cgaaaccaccagcccaaaaacctcgataaacaagagaacccttgaggtatgggggctgccatcttgttcccgcaaaggccgccgggccccgcgtactgcaaaatctcagcattggctctgctgaagatggtgatgcatgccagatcgggaggcaacttggaagtgatgggtctgatgctaggaaaggtggatggtgaaaccatgatcattatggacagttttgctttgcctgtggagggcactgaaacccgagtaaatgctcaggctgctgcatatgaatacatggctgcatacatagaaaatgcaaaacaggttggccgccttgaaaatgcaatcgggtggtatcatagccaccctggctatggctgctggctttctgggattgatgttagt

SEQ ID NO: 21618 - DNA, 524 bp, Homo sapiens
  misc_feature 1, 524: n = A,T,C or G
nagtgtgctggaattcgcccttcggccgcccgggcaggtacatctatccatttgtcattctctcctccaagggtatctgatgtttgattatcttatgctttgctgaaaaccactacttccatggagcctccatatgactcttcagctcaagtagctctgtctctttcagttcaaatttctgagagtcagtggtttattcattcagacacctattcctggtccaatcagctatggctgaggactgggaaattagaggtcttcaaagtaggattaactttctaggggctgaactagaacttccatgagggaatcatcaaccacagaatgaagccacctgcccttcttcactctcgctgggcgcctgtggctaccaattttcaagactgcccacccacctgttgtcccaaactgtccttttctctccgtgagttgtgtcctgtaggcactaggaatctacaaaaccaggactgtcccagcaccaggatcctcccaggactgtgcaccaaataccaaggcccccgcgn

SEQ ID NO: 21619 - DNA, 2377 bp, Homo sapiens
  misc_feature 1, 2376, 2377: n = A,T,C or G
nggatccgaggatcgcctggtttcagccagagcagctcggaccgtccaacagtctgtggatgcagatctgggagatattcaggagcctcacactgttcagacgttgacttagcaactgcgttttttcccagctcgccacagaatggatcatgaagactgacaactgcaaaaaaaacaaaacaaaacaaaaaaaaaagcaagcaaaaaagagggaaaaaaaaggctgcttatttgataagtcatatgctacaacagggtcattttaagatttaaagcttgaatgtaaaataaatatatttctcattggctttatgcagagttatagggaatagtattcagtgttggtagggtgatagaaacaaaaaacagtatcagaggatgaggtggggaaggaaaacaaaggtatctgataggaagtccagattccaaaggggaaagtgatctgtgcatgttttttttttaaatatttttgcatatatttaccattttattgtgtgtatatatagaagaccatataggaaattgatatttgtaatagtggatttgttaataatactttttacataacattactgtttaaattgtaaacagattttttctcaggattagtttgaaaaataatctaaattgtcatcttaacatccatatatagggaagtgattagttctattactcaatttgtttttctcagcattgaaatgacttaatagaacccttgtgtcctgctgcaaaaatttttcctctctaaagaaaaggtttatggtggcaaatgatgtttattttattttgtaaaaaaaaaaaaatgtactatgtacttttgtgtaaacactgaaaaatctctggtcatctccgagaattaacttgcaactgttttctatagtgctgtcgtcttgggcaatgggcaattacatgactttgtgtttgcttcctttgcagtcttttttttttccccccatttcttcctaataggaaaaaaaaaaaaaaaaaaggtcacccatgtctggtctcattcctgttgcagtgaaacttcgagttccacagactttgcatgctggcttctctaaccctgtgtgctgcgtgtgcctgtttctcatctcttattctttttaaaattcatgcttaactactgtgggagaataactgtaaacagctttaattaaatcatacttataaaaaactattttcttatattccactctatgcttttggtattgttgatctttacaaattaaatggtctttgataatggatctattttgtattgccttattaagacctacttcttgtcatcccattctttatcctcttctttcatggaattgttatcgttaattaaaacttttttaaacattggcttgtttcaatcatactgtaaattttggttgtagtcagctttgagtgcaatgagatgtataattctgttatcatcacctgttgagtttgaaactcagttgggaatatttaatataatagaatgtaagtgacatttctgaaaatgctttctttcagggtgaaagctcttatgtttagcatcaatgtgtatggctctgttaaatgcagccatttctgagacgagattcttttatatatatatacatataaagtactatggcttttaggagtttcttttatatacatttatgaaatactgaagaccaatcagaccattaatggacacttagtgtaactttttataaagaaaataatgctaaagtaagaccaaaactgatgtcatcactgaaattaacaattttcaatatgttcatattttaattcacaatggaaaaatgtgttccaaaactggaaactcatagtactcgtgtaaactgtggaagatttcaaatgtgatgttattttgacaaatgttttaaattttagagtcacattttattctgatcagaatttttattgagatgttgagcttttgtttttgaaactagtttgtcataacattgtgcataatcacagtatttattttctaggacaatgtgaatgtgtagacttatgttactggctaagggaaacacttatttatacacattaattattaacttcccgtataagcgcctatctcagaacacataaatacttgccgcaaactaatgtacattgaccacaacgaaagtagacaggcggcaccggccggaacgaagaaatcacctacatggagaaggataaagtaacctaggggacgaacgacgatgtcccaacaggctgctccagacatacagggggtggcacaggcaccacaagggtccaaggaaacaccgcccgcaacctcggcacacgaaccgacagtagaaatcgacgaggagaagaccagagaaaacaacgacgaacaggggagaaacacgagcaaacacgagtactcacaann

SEQ ID NO: 21620 - DNA, 1032 bp, Homo sapiens
  misc_feature 1, 86, 144, 1027, 1028, 1029, 1030, 1031, 1032: n = A,T,C or G
ncgtccgggagaactttacaatgtgaaacatgtgacaaagttttcagtcgcaaatcacaccttaaaagaataggagaattcatccntggaaagaaaccatacaaatgtaaggtttgtgacaagacttttgggagtgattcacancctgaaacaacatactggacttcacactggagagaaaccttacaagtgtaatgagtgtggcaaagcctttagcaagcagtcaacacttattcaccatcaggcagttcatggtgtagggaaacttgactaatgtaatgattgtcacaaagtcttcagtaacgctacaaccattgcaaatcattggagaatctataatgaataaagatctaacaagtgtaataaatgtggcaaatttttcagacatcattcatacattgcagttcattgacacactcatactggagagaaaccttacaaatgtcatgactgtggcaaggtcttcagtcaagcttcatcctatgcaaaacataggagaattcatacaggagagaaacctcacatgtgtgatgattgtggcaaagcctttacttcatgttcacacctcattagacatcagagaatccctactggacagaaatcttacaaatgtcagaagtgtggcaaggtcttgagtccgaggtcactccttgcagaacatcagaaaattcatttttgagataactgttcccaatgcagtgagtatagcaaaccatcaagcattaattgacactagagtcagtccagcattgacttgagtctgtgttgacttaacattgagttcaacccttaattgacattcaagtgtttatgttaagaggattgggccaggtgtggtttctcacgcctgtaattccagcacggttggaggccaaggcacataggtcacttgaggtcagaagtttgaaaccagcatggccaacagatgtcagccacttttcccagcctgttttttgattcttatttgctatttttcttttttgagatagtactttttaaagagatagtacttttttgatatagtacnnnnnn

SEQ ID NO: 21621 - DNA, 319 bp, Homo sapiens
  misc_feature 1, 2, 3, 4, 5, 6, 7, 8, 9, 318, 319: n = A,T,C or G
nnnnnnnnnaggattcgagaaaacaagtgccattgcaaatgttgccaaaatacagacactggatgccctgaatgacgcactggagaaggtgagccgtgggcaaatcacatagcgccccaagtcaatctgcccagtggatccagctgcatgggtgaatgagcggatgaccactgaggttttttccaacccagaggtttgaggtccttgtgaaagaatttgttctctgtcagaggaacacaaagtgatttgagtgggaaaagctgcttctctcaaatcctaaagtgtccatttaataaatcatttccaaaataagataann

SEQ ID NO: 21622 - DNA, 1205 bp, Homo sapiens
  misc_feature 1, 2, 1203, 1204, 1205: n = A,T,C or G
nnatacggtcttttttagagatatacctttcgtgggggattttcccgataataaggtggcccagtacccctttcccacacggtacagtagtcacctgtgaaaaaaaaaatgggaacttactaatttgggcttttcaaaaacattctttgtagaagagattctaaagttatttatgatgcttagccatagtattcaggcaaatgttcatttctcctggtacctgtatttaaaatgtacattccacattttaataaattaaccacaagaaaataatcccacatatacaaggtcaggggtggggaagagtattaatggtatcttaattatacccagtctggtttttttttttaaatggggtaaaaatcaaatgcaaccccatcttgttttaggaattttgagaactaataaatgcaccttaatggtcagtgttcctttcaaacatgtgagttctttaacaaaaatgaaataaaccaggtgtctgtgatttctaattaatcaccgctggccattacacaggttttgttgtttggggtggggagggggcttttgttcccttttgacataatatagtcaatgcactaacaattatgtatattcaaacttgattattttaaattcgatcttcagctgtactgtaaatagggtactgcattgtagtctccatatctgtattacttttctgtaatatttaagagttgcttaaaagcatacaaaatgtactgttactaaaacagctaattatttctctctccccctttgacaggaaggggcttcagttgttcctccatggctagaaccataataaacaatgtacccgtaatttgtaacataaagtattgcaatatgttagtaacaatcttgcagccttcctttccaaagttcattttattttgatcagttcagtatattgcactaattattttaggtattttcattatatgaaagctaccatgtgtcagagatgatttaatctatttaagtgttggactgctaggagaacttgtacatttatgataatgcagaattaggaaaacggttcaccagtgtttagttttatattgaggtgctcaggttggaataaagtggtataaaaagcaaaaaaaaaaaaaaaaaagcgttttttgcgggggccgaaaaagttttaaaaccatttgttggggggcggggcccatggttatgtgaaagggtcaaaggggtcctaannn

SEQ ID NO: 21623 - DNA, 2981 bp, Homo sapiens
  misc_feature 1, 2, 2969, 2970, 2971, 2972, 2973, 2974, 2975, 2976, 2977,2978, 2979, 2980, 2981: n = A,T,C or G
nnacggaaaagggagaaacccaataactcgttccgagaccgtacaaattctctgctacagtaccatctaggatagaatctaactgcacagcccttatgtcccaaattatagaagccttggccccctctggaggactgctgccgtgtaagaaggtaaaatatgttcgaatagaacattggggaaaccatgtgagacctggtataatgaagtgctaagattgtgggcaaggtggggaggaggtaggccttcctgactagtttaggctacaatagttgggaagactgcaagaagccagcaggcttcagtcatgccctaaaagagcgattggtttagaaaaaaaaccaaagggaactactaacatgtattctattctaggcaggtgtgaggcaaagttgtatcttaggtctcactagattcttgcaaagcttatctgcatatccaggttttataaaaggttaagaaactgaagctcctagaagtaaatgagcccttagttatcaaatattgtctgcattgtgcaacttcttttttagcccgtagtctttgttttcatactcctagttttagagaattactccaaattcatcatgattgaagacaataaggagaacaaagaccattccttagaaaggggaagagcaagtctcattttttccttaaagaatgaagttggaggacttataaaagccctgaaaatctttcaggagaagcatgtgaatctgttacatatcgagtcccgaaaatcaaaaagaagaaactcagaatttgagatttttgttgactgtgacatcaacagagaacaattgaatgatatttttcatctgctgaagtctcataccaatgttctctctgtgaatctaccagataattttactttgaaggaagatggtatggaaactgttccttggtttccaaagaagatttctgacctggaccattgtgccaacagagttctgatgtatggatctgaactagatgcagaccatcctggcttcaaagacaatgtctaccgtaaacgtcgaaagtattttgcggacttggctatgaactataaacatggagaccccattccaaaggttgaattcactgaagaggagattaagacctggggaaccgtattccaagagctcaacaaactctacccaacccatgcttgcagagagtatctcaaaaacttacctttgctttctaaatattgtggatatcgggaggataatatcccacaattggaagatgtctccaactttttaaaagagcgtacaggtttttccatccgtcctgtggctggttacttatcaccaagagatttcttatcaggtttagcctttcgagtttttcactgcactcaatatgtgagacacagttcagatcccttctataccccagagccagatacctgccatgaactcttaggtcatgtcccgcttttggctgaacctagttttgcccaattctcccaagaaattggcttggcttctcttggcgcttcagaggaggctgttcaaaaactggcaacgtgctactttttcactgtggagtttggtctatgtaaacaagatggacagctaagagtctttggtgctggcttactttcttctatcagtgaactcaaacatgcactttctggacatgccaaagtaaagccctttgatcccaagattacctgcaaacaggaatgtcttatcacaacttttcaagatgtctactttgtatctgaaagttttgaagatgcaaaggagaagatgagagaatttaccaaaacaattaagcgtccatttggagtgaagtataatccatatacacggagtattcagatcctgaaagacaccaagagcataaccagtgccatgaatgagctgcagcatgatctcgatgttgtcagtgatgcccttgctaaggtcagcaggaagccgagtatctaacagtagccagtcatccaggaacatttgagcatcaattcggaggtctgggccacctcttgctttccttgaacacctgatcctggagggacagcatcttctggccaaacaatattatcgaattccactacttaaggaatcactagtctttgaaaatttgtacctggatattctatttaccacttatttttttgtttagttttatttcttttttttttgggtagcagctttaatgagacaatttatataccatacaagccacggaccacccatttttaatagagaagtggttggacccaatagatagatctaatctcagcctaactctattttccccaatcctcctgtgagtaaaaggaccctttaggatcgcttagaataactggaggagtattatggcgctgactcatatggttacctaagatccccttatttcttaaagtatctggtacttatggctggaattggtggccaagctcaatcacattcacactaaaatttaacaggagaccctgctgtctttgttgctagcatgagcaaaagtatagaggcctttgcacatggaggatacctagtaaagagcaagtagtctagtttcaagtgtagtatcttgtagggaaatgggagtagctaagcctggaaaggttgaatggggcataatcattaagactaggctaaaaattcgagactttattttttaggcattagggagccccttcccaagtgactatcttccttgaaactttgttttctttcaatgacatcacacgatactggttttattctggactatctatcctactcatgggtccaagggaaacttagtagagatgcgacttgcatggggctgtactcagacatgtggtcctaggtattataatgggattgtccccagattaacaggaagcattgttatcaaaggaagagttcaaactgagatagataagagaagcacaaagtaaaagatagaaaaaacagtgctgagtactttatttctaaggtataaggtgaggccataaacagaaaggtatgcaatgagagtagaggccnnnnnnnnnnnnn

SEQ ID NO: 21624 - DNA, 4742 bp, Homo sapiens
  misc_feature 1, 2, 3, 4, 5, 4730, 4731, 4732, 4733, 4734, 4735, 4736,4737, 4738, 4739, 4740, 4741, 4742: n = A,T,C or G
nnnnncgaccccgcgtccgccccgcgtccgcccacgcgtccgctggaggtcttcttagacctgctctgctgccaggagaagaaattgtctgtgagggtcttcgagtcttgctggatcctgatggaagagaagaagctactggaggtcttcttggaggccctcagctcctgccagcagaaggagccttgttcctcaccacatacagaattctcttcagaggaacaccccatgatcagttagtgggtgagcagacagttgtgcggagctttcccattgcctccatcaccaaggagaagaagattaccatgcgaaccagctacagcagaacatgcaagaaggactgcagatcacatcagcatcttttcagttgattaaggtagcatttgatgaagaagtcagtccagaagtagtagagatctttaagaaacagctgatgaagttccgttatcctcagtccattttcagtacctttgcttttgctgctggacaaactaccccacaaataattttaccaaaacagaaggaaaagaacacttcttttcgtaccttctcaaaaacaattgtgaaaggtgccaaaagggcagggaaaatgacaattgggcggcaatatttactgaagaagaagacagggacaattgtggaagaaagagtaaatcgtcctggatggaatgaagatgatgatgtatctgtttcagatgagagtgagctccccacaagtaccaccctgaaggcctccgagaagtctacaatggaacagttggtggaaaaagcttgtttcagagactatcagcgtttaggtttaggaaccataagtggcagctcttcccgttcaagacccgagtattttagaattactgcctccaacaggatgtattcactctgccggagctatcctggccttttagtcgtacctcaagctgtacaggacagtagtttaccaagagtagctcgctgctatcgacacaatcgcctgcctgttgtatgttggaagaactcaagaagtggtactctgctcctccgatctggaggattccatgggaagggagtcgttggtcttttcaaatctcagaactcccctcaggccgctcctacctcctctttagaatcttccagtagcatagaacaagagaaatacttgcaagccttactgaatgctgtttctgtccatcagaaactcagaggcaacagcactcttactgtcaggccagcctttgctctatctccaggtgtgtgggcaagtcttcgctctagcactcgcttgatcagctctccaacatccttcattgatgttggcgcccggctggcaggcaaggatcactcggcctccttcagtaacagcagctacctacaaaaccagctcttgaaacggcaagcagccctttacatatttggtgaaaagtcgcaactaaggaacttcaaggtagaatttgctttaaattgtgagtttgttcctgttgaatttcatgaaatccggcaagtgaaagccagttttaagaagctgatgagggcttgtatcccaagcaccatccctactgactcagaagtgaccttcctgaaagcgctgggagattctgagtggttcccacagcttcacaggataatgcagctggctgtggttgtatcagaagtacttgagaatggttcctcagttttggtctgtttggaggaaggctgggacatcactgcacaagtgacatccctggttcagttactcagtgatcccttttataggacacttgaaggcttccagatgttggttgaaaaagagtggctctcttttggtcacaaattcagtcagaggagcagcttgaccctcaactgtcaggggagtggttttgctccagtcttcttacagttcttagactgtgtacaccaggttcacaaccagtatccaactgagtttgaattcaatctctattacttaaagttcttggctttccactatgtgtctaatcgctttaaaacatttctcctggattcagactatgaaagattagagcacggaactttatttgatgataaaggagaaaagcatgccaaaaaaggagtctgtatttgggaatgtattgacagaatgcacaagaggagtcccattttctttaattatttatattcaccattggaaatagaggctctaaagcccaatgtaaacgtctctagcctcaagaagtgggattactacatagaagagaccctgtccacaggcccttcctatgactggatgatgctaacccccaagcacttcccctccgaagactctgacctggctggagaagctgggccacggagccagaggagaacagtgtggccatgctatgatgatgtcagctgtactcagcctgatgctctcaccagccttttcagtgaaattgaaaaattggagcacaaattgaaccaagcccctgagaagtggcagcagctgtgggaaagggtaaccgtggaccttaaagaagaaccaagaacagatcgctcccaaagacacctgtcgagatccccaggaattgtgtctaccaacctaccttcctatcagaagaggtctctgctacatctcccagacagcagcatgggggaggaacagaattccagcatctccccatccaatggagtggagcgaagagcagccacgctctatagccagtatacatccaagaatgatgaaaacaggtcctttgagggaacactttataaaagaggggctttgctgaaaggttggaagccccgttggtttgttttggatgtaacaaaacatcagctgcgctactatgactcaggtgaggacacaagctgtaaaggccacattgatctggctgaagtagaaatggtcatccctgctggccccagcatgggagccccaaagcacacaagtgacaaggctttctttgatctcaagaccagcaaacgtgtgtataacttctgcgcccaggatggacagagtgcccagcaatggatggacaagatccagagttgtatctctgatgcctgatgcccatggtcaacccacgcagaagaaacagaagaactcatgctgccagatagatagaaaaagaagcatggatccttgaggagctgacaacaagttatcccagggcctgaggttctcctgcccagtcccctcttgcaggggttgctatatctacttaacctgaataggtgtttcacacaggtctggtcaacagccccatgcactccctgtatcttgcactaaatttttctaacagggtcttagtggttaatgatcagaagatgtctcctgagccaactgtgaacctcacccaggcaaaatggctaccacctacttgggtccttcttcatgaaagctatagatccttttttgttctctgaggtcataatttcctcggagacctgtttaacaagcaaaaatcaaaaccctccaagattgtctcatattctacctggactaggtttcctatgagagacatctacttgtaatgcctgacctttgagatgctcagttctctggtgctgccaaaagatgtttccatggtccgtgctctgccagtggggttcacaacaagagacgtcattgttcagtagcaggcaaagagggagcacacagcattattctgatggaaaaagattatccagggaatggtacaacaatgaccagcccaatgcaggaaaacactacttccaaaacactgaattctctagaccagaggtgctctgaggatccagggccttgtgttcttatgtatcttctgcttcctgacagcttctttttcaaaataacatgcaaaaaaagctgaatgcactaactcacaaaacaaacacttgcactgaattcccaatgaagtgaagatgttggaaagacagaggccagctatttaggaccatacgcacctgtgacaagggctgtgttgaccacagtcacactgtggcatgactggatacccaaactacacttctacacatgaaaagtaagaactgtctttagattttctttactttgataacttgtgattgtttagcttaagacccaagaaatgctgtttgctcatggtaaacagaaacagcatcttcgctacaaccactgacaccagctggcgtcataggtagctagatcattgcatttgttttgaaatgttaatatgttaaatactaaactaatatttcaaaaatgtgtatatatgatttctatatccttgtttttcagatagcctgcttataatttaatataaattaactgatgcattcataagatttcaataatgaaatggttcccttttaaaaaataaaaatactttgtagattaaaaataaatcagaatttcaaatttaaaattgtccacacactaggaaatagaactgtgttaatatataagaaatttggggataattaagaatgaaggacttttctatcatttccattttataaattgccacctgtgaaaatggtttttgcacattatttgtatttttctttgtatatgaaataattttttgtactttgtaaaatatggagcccattgtaccttcagctatttgagactatacacagtgcttcttttgtaactggattactttaactttcgtgaaggcattacattgcctcacattcactaaccaccttgaattaaatttatttcttaagaaaaaaaaaaaaaaaaaaactaagcaataaagttcattctgtagtgcacagcattcaggagggtaacactcaggattcatacatgggactaaaggttcaagaataaaacaaagcatgannnnnnnnnnnnn

SEQ ID NO: 21625 - DNA, 734 bp, Homo sapiens
  misc_feature 1, 2, 3, 4, 5, 6, 7, 8, 9, 734: n = A,T,C or G
nnnnnnnnngaaaaagaaaagggaacaaatttcacataggagaatagtttttgaaatctttgcacaacagggtggccatagtaaataatgattatttatttgcaaagagaagacagagataacaatagcaataataataatgtatttcaaacaattaagagtaaatttcaaatgcctcaccacaaaatataagtaagcaaagtaaggcgatagtatgttaattagtatgatttaatcatactacattacacacatatatataaacattacgttgtaccctatgtgtacaattatgatttctgaattaatattagagtggggagaacaataatgattaatttttacttcttcagtaagattacaatgaaaatgtagagagcactagcattatagtaactatacgataggccactttaaataaatggcatcttttacaaaatttttagtcaataagttgattacgacatacttacgaactatttgctattaagtgtaagttaatttataattttagtattttcaaaaaaggaacatattaaaatcctatcaatatttcaaataatgacagaattaatcatttttaatagaatccttactcaggtcctccaaaaacaatataaactatgacttaaggtagattcctttaaatctggctaatgaataaatgttaaatctcaaatttcatagtcccagtgctggaaaacctatatttttatttttcttcacgtttatan

SEQ ID NO: 21626 - DNA, 1268 bp, Homo sapiens
  misc_feature 1256, 1257, 1258, 1259, 1260, 1261, 1262, 1263, 1264, 1265,1266, 1267, 1268: n = A,T,C or G
tccgcgggaaaatcacttgaacccaggaggtggaggttgcggagagccgagatcacaccactgcactccatccagccttggtgacaaagcaagattcaatctcaaaaacaaaatatacaaaatgctgggattacaggtatgagccaccatgcctggcccagtttgtcattttaatgcatgcatgtcagcatgtttctcaccgtcactgtcttctgtctcctgtaaaataaagcctgttctctgtagcatggcacccatgagcctggtcttgatttccttcctccaggctactttcatgatttatccctggccatgcctgatatggctcccagtcatgctgagctagtttcctcaacatattagaattgtttttcaggcctttatgcttttgctcatgttttttttttccttgacatgcttctttcttctatccatttgccagatttctttcacatcctaagattcaggtaacatcataacctcctatggaaagcaagccctctataggaagtgttaagggcttccttgtctgtgttcccactgtgccatgtacctacttctttctgccacctcctacattggtgtacttttgttgttgttgttaagctgtccctattatactagattgtaacacatgctttctaccgcctagagcaggaactgtgtactcttaattgtttcctgagggcttgagattagcatctggcatgtagtaggtgtttaataaatatttcttgagtagatgaagatatgagtgaatgaatgaagggtttcatgctgaaaaatgaaaaaagggtttaactttaagaaaaaagtcacagattttggagtcataggaattgagtttgagtcctaccgtcatttcttagtgttgatataattttaagcaggttgtttccctcctctgatctttagttcttttgcaaaagggaggtggtagtagtggtagtaatactattaacagtagtagtagtaataataaaagtgcttttaaaataaatattctgcaaattttagttaatattgttaacagtaataaaaagcatcttctatatgtaggctgcacatgcataatgcattgtcttgaacgacgtgagaggagaattacttaaaactttgggtagacgtactcatcatttacaagatcaatttactgggttttgctataattgggtggccattgttgacccattgctttattgtcccattgtctcatcacttgctcaaacgctgaagatgggtcagggggagtcagnnnnnnnnnnnnn

SEQ ID NO: 21627 - DNA, 2290 bp, Homo sapiens
  misc_feature 1, 2, 2270, 2271, 2272, 2273, 2274, 2275, 2276, 2277, 2278,2279, 2280, 2281, 2282, 2283, 2284, 2285, 2286, 2287, 2288,2289, 2290: n = A,T,C or G
nncgtgaggatccagcccaggctccagttgtccgcggttcctcctcctgtcgctgcccgtgtgattactgagccttagatggaccacacatccccgacctacatgcttgctaacttaacccacttgcattctgaacaacttctgcagggcttgaatcttcttcgccaacatcacgaactctgtgacatcattcttcgagtaggtgatgttaaaattcatgctcacaaagtggtacttgccagcgtcagcccgtatttcaaagctatgttcactggaaacctttctgaaaaagagaacagtgaggttgagtttcaatgcattgatgaaactgctctccaggccattgtggagtatgcctatacagggactgtttttatttctcaggacacagttgaatctctcctgccagcagcaaacctactccagataaaacttgtcctgaaagaatgttgtgcatttcttgaaagccaacttgatcctggtaattgtattggaatttctcgttttgcagaaacatatggttgccgtgacctttatttggcagccactaaatacatatgccagaattttgaagctgtttgccagactgaagagttttttgagcttacacatgctgacttggatgaaattgtttccaatgactgtttgaatgtagctaccgaagagactgttttttatgcattagagtcttggatcaagtatgatgtacaagaacgccagaaatacttagcacagttactaaacagtgtacgattaccattgttgagtgttaagtttctcactagactatatgaagcaaatcatcttattcgtgatgatcgcacttgtaaacatcttttgaatgaagccctaaagtaccactttatgcctgaacatagactctcccatcagacagtcttgatgacacgacctcgctgtgctcccaaagtactttgtgcagtaggagggaaatctggactctttgcctgtttggataggtaaatagaaggctttcctaaatgaatgatgctaattgattttatgctttttaaatgtgcagattttctatattttaaaaatagtttgattttcctttttacttttctttgcttctttttagtttttttcttcttcctaaaatacttacgtgattgtttttattatattgtcattcattctttacaatactctcaattattaaccatctccccaagtgcacactttatccacctggttactcacaaacttttattccattttctctctttctttctttttttctttctggaaccatttacatgtttatttgagtcagaccacatcagaagagatttattattgtcaattatatcagaagatagcaaagaagagaactaggaacctgtggtgagggaactggggacaggaatgggtttgaatgaaaacagttcactagaagcgctaccaaagaaatgagaaaaaataggatgctgatataaattatgtactttgagtgtaatttgttttcttcagtgtatttttaaaagacagcattaagaaatatgtttttccccccaataacttagattaggaattgtcagactttttctataaaagaccaaacagtaaatattttagactttgtgagccatgtaatctttgtggcatctacttaactctgccattgtagtgtgagagcagccatagataatacataagtgaatgaacatggatgtgttccaataaaactttatttataaaaatagctagtgggctaaatttggcccatggtgatagcttgccaacccttaatttggtgcattatactagtaacttttatacattgaaaatatagcttgaagttatttttgctttttcttagataggattgcttcatgaaaacttttgtgtttaatacatattttttaatactgtggatttctgaccatttccaaaaatttggtagattgcttttccctttccaatgttaggaaacttgacgtttcatcaatggcaactgataaattctgcatctttaaaaaagtctcaaaatacctgtaatcccagcactttgggaggccaacacaggaggatcacttgagactggagtttgagacaagcctgggcattataacgagatcctgtccttacaaaaaatttaaaatattatctgggagtggtgttgcactcctgtagtcccagctaatcaggaggctgaggcaagaggattgcttgggcccgggagtttgaagttgcagtgagctatgaatgcaccattgcacactaacctgggtgacagaatgagaccctgnnnnnnnnnnnnnnnnnnnnn

SEQ ID NO: 21628 - DNA, 629 bp, Homo sapiens
  misc_feature 515, 578, 628, 629: n = A,T,C or G
acgtgaacacatagtcgtcattcttgctgcccctgcctgtgctcccttccatgaccgctagtgggagccaagggagataaggcccagcccttaggagttagggctgagaggggagcccacgctctcatacccagcaagctgcagagtgatcagacagcccattccctatgatcgcaagtcctacagctggaaacagcggctcttcatcatcaacttcatctccttcttctcggcgctggctgtctactttcggcacaacatgtattgtgaggctggaggtgaagccaggataggatccacaggcggtcatgagtggctgcggggcagcaatgatgtttttgataatgggcaatggtcttggggactggctgccattgtgttctctgtggcagaccaatggtggtgtgatttatcaagaggcctctgagcgggtagctggaagttcaccatgtcctgttccttgtgtcctcacaacagtgtacaccatctttcccatcctggagtacactgttgtnttaaccaacatggcgttccacatgacggcctggtgggacttcgggaacaaggagctgctcatnaacctctcagccttgaggaaaagcggttctgaaaccctttcagtcctgcnn

SEQ ID NO: 21629 - DNA, 498 bp, Homo sapiens
  misc_feature 493, 494, 495, 496, 497, 498: n = A,T,C or G
acactaaaaagtatcctttttcagatatatttagtgctgttttttttcacatttttgtgcttttaattggtaatttcactgtttaaacactatattgtgacatctgaaatcattttgacctcagaatttgaaagaatggataaaagaatttggaaacatgtttttctttgttgttgttttttttgtttttttaggtaacattttaaaaattgtttattcctaccaagacccagttaataaaaaattttaccttatgggtaaaggatacacaggagctttccatatctgcaacttttccgtaaatctaaaattatttaaaaagaaattatctaaaagaatttagtctgtaatgaattttccacattatagaccactctcccaagtgtttgggagagggccaatgaaaagatgggacattttggcgtcatcaataattgcttggcctagacctgtgcattcttggagatctggtatgggcatataactcctaacnnnnnn

SEQ ID NO: 21630 - DNA, 2467 bp, Homo sapiens
gtgtcgcccacgttcattcgccgttgtctgtggtctgtcttgcttctgtgtttatttgttcagctcttggggcccgcccctctcgactgcttgtgcgtgtggcgtgccccacggtgtcttgtagtggcgtggttcgtgccttgggtgtgtgtcgtcgttgccttttgtacggcgggggggcgcgtcgcactgtcgttcttgtttgccctgtcggggtgtagatctgccgctgttggtgttttgtgttgtctgtgtgtggtggtgtctgtgcggtctgtggtcggtgtgggtgcaagtggcggataattagcttaatttttactactcataacagtttatttttactttgtacaaaatacaaaaatgcaaatccaaggagtacagaccagtagtgacaggcacactgcacaacagcaaccttgtctagcaagacaggagttttttaaattttattttagtgaatacatgcattatataaaacaacaacaacaacaacaacaaaaacacaaagaggctagagatttcaccgtttctacccccaaaataacgcttgctatcaagactttggagggggatgggggaaaagaatttaaaaggcaaataattttttttttcataaaaagtaaaagctaccataaaacattttttttttttctgtcacactgattaaatttcttctgaaaagccgcacatatagacaaaacaaaacaaaaattcctgaactggacaaacagcaaatactcaacagggttgttaacctaggtaacagttcagtagtttaaagaatcttttagacatctggaagcctttctattcattcctcagtacagtgttccagccatcctgcttgttttttccctccaatacctcccagaacagaaacacttgcatcgagtctgttcctaagaactagttttgaaaaagaagcgatgtacaaaaatatttaacagaactatgaaagatgcaggaaaggagtctttcttcgtagcaaagtagtcgttgctttgcatggtttcttttgtatactcttcagggtttgtttatctgccccatgaataacacagcacctgtaggattatgtcggatgaaaaacagaaaaggtctgtctactataaaccagggaggcgatgatcttgcaatgagaattgcagttgttgctgctgaagctttggttccatcttcactgacttcaatttttgctttttgcaagatatgagaaacatggaggttttctgaccttgttatttttgcaaaatttgcctttgatgaatcaaacatgtcagtaatgccaagaactttcagcggctccttcaaatctgtttgtgctacagctgtgaacttgggcaggatcacctgcaccctcttgggcaccatgatgctcatccagctgtctatggtcttggtgctgatgtgtgggatgatggcagacagcggagtggagctctcagtcggcagtgcaatcagcatgctgatgctttccccgtggtagggcagttcaatgaagttgtaccataaatcattgggggcacttgtcgacccacaccggaacacggagagctgggccagcattggcacttgataggatttcccgtcggctgccacgaaagtgcgtttctttgtgttctcgggttggaaccgtgatttccacagacccttgaaatacactgcgttgacgaggaccagtctggtgagcacaccatcaataagatctggggacagcagattgtcaatcatatccctggtttcatttttaacccatgcattgatggaatcacaggcagaggctggatcctcaaagttcacattccggacctcacactggaacacatctttgttccttgtaacaaaaggcacttcaatttcagaggcattcttaacaaacacggcgttagccactgtcacaatgtctttattcttcttggagacgatggccttgttgatcttctttaatattttaccaactccatttacgccgtatctcatcaccatggcaagctgcttcttggtcctgccgtccgcccccagctgaagcatccccaggaccgacgcaatcccatggggagagatcacgatgttgtcatgaggcctcgacttcacaatctgattgaaaacctggatccccgtgttggagcctagttcctcgagagacagaggattgaagtgggagcagatggaaggcagcgtcacagaggccaagaggaagagggggagatgccagttcatggttccttccaccaaggacgaccgcgctcgctggatccccagggggcggccgcggagggcggtgcggccgcaaccggagcgggagcctggtctcggcggcgcggggagtcggaggacgcagccaagcggcggcggcgaggagggtcacagccggaaagaggcagcggtggcgcctgcagacgccgcgcagcccgggcagccccacagcgcaacgggggggggggggggctcgacccgggaattc

SEQ ID NO: 21631 - DNA, 1948 bp, Homo sapiens
  misc_feature 1, 2, 1943, 1944, 1945, 1946, 1947, 1948: n = A,T,C or G
nnctcttaaaccttcccggtcttcccccttcaattctacttccaggttatgcctacttcccctaagctaagactcatccaagctgttctgagattccctccaggcagggaaatgactatctggatctgagatatgtcatcttcatcaagtcttctttaccagagagcttcgggtttcagacacacagaagcataattctggccatacaaaaacctcaatgtttcttctgtcttccactcaatcaaagtctccttcaaaactttaagtaagtttctctttccaacttcaggacacacctgcactgaactagacactgacctagacacttggtttgatttggcaaattttctcttaaaatgctctgcacttttcttacttatgcctactagagttatttctgacctactgtattcactttcagaattttctgacgcttttaatctttcaggcaaagtgctatttgaagaactctgagtatttactttctgtaaaggaagttcacatgtagcatctttctcctgactatctaatttgcaatcgcctaactgctcagtgacatctactactgtctgttctttgtctttgtgtttggagttagctttgtgaccagctttctttttcattatgcttttttggtgcagctgtggtctaatatttgttgaatttggtctgtttcctggtagaatggaggaaacaaagtcttgctcattgtcactgctactatcactgtgagtgctagaagaactagattcatattgcttttcaaagtggctaggattgtcgatatctgatgttttaatggctttactgcataactgtacttcttctccagaatggccactttgttcttcctttagcagttgaaaatcaggatgcctctcttcttctcgaacccatactggagttttgggaatttgtgcttcaaaaaacttagatgcttgataacaaaaattgctgcaaaaagactttctttcagtaatatcatagactttattggttttggtagaaattttatatttctgttttggtacaattcccagcttcttctgacataaaggataaccacagagtttgacaatagaacgttcatccacgacatcactgtagtgagcaggtgtaatgaacctcccacactccattaggaactcttctgtaatattctcctctaaaagctgttcaacaatatgtagagcttttctctcaaattcaatcttctttctcacagctgcttctagttcagctttccttttagaagcatcttcttgtttcaaagtacttgtctgtttagtacctgcggcttttcgagagcagcggggagccccggccttgcggccggcagaagacggcccagcgaagtccgccatgggggagagtagtctgccggacggggacacgctccggcgtctcgccccgaggccccgcctccctacgcgtagcgcggggcggggccagaagagcgggctaagacgccggaggaggtggcggcggctgggagaggcgagggttctggccggtaagtggagttgtggagaggttcagggtggccagggctcgcggttggccgtgagccgcggcggacttggtgctgcgggccgactaggccacgcgaggtggtggagcctgcccacctaggcgagcaggaatcggaagacatggcttcctctgatgcagcccgcacgcgcgctggggtgttcactcgccttccagcgcgctgccctgaggaccgggctgactcgcgcccctactgagggcttggggccgagccttgccgccaggagaagcgatggtctcctcctgaaggccgccgttgtcttgtctccgtgtgatacagtgatttcactagctggattgatcactttggggactgcaactcctaaagagaaatggaatggagggcatctgaatcttcaccccctatagataagcttgtgttgcaccccaannnnnn

SEQ ID NO: 21632 - DNA, 589 bp, Homo sapiens
  misc_feature 1, 2, 3, 4, 5, 255, 256, 257, 258, 259, 260, 261, 262, 263,264, 265, 266, 267, 268, 269, 270, 271, 272, 273, 274, 275,276, 277, 278, 279, 280, 281, 282, 571, 572, 573, 574, 575,576, 577, 578, 579, 580, 581, 582, 583, 584, 585, 586: n = A,T,C or G
  misc_feature 587, 588, 589: n = A,T,C or G
nnnnnggttaatagtgctgtgtcctaaaggggatcctgaggggcgttgcctcgggtagttaaagtcttatgtgtgcataagttgcttattctttgtctacttcctatttgagatgttagtagagaactgtcctgggtgaatctttcagtattgcagggcttggcaacttgctgcccgacaaaatacatcagaatttctctttaagaacaatatgggatggattaaaaaatatatatatgggatgaaattgggggnnnnnnnnnnnnnnnnnnnnnnnnnnnnccccccgttgcccccaaattttttatttggcaaaaaaaaatttttttttaaaaattttttcccggaaaaacccttttttttggggggggccccccccccccccttttaaaaaaattaactctcgaaaaaattttcccccaacccttttgaaactttttcctcggggggaaaaaaaaatttggggggttttcccccgggaattttaaaggggccccccccaaaaagaaccaatgggccccaaaaatttttggggaaaaaacttagggggggcccccctcttttttaaaannnnnnnnnnnnnnnnnnn

SEQ ID NO: 21633 - DNA, 1472 bp, Homo sapiens
  misc_feature 1, 2, 1472: n = A,T,C or G
nnagtcaccacgcgtccgctgcaccagaccgcggacgtctgtaatctcagaggcttgtttgctgagggtgcctgcgcagctgcgacggctgctggttttgaaacatgaatctttcgctcgtcctggctgccttttgcttgggaatagcctccgctgttccaaaatttgaccaaaatttggatacaaagtggtaccagtggaaggcaacacacagaagattatatggcgcgaatgaagaaggatggaggagagcagtgtgggaaaagaatatgaaaatgattgaactgcacaatggggaatacagccaagggaaacatggcttcacaatggccatgaatgcttttggtgacatgaccaatgaagaattcaggcagatgatgggttgctttcgaaaccagaaattcaggaaggggaaagtgttccgtgagcctctgtttcttgatcttcccaaatctgtggattggagaaagaaaggctacgtgacgccagtgaagaatcagaaacagtgtggttcttgttgggcttttagtgcgactggtgctcttgaaggacagatgttccggaaaactgggaaacttgtctcactgagcgagcagaatctggtggactgttcgcgtcctcaaggcaatcagggctgcaatggtggcttcatggctagggccttccagtatgtcaaggagaacggaggcctggactctgaggaatcctatccatatgtagcagtggatgaaatctgtaagtacagacctgagaattctgttgctaatgacactggcttcacagtggtcgcacctggaaaggagaaggccctgatgaaagcagtcgcaactgtggggcccatctccgttgctatggatgcaggccattcgtccttccagttctacaaatcaggcatttattttgaaccagactgcagcagcaaaaacctggatcatggtgttctggtggttggctacggctttgaaggagcaaattcgaataacagcaagtattggctcgtcaaaaacagctggggtccagaatggggctcgaatggctatgtaaaaatagccaaagacaagaacaaccactgtggaatcgccacagcagccagctaccccaatgtgtgagctgatggatggtgaggaggaaggacttaaggacagcatgtctggggaaattttatcttgaaactgaccaaacgcttattgtgtaagataaaccagttgaatcattgaggatccaagttgagattttaattctgtgacatttttacaagggtaaaatgttaccactactttaattattgttatacacagctttatgatatcaaagactcattgcttaattctaagacttttgaattttcattttttaaaaagatgtacaaaacagtttgaaataaattttaattcgtatataaaggtgggcctttttttaatgcattggctttttgtgtagtcaggaaatataattaagctctgaaataatan

SEQ ID NO: 21634 - DNA, 2165 bp, Homo sapiens
  misc_feature 2151, 2152, 2153, 2154, 2155, 2156, 2157, 2158, 2159, 2160,2161, 2162, 2163, 2164, 2165: n = A,T,C or G
gtcatagggagtcgacccacgcgtccgcccggccgaacggccacccagaggctgtgctgagctggcgcagcggcagcagcatgagccggaccctcgcatcggccgtgcccctgtcgagtcccgactactacgagaggctgggccaactccagcacgggctgcgggacagtgaaaagaagagattggacctggaaaagaaactttatgaatataatcagtctgatacatgcagagttaagctgaaatatgtaaaactaaagaattatctgaaggaaatatgtgaatctgaaaagaaggctcatactcgaaaccaagaatatttaaagcgatttgagcgtgtccaagctcatgttgtacacttcaccacaaatacagagaagcttcaaaaactgaagctcgaatatgagactcaaattaagaagatgctatgctcaaaagatagcctgggactaaaagaggaactgacagatgaagacagagaaaaggttgcagtgcaggaggggattaactcaggaacagccatgtcaagaggattgtatcaaccagcaacaatctttatgggccgccaaatgtcagccatcttaagcatgagagatttcagtacagagcacaaatctccccagcccacaaagaacttttcaattcctgacccacattcacaccgacagacagcccagagcagtaatgtgacagacagctgtgtagtacaaactagtaatgacacacagtgcttaaataagtctgacaacatagatggaaaggcatctcttcagattggtgagaaaacgccagtcacagccagtgtattgtctgaggaggaacaaactcattgcttggagataggaagtaacacacgtcatggcaagagtaatttatctgaaggcaaaaagtctgctgaactcaattccccgttacgggaaagattaagtccagagaacagaaccactgatttaaagtgtgacagttccagcggatcagagggagaaatactgacacgggaacatattgaagttgaggaaaaaagagccagcccgccagtctctccgataccagtttcagaatactgtgaatctgaaaataagtggtctcaagagaagcattctccttgggaaggtgtttcagatcatcttgctcacagggaaccaaagtcacaaaagcccttcagaaaaatgcaggaagaggaggaggaaagttggagcaccagcagtgaccttaccatttcaataagtgaagatgatctgattttagagagcccagaaccacagccaaatccaggtggcaagatggagggagaagatggaatagaggccttaaaattaatccatgctgagcaagaaagagttgccctatccactgaaaaaaattgtattttgcaaaccctaagctctcctgattcagaaaaggaatcctccactaacgcaccaacaagagaacctggacaaacaccagactcagacgtaccgagggcacaggtgggtcagcatgttgccaccttgaaagaacatgataattctgtcaaagaagaggcaacagcattattgagaaaagcccttacagaagagtgtggccgtaggtcagctattcacagtagtgaatcatcttgcagcttgccatctattctgaatgacaatagtggaataaaggaagccaaacctgctgtatggctcaacagtgttcctacaagggaacaagaagtttcaagtggctgtggagacaagagcaagaaagaaaatgtggctgcagatatcccaatcacagaaacagaagcctatcagttgctgaagaaggccacccttcaggataatacaaatcaaactgaaaacaggtttcaaaagacagatgcttctgtgtcacacttgtcaggtttgaatattggcagcggtgcattcgagacaaagacagctaacaaaattgcttcggaagctagtttttcatctagtgaaggaagtcctttgtcaaggcatgaaaacaaaaagaaacccgtgatcaatttaaaatctaatgccctctgggatgagtctgatgacagtaactcagaaattgaggctgctttacgccccagaaaccataacaccgatgattctgatgatttttatgactaacgtgctgtgacattggtttcaaataaagtctttaaacaaactacaaaannnnnnnnnnnnnnn

SEQ ID NO: 21635 - DNA, 1744 bp, Homo sapiens
  misc_feature 1, 1607, 1743, 1744: n = A,T,C or G
natcctacttcaacccttttataaagcaatatatagaggtcttagatgtataatccttgagatgccattgatcagatgccaattgtattcagagctcataaaaacaagtccattcttatagttggttgtgtcactgagacggtgcctgatttaatatatttaagctgcttaactgtgttttccaagagataacaccaactgttccagcaataatttgttttttaattcagagatatgggatatgatcttctaaggaggttgcattattttgacctgatttatttattgtacaagagcccaagtccctgaattatattcttaataagtgctttcttgcattcatttcagtttagtctcaccaaccccctatgaattaggagaattattgtcattttacacatgaggaaagtgaggctgagagaatccaattagcttgtacgatatcactccataagagaagcaaatctgagagtaaaacccttaccccttattcttaagaatagtgcttgtttattcagtacaaaaaaaatgctgaaaggcagcgttttttagactctaaacattctgattttgaaggtgggtgttggaacgactgatgatgttttttatatcatcaattcagccaatggatgcgaacttaaaatctggattcacagaaccgtggtcacatttccccatcaaaatccccaaggcgggtcccaagttctctcctctacgctcattgcagaaatactttgaaataggttctgccagtctacaatagcagtgaagactgacaaatcagatattcccaatgactgacagcttctcatcttgcctctacctcagttaagtaatgtcaccctgaaacctagcttttctgcacttccatttctgacacctgaaaatgaaaatgataatcctaacttatacaccaagacctgttagcaagatcgattttgtaacagaaattgcttataagttttttatcagtaaggaccatgatcaccatttgtacatacataactaggttgttgagcaaagcatttttgctcatgtttcttaaggaagtagagtagtccttgtgtcagaacacatgttaatccacaaaacgccgcatcccagattccaaattaaaacatcgtttttaggattcttggagctagcctggatcatgggtaaaggaaacattttgccttttgtatcttatactggaatgggatgtctgtaagtcctagaacctctttgagcatatttcttacaagcctctgttttttcccctttaaaggaaactttgaaaggattgtgaatactggaaaatgacaaaactaaaggtagatctatcaagccaattgtctgtttatctgtttgtgtggtttttacccccttgcaatacctttcctcccaaaaaattaaggcactatggaaagaatctcagaggagaaaaacagataacttgtgataacttccagggaccgaagtctatgcattggtgagggtggacttgtttgcaacctgttgttattttttttaagtgacccaactgttcaagtccaaacttggcccataattattaagagaatcttatccggttaatcagtattaatcaggattcttcagagaaacanaaccattaggatatatatctttatattaaagaattattatggggatagctcacccattatgaagcttggaatttcatgataggcttgtgcaagctggccccaaaaagaagaagtgtgataaatccagtccttggcnn

SEQ ID NO: 21636 - DNA, 2425 bp, Homo sapiens
  misc_feature 1, 2, 2425: n = A,T,C or G
nnagaccgtccatccaggggaaggcaagtttttggctcgggcggctgagaagaccgcgcggggctggagacaggtagcagtacgggggcggggcttcatgccggatgtgatagtctgcagtcgtttcggttggcagcctggcgggtgggagatgcggcggccacctgctgcaaagaaccgaagggaaggttagaagtacgaaggcagtttggagctggggctaagcagctgtcgcacggtcagatcatgggctccaccaagcactggggcgaatggctcctgaacttgaaggtggctccagccggcgtctttggtgtggcctttctagccagagtcgccctggttttctatggcgtcttccaggaccggaccctgcacgtgaggtatacggacatcgactaccaggtcttcaccgacgccgcgcgcttcgtcacggaggggcgctcgccttacctgagagccacgtaccgttacaccccgctgctgggttggctcctcactcccaacatctacctcagcgagctctttggaaagtttctcttcatcagctgcgacctcctcaccgctttcctcttataccgcctgctgctgctgaaggggctggggcgccgccaggcttgtggctactgtgtcttttggcttcttaaccccctgcctatggcagtatccagccgcggtaatgcggactctattgtcgcctccctggtcctgatggtcctctacttgataaagaaaagactcgtcgcgtgtgcagctgtattctatggtttcgcggtgcatatgaagatatatccagtgacttacatccttcccataaccctccacctgcttccagatcgcgacaatgacaaaagcctccgtcaattccggtacactttccaggcttgtttgtacgagctcctgaaaaggctgtgtaatcgggctgtgctgctgtttgtagcagttgctggactcacgttttttgccctgagctttggtttttactatgagtacggctgggaatttttggaacacacctacttttatcacctgactaggcgggatatccgtcacaacttttctccgtacttctacatgctgtatttgactgcagagagcaagtggagtttttccctgggaattgctgcattcctgccacagctcatcttgctttcagctgtgtctttcgcctattacagagacctcgttttttgttgttttcttcatacgtccatttttgtgacttttaacaaagtctgcacctcccagtactttctttggtacctctgcttactgcctcttgtgatgccactagtcagaatgccttggaaaagagctgtagttctcctaatgttatggtttatagggcaggccatgtggctggctcctgcctatgttctagagtttcaaggaaagaacacctttctgtttatttggttagctggtttgttctttcttcttatcaattgttccatcctgattcaaattatttcccattacaaagaagaacccctgacagagagaatcaaatatgactagtgtatgttccacaccctctgctactgtgttacattctgattgtcttgtatggaccagaagagagctttgggacattttttctgaacattctaagcattctagtgaaagttcccatgttccaacagaacttaaaagcaatgtttgccttatatataaaagggacacaataattgaggtccaccttctaggaaatcctaggactcgtttatttgggacatggtgggaataaaggtcacatattggaaaatggaaaggctgatgaaactatcagatactaaaacattcttaaaatagaggaatatagttagagacatcaggtttaagccagtatttgttcctgttttacaatgcttctgtcttaagctgtgtcttaacttttaacacccatcttttctttctaaagctttcctgacagctgtgaaaatccaaaaaatattcttaaactgtgtatggtggcccttgcctgtagtctcagcactttgggaggctgaggtgggagggtcgcttgagttcaggagttctagacccacctggggcaagatggtgagacctagtctcaaaaaaaaaaaaaaaaattagccggtgttgtggtgccccctgtagtcatagctgctgggaggctgggtgggaaatttgttgacccaaagagaaccctgtcttcaaaacaaataaccaatatagggaggggccctttttcattacaactttaatatacaccaggtgggtttattcaaagtgacctctaattaggggggctccaaatccaacttgagcagcggcaacgaggtggatgacctgttacggaacctttaaaaaagggcgtaaatcagcgagacacttaagccagtgtataagcggacagaaatttttgactgttgacaactatatacgttgctgattattatgn

SEQ ID NO: 21637 - DNA, 3303 bp, Homo sapiens
  misc_feature 3297, 3298, 3299, 3300, 3301, 3302, 3303: n = A,T,C or G
gcgtccgcagctcttctttattgtctggtagaatttggctgtgaatccatctgccatttcagcctggctaagaaccactgctggggaactagtgcagttgtttggagttgcgtgttgtatcacaagatgtgaaattgagccttcaagaattggatgaactttatgtcatctttaagaaagagctgtttttatcttgttattggtgtttgggttgcccagtattgaagcatcatgaccccagtctgccatatttggaacagtatcagattgactgccagcagttcagagcgttgtatcacttgttgagtccctgggctcattctgcaaataaagactcactagctttatggacattcagattgttagatgaaaactctgattgccttataaacttcaaagaattctcctctgcaattgacataatgtgcaatggaagttttactgagaagcttaagctgctttttaagctacatattcctccagcttacactgaagtgaaatctaaggatgcttcaaaaggagatgaactttccaaggaagaattactttatttcagtcagctgcatgtttccaagcctgcaaatgagaaggaagcagaatcagcaaaacacagccctgaaaaaggcaaagggaaaattgatattcaagcatatctaagtcaatggcaagatgagcttttcaaaaaagaagaaaacattaaggatttaccaagaatgaatcagtctcagtttattcagttttcaaagaccctctataacttatttcatgaggaccctgaagaagaatcattatatcaagccattgctgttgtaaccagccttttactcaggatggaagaagttggaaggaaactacatagccctacatcatcagccaaaggattctctggtactgtctgtggttctggaggacccagtgaggaaaaaacagggagccacttggagaaagatccttgttcctttagggaggaacctcagtggtcatttgcatttgaacagattcttgcatcgctgttgaatgaaccagcattggtgaggttttttgagaaacccatagatgtaaaagccaagctggaaaatgcaagaatttctcagttaaggtctagaaccaagatgtaaatccctaggaattgcctatcatagacaagtttactaacattcctgtagctgtcagtttgattcctgtgagtagggctcagggatttatcttgttaccaatgtgtctgaaggccaaaatatatatccagaagcacaatgcatcattcctttgttgttgataatgggctttgttagcactttttaaaacaaacaaacaaacaaaacaaaaaagcaaaccacatttgttatctcaaattttgatgatattctcaaatacaaatatacttttttatatttcacaatatatgcaatatcaggggaatatgctaaatgttaccaccagagggcacaagcatatcacttttagtaaggaaattactagcttgtgttgctatttacatatgaattactgattattttgaaaagacggtgttatgcttgggtgttagtgaggctgatatgtcatgtcaatcgataaaccctactttccaaattatctaaaagattaccatttggggcccttgttttcaagttatctaactgaaatattattaatttttttaagttaatctcattcagtcttctagtaataaatgcttttttaagtaccttctacagtcttcctacctgaggggttcagaggctgctgactcacactgctaactctgttactgacaaaagcaaatcaataactctaaattctgggctgatataaagaaaaaaacaatattggatttggatttaatctgggtaaaatcagccttctgagaagggctaagaaacagttcaattaactgtataggtctttcattagaccgagacatcactagaaattctgggcactgctgtttgtggtatttgtctcagagtagcttatgactgttttggttctagctttagattttggattttcaccagtcatgtgttaatttacattagatagtaaagaatggctacactaagactgaattatcttattagtctggcaagcatataaagtatacttgtatgtaatgattgccaaggtaacagaattgctgacatctgtctaaaaagttttgactatccaatttagatgtgtaatttctatatactttatgctgtttatatttcagtcattacaccaagtccatttagagataatgggctttgttagcactttcaaaaaaaaaaaaagcaaaccatacttgtccactgtcctgtgctattcctaccaaggacaatttattaatcaattgacttagaaaatagggggagaaatcattcattggagcttctttctttagaaaagactttggttataagccttttgacttttctagatgtgaaaccatgaaagggcagacctccttcagagtgactcaagaggtctccctttcttggagggagttggtacagtcagcctttgggaagaatccactgtgaacaaagcttaacacatggggcttcatcgctcatagaatatgttattttcaaagaagttcaagaattttcaagttgagcctttgaaaatcccataaattggttttagctaaacacttactagtagtgtctttaaattatttaatcaaccttgtcttttcaaggaaattaccacttaaagagatagttggtaaataaacatctatgccttttctcagaaatgatttgctgaactatgtccatattttacagcttagataatagtttatatggaaactattatacatctgctattgtgcaatgattgttaaattatactgaagtagctctagaaagacacatgtatacaaggcactattgtacacactttgctgaatattttgtcagttgtatttacaaagaaaggtactttcttaagagcatatatgttattaatatttgatatgattttaaagtcagaatagtacagattgctgagtattatactttaggctagattaattaaaattgaatactgaaagagattttttgagttgcaaaaagtttataaatgcaaagcaaaaagaaaacatttattttctgagtctgcaggagaaacaaactaaacattatagttttatagctgctatcttgttaaccaaacaggttgttcataatattaaaaatcttacgtagttgtgttaaactgaaccagttcattataccttatgcattaaattaaatatgttataaggtggctttacttgtctttataaaaataaatatatctactaaacannnnnnn

SEQ ID NO: 21638 - DNA, 2560 bp, Homo sapiens
  misc_feature 1, 2, 3, 4, 5, 6, 7, 2539, 2540, 2541, 2542, 2543, 2544,2545, 2546, 2547, 2548, 2549, 2550, 2551, 2552, 2553, 2554,2555, 2556, 2557, 2558, 2559, 2560: n = A,T,C or G
nnnnnnnacaagaaaacttatttggactaagtagcgaggcccgtggggtgtgttatacgtggtccggcgtggttcaggcgggtgtcttcggccgggcttgggaacataaaagtttgtttcaccacgtaagccggacctcgcactccggtcccggtctcgtcgccaagatggtgaagcccaagtacaaaggacggagcaccatcaacccgtccaaggccagcacaaacccagatcgagtgcagggagcaggaggccaaaacatgagggaccgggccaccatccggcgcctgaatatgtataggcaaaaggagcgcaggaacagtcgtggtaaaataattaaacccctgcaatatcaatcaacggtggcttctggcacagtggcaagagtagagccaaatattaaatggtttggaaacacacgtgtgattaagcagtcatcattacaaaaatttcaagaggaaatggatacagttatgaaggatccatacaaagttgtcatgaagcaaagcaagttaccaatgtctcttctccatgatcgaatccggcctcataacttgaaggtgcacattcttgatactgaaagttttgaaactacatttggccctaagtcacagaggaaacgaccaaacttatttgcaagtgatatgcagtctcttatcgaaaatgctgaaatgtccactgagagctatgaccagggcaaggatcgtgatttggtaactgaagacactggtgtgagaaatgaagctcaagaagagatctataaaaagggacagtccaaaagaatatggggtgagctctacaaggtgatagattcatcagatgttgtagttcaagttcttgatgctagagatccaatgggtactcgttcccctcacattgaaacttacctgaagaaggaaaaaccttggaaacacctcatttttgtacttaacaaatgtgaccttgttccaacctgggcaacaaaacggtgggttgctgtcctctcccaggattatccaacacttgctttccatgcaagccttactaacccgtttggcaagggagcattcattcagcttctgcggcagtttggaaagttgcacactgacaagaaacagatcagtgttgggttcattggctatccaaatgttggcaagagctctgtgataaatacattgcgttctaagaaagtttgcaacgtggctcccattgcaggtgaaacaaaggtctggcagtatattactttgatgcgtcggatattcctgattgactgtccaggtgtggtttacccctctgaggactccgagacagacattgtgctaaaaggagttgttcaagtagaaaaaattaagagtcctgaagaccacattggtgctgtacttgaacgagcaaagccagaatatatcagcaaaacatacaagattgattcttgggagaatgctgaggactttcttgagaagctcgctttccggactgggaagttactaaagggtggagagcccgacttgcagactgtgggtaagatggtcctcaatgactggcagaggggccggattcctttctttgtcaagccacccaatgcagagccacttgtggccccccagcttctaccctcctcatctttggaagttgtcccagaagcagcccagaacaatccaggggaggaagtcacagaaactgcaggtgaagggtcagaatccatcattaaggaagaaacagaagagaacagtcactgtgatgctaacacagagatgcagcagattctcacacgagttcggcagaactttggtaaaatcaacgtggtgcctcagttttctggggatgacctggttcctgtggaggtgtcagatcttgaggaagagcttgagagcttttctgatgaagaggaggaggaacaggagcaacaaagagatgatgcggaagagtcttcctcggagcctgaggaggaaaatgtgggaaacgacaccaaagccgttattaaagcactggatgagaagattgccaaatatcagaagtttctagacaaagccaaagccaaaaagttttcagcagtcagaatatccaagggactgagtgaaaagatatttgcaaaacctgaagaacaaagaaaaacactggaagaagatgtagatgacagagcaccttccaaaaagggaaagaagcggaaggcacaaagggaagaggaacaggaacattcaaataaagctcccagggcgcttacatcaaaagaacggaggcgagcagtacgacagcaacggccgaaaaaagttggtgtgcgctactatgaaacacacaacgtgaaaaataggaacaggaacaaaaagaagaccaatgactcagagggacagaaacacaaacgcaaaaaattcagacaaaagcagtaatgtttaaaaggtttttattaaattatacaaaaacaggcaaaaaaaaaaaaaaaaaaaaaaaaagaaaaaaaaaaaaaaaaaaaccggggggtttttgtgggggggggagaaaagggtaaaggggggggatggtgtcggacacccttttggggaaagggggaaaggggggcccaaannnnnnnnnnnnnnnnnnnnnn

SEQ ID NO: 21639 - DNA, 5494 bp, Homo sapiens
  misc_feature 5494: n = A,T,C or G
cgccggagcgcgaagccgccgctgggacctcggcgcgccccgcgtctgcgcttgctgccgcgccccggtcggcgcgctgggagttccagccatgctcttctggcacacgcagcccgagcactacaaccagcacaactccggcagctacctgcgtgatgtgctcgctctgcccatcttcaagcaggaggaaccccagctgtcccccgagaacgaggcccgcctgccacccctgcaatatgtgttgtgtgctgccacgtccccagccgtgaagctgcatgaagagacgctgacctacctcaaccaaggtcagtcttatgaaatccgactactggagaatcggaagctgggagactttcaagatctgaacacaaaatatgtcaagagcatcatccgtgtggtcttccatgaccgccggctgcagtatacggagcaccagcagctggagggctggcggtggagtcggccaggggaccggatcctggacatcgatattccactgtctgttggtatcttggaccccagggccagcccgacccagctgaatgcagtcgagtttttgtgggaccctgcgaagagagcttctgcattcattcaggtacactgcatcagcacagaattcacccccaggaagcacgggggcgagaagggagtgccctttcgagtccagattgacacgtttaagcagaacgagaatggggagtacacggagcacctgcactcagccagctgccagatcaaggtgttcaagccgaagggagccgatcggaaacagaagactgaccgggagaagatggagaaaagaactgcccaagagaaggagaaataccagccgtcctatgaaaccaccatcctcacagagtgctctccatggcccgacgtggcctaccaggtgaacagcgccccgtccccaagctacaatggttctccaaacagctttggcctcggcgaaggcaacgcctctccgacccacccggtggaggccctgcccgtgggcagtgaccacctgctcccatcagcttcgatccaggatgcccagcagtggcttcaccgcaacaggttctcgcagttctgccggctctttgccagcttctcaggtgctgacttgctgaagatgtcccgagatgatttggtccagatctgtggtcccgcagatgggatccggctcttcaacgccatcaaaggccggaatgtgaggccaaagatgaccatttatgtctgtcaggagctggagcagaatcgagtgcccctgcagcagaagcgggacggcagtggagacagcaacctgtctgtgtaccacgccatcttcctggaagagctgaccaccttggagctgattgagaagattgccaacctgtacagcatctccccccagcacatccaccgagtctaccggcagggccccacgggcatccatgtggtggtgagcaacgagatggtgcagaacttccaagatgaatcctgttttgtcctcagcacaattaaagctgagagcaatgatggctaccacatcatcctgaaatgtggactctgagcagcagtggacctcatacctgtctccagctcccagccctgtggatccccgtggatgtagacattgccccactgtaagctgtggcctcaccaggcaagctgaggccaggagggaccctgcccagtctgtgaaagctacagagcaccaaccagcagaagcctgtggacaccaagtacggtgtacagaaagccagtggctcctttctcccttcctcttggcctccagattttgaatggttccttgttcttttctattggtccaaccctgacgttctaaaagggcaaacagtggagacgtctgctctgaaatccctcatcccttagttggaagctgattgggtatcttggtgctgcctgtattggtcccttctgaccactctcctgcctccagagaaagctctgcttcaccctgaaagctggtacctttacctcctcctctgggagttggctgcatggccagcactgccgacttgatgggagcagtttgccctcattctcctgtttcaggtttgcttcccttctcagtgaccctggtgagcatccgcctttcctgttcttggatgaattgatgggagtggggctattctgtgccttctacctctttcttctctacgttgtttctaaggatctgctgctgcggaacccaaagatgtgctcctgtctctgcactggcgcattggcatggtagatgccacaatgtatgtgcacggcctttctcagagacattagttctgaggccctttgtggggaggttagggggatggtaatagaaaaagactattttatttcctggcaatcacgggtaaggaggattaggaatgagtattccattcctaggtgtcatcagatgaccttgaccaccacaataccaggccctcttggatggacttatagaaagttagagaagaccttgttgaaccgctgctaaacttgccacaggagcgatgtgttttctctgagtgcccctcacttacatgtttatctttgtttgtagaggctatgtttaggatattttgcctgcatcagaatgggtgcatcatctttcttaatggcctatcgggaaatttgagtgtcagtaactgtggtagactcagaaattcgtctttgtcttgcctctggttcctgggatccagtgatctctactggcccagggcttcagctcttggttaatttaggttcatggggaaccctctgaccacctgaatgggatgtcatagcttctaaatggagcttctgtggaatgaagtgctagactgaaggactaccagaataaaacagggtctacaatggggagaacttgttttatagatgaggaaaccaaggctcagaggggcaaagtcacctgcatggtagcacatagtgatagggtagcgatataaatttatcatataaaccaggacatctcggaataaaaggggctctgttagtcattatgttgggtaatagccatggcattcctacagaacagagtgaggacaggctcctgattcctcttccttctttagagagaagcggggagtgggttaactaacagctttattgagatgtcattcacatgccattcagtttacccattgctagtgtccaattgtattcacagaaccaccatcaattcacagaattacagtcaacgttggtacattttcatcacccccagtaaaaccccgtacccttggtctgtcactcctgctttcctaactcctgcagtccaaggcagccatgaatctactttctatgtaagattaacctactctggacatttcatatatctggaatcatgtgatatctcttttgtgactggcttcttccactgaatgttttctagggccgtccaagttgaggatgtatcagtacttcattcttttgtattgctgaataatacttcattgtatagatagaccacatttgtttattgattcatcagttgatggacatttgtgtgtttttactttttggctactctgaatgatgctgctatgaacatatttctacaagattttgtgtggacatatgttttcatttcttttagcaatatacataggagtggaattgctaggtcttacagtaactccgtgttttaactttttgagaaactgccagactgttttctatagcagctgtaccattttacattcccaccagcaatgtatccaggtttcaatttgtctacatcctcatcaacacttgctattatctgtctttttgcttttagcatcctaatgagtatgaaatgctatcttgtggttttgatttgcattcccctgatggcaactgatgctgagtgtcttttcctgtgcttacgggccatgcgtatttctttggagaaaggtctatccaggtcctttgcctatttttaattgagttgtcttttttttttaagttttctgttttcctaaccactagactaccagggatgagccttctttttattattgagttgggtgagctatttgtatattctagacgccagtcttttatcaggtatatgactggtaaaaatgttctccccttctgtggattgttttcagtttcttgttggtgtcctttgagacacaaaactttttaactttgatgatttccaagatacgtattttttttctattgtcacttgtgcttttggtgccatatctagaaaaccattgcctaatccaaggtcaagaagattaatgcctgtgttttcttctaagaacttgtatagttttagttctcacaatggtctttgatccatttcgagtatatttttatatatgatgtgatgtaggggtccagcttcattcttttgcttgtggatctccacttgtcccactgctgattattgagaaaaatatcctttctccacggaattgtcttggcatccttgctaaaggcctctgcttcttactggatcttctttcctgggacatggtgtcgttgggaagcttacctttttttttttttacttagtctgtgtttggttccaccagttttatgctgcctttctactctgttcttgctgtctccctctttacctgagtcaacggtactgagtcctatctctctctgatgttccccagtcttccttggtgcatgttctagctccacacactagtccttggaggaaggttgagaccaatgatttcctgttatgagtcatgaggaaactgaatcacctagaagtggaataatgtgctcagggtcaccatagcccattagtggaaggaccaggactagacctttagtcttctgaggtccagccccttaggctgtctgtcatcactgtacccaagtgatgtcactaccaaggccaaatgatggtgggctaaattttaattctcaaaagtgtaggaggctaatattgtcttctaagttccaaaagaagatgtaataaaagtctgttaccttaagtgtgctattagtagagtcttccccttttctggcatgcccctggcatctgctcttcttaccttctcgtggttgtagttaaagcttatagcttatgaaagaatagaaaataataaatacccaaaaaaaagtacacatggtaatttggtacccaaatatctcagctgcctaatttagcagctcatcccttccacaggggtcagatgagctaaagctccaggttttatttttcatttgattgacatacagaaaagccatagcccttcccacagctgtccagggtctttcctgtgagtccggaggtgctggcctattgagcaggacagctcttcccagggcattcccaccaacctgtggcttctgaactgtagcttctttttacagtgaaccccagagggaaataagacagacacatgtgctcaggccaccatcttgaactggaagcccatagctgagttccttactcttaggtcgtcacggtttttgcggggtatctgcaaggttgagataaccctttcctgtttaccagttgtcctttctggatgaagggacagagctgttgaatggaggatgatagtttgcn

SEQ ID NO: 21640 - DNA, 2372 bp, Homo sapiens
  misc_feature 2372: n = A,T,C or G
gagacaatgattttctctttatgtactctgttgctagaaccaatttagaacttgaattgattcatcgaggaggcaatttgtgttcaggtggtgcaagcacagctggcaaaaggtcttgtttaaatcagctgtttcatgtattagccttgcacatgcggctttatagcattgactctgagtataatccctggagaaagctcacccagttagaagagatgaatccacagctgggatatgaagaacaacagcctgaggttccaattctttatcatgatgtaacatcccttttgctcatccagatcttaatgatgccacaacccttacgcaaagaccactttacctgcattgtgaaggtactttttaccctactgtacacacaggctcttgcagcactctcagttaaatgcagcgaagaagataggtcagcctggaaacacgcgggagctctcaaaaagagtacatgtgatgcagaaaagtcttacgaagtattactgagctttgtgataagtgaactgtttaaaggaaagttataccatgaagaaggaactcaggaatgtgcaatggttaaccctattgcttggtctcctgaatccatggaaaaatgcttacaggacttctgcttaccttttctcagaatcaccagccttcttcagcaccacctttttggggaagatttacctagctgccaggaagaagaagaattttcagttcttgccagctgcctgggacttctgccaacgttttaccaaacagaacatccattcatcagtgcctcctgtctggattggccagttccagcatttgatattataactcagtggtgttttgagataaaatcatttactgaaagacatgcagaacaaggaaaggccttgcttatccaagagtcaaaatggaaattaccacacctactacagttgcctgagaattataacaccatttttcagtactaccacagaaaaacctgtagtgtctgcaccaaggttcctaaagatcctgctgtttgccttgtgtgtggtacttttgtatgcctgaaaggactttgctgcaagcaacaaagttactgtgaatgtgtactgcactctcagaactgtggtgcaggaacaggtattttccttttgatcaatgcatcggtaattatcatcattcgaggtcaccgcttctgcctctggggttccgtgtatttggatgctcatggagaggaagaccgggatcttaggcgaggcaaacctctctacatttgtaaggaaagatacaaagttcttgagcaacagtggatttctcatacttttgatcacatcaataaaagatggggtccacattacaatgggctgtgactctccacctcagcattgcatcgtatcatcattttcgctacgaatttatttttcaacaataagctttaacttaatttgggggattaacacttttgctgagggagaaaaagaaaacatacattatgaagcctttccaaaattaggtgcttggtaatcacgttaatggtataattttttttttttaatatctggagaacattaataacaagttaaattattctttagtggtcattttttaagtgcacaattaataagaagcacaacttgttcacaaactcattcagaaatgattctcccaacaatgcatatcagctattcattgatacttagagtgggtgtgatttatttgacattttactgcttctttctgtctgtgtgttttaatttgcatctgccaagcataatgcatcttttttcctctgccattcttgtgttgattggagaatttttctgtatgtaattagaaaaaaatgtaaaacatgatttatgtgaaatactgtatagtaaaagttggtctaatagtagaactttaaaattttttcttattgtgaggaatctgttaaaagtttaaagctttgctgaaaactgaattcattctcaggaatttcataaatcttctccccaggtaaataattgaaatagctgtaaaataagtagatagctgctgttaatataatacagtacattttggggggcatatgtgtggttggggggtccttaaaaatcaaaatttgccatttcagttggatgaattactagaggtaataacaaatcttactataaaatccagaggtttagaacattccctgggcgatgtgatccgtgcatggccacctttataccacagggtgtgcttgatggttgaatggccacttccccgaagacataattttgatctcctagcaaagtaagatatggtggcggcacacaattgcgggccaggaaaaggggggagcataaagacccgtcctagggacattctggcaacagaggcccaaagaggtaccattccctcttaactcaggtttatcaacn

SEQ ID NO: 21641 - DNA, 1079 bp, Homo sapiens
  misc_feature 1, 2, 1079: n = A,T,C or G
nnagagacggggtttcaccgtgttagccaggatggtctcaatctcctgacccgcctccacctcccaaagtgctgggattacaggcatgagccaccacacccggcctctgctttgttttttaaaaaaaaagaaatgcaagagagggagggaggcagctcctgaccataaaagctgatttcttgatttttttttcttttttttttgaaatggagtcttgctctgtctccaaggctggagtgcagtggcatggtctcagctcactgcagcctccgtttcctgggttcaagtgattgtcctgccttggccgctgagtagctaggattactggcacccgccacaaggcccagctaatttttgtatttttagtagagacagggtttgattatgttggacaggctggtctcaaactcctgacttcaagtgatccacccgcctcggcctcccaacgtgatgggactatagacatgagccatcgtgcttggccttcttgattcttgaatacggggttttgaggtgaaagcatttcatgaaaacttaagttcatacacaagagcatcatgaatattctaaaagaggtatctgtgctttttttgtgaccacaaaatattacttcttatgaaatgtttacactaggtgaggaaaagttcattaattacctttaaaccgttccttattttttttaagattttaaattgtattttggcttttgcctccagtatcctttctggttgctctggtttgaattaagttcctattatgctgcagcacatatcaaccttccctaagtaaccatttcctggaatgtgaagcatcggtgccattagcagaccatatgcagaaatgtcgtgtactgcatttcttttgtgcactctaataggctggtgtgactcagatcagattaacttttatatatgttattcctaacgggtgaggcaaaggtaatttggtcatgcaattttcatttgttcagacttcaccgggggtttcaaaatttcaaaaagggggaaatcaggggcagccttaagccagggttaaaagggcaaggaggattacattgtgcccaaaattttgtcgcctan

SEQ ID NO: 21642 - DNA, 1181 bp, Homo sapiens
  misc_feature 1, 2, 3, 4, 5, 6, 7, 10, 11, 1181: n = A,T,C or G
nnnnnnnaanngtcgtgattccgtgagatcgtctgaattccccctgtttaccctttgtgtacagatattggacccccctttgtgcgttcgtgccccccctccgatttatgtcagggataccttggcaagcacaacttatgtggaagaaggatttgaatgatttactcggcccggtaatattcagcttgcctgctacaccttgctttgcaaagatgtttacataaaataaatcatctcttatcaagttacaatggtaatttcttgaaatgtagatatgaaagctatacacttaatccactgaaatttccttctaattttttaatctgtaattaaaccatcaccataaggacaagcttcatcccaagatgttcccccttttcccctcagctatttctatcaacttgaatcctctctcagatcatgtaaagagatacattaaaagcacaggaaaaaaaatgttttagcttgctgacataatgcccttaagtttgctgacataatgcccacattttaactttaaaatgtaaaatcaaagttaaagcatcacttaattcatacagtacattattaatcaacagtgtcccaccaactcagaagtttcctaaattggctgctttctctgcatttagtaagtttataaccaatgactcaatcaaagaatgtgcttgtaataggctgctggtttaattttagaatcaaaagttttatattgggctactttcaaatatagaaatgctatgagtgacatatgaactattaattttgtttcccattacctacaggaagaatttattcaaataaaattttacaagacaaaatgcaaatctatatacctatatagagatgtatatatgtatatattgaacctaactaaagttttataagcaatactaacatagttctggttacacattcctaaagacttaattgttttaaagatacatgttataaagaggcttatgcaaaaggcaaaattaagaatcaacatgatcttttgaggttttcattacttccaaaagcggtttctatcacccatagaagaaaactatgcttttgtttatcttaggaaaaaaaattataaaaagataatgctatcatgtaaagattcacaaaaactatactgtatatcccataagagttatacctacttaaggtaaatcacaattatggtttatatggan

SEQ ID NO: 21643 - DNA, 2242 bp, Homo sapiens
  misc_feature 1, 2, 3, 4, 5, 6, 2242: n = A,T,C or G
nnnnnncccccctgggcccttgtaaaaaacttgtacctcaatttgccccttggatatctttacgccccccttttgtgttttttaacacttgggtttaggtatttatttacaaagttcttactaatacaattgcttttaaaatgtagcaaagagtcatttactactctcagaagtggcacatacatggcatagaaaacaatctatagtcagttaactattaaaacagaaacttgaaatttaagtgacaaacatttgtagcactccctaaagaaataggaaataaaaatgcatttatccatatgaacttgattattctgaattactgactataaaaaggctattgtgaaagatatcacactttgaaacagcaaatgaattttcaattttacatttaattataagaccacaataaaaagttgaacatgcgcatatctatgcatttcacagaagattagtaaaactgatggcaacttcagaattatttcatgaagggtacaaacagtctttaccacaattttcccatggtcttatccttcaaaataaaattccacacactatcaaactaaatcaagatttgctagtggataaaattaccataaatataccgtactctctctgaaacagctacaaacatcttgtttttgcaaaatatacaatgtttctcaatctttctgtccttatctcaatttgcaaaaatattttgaaacaatctcctttaaatgttattcttgttaatgagggcaaatcttttaaaatccacatgctagatcttgaaaacgcttgagaagaaaataaactgtgaaaggagtggttatttaaatacttcaaactgcacatgtgaaacagacccactatttaatcagaattctatgcaagttttcatccagtattatgatgtcatttaatctctgcataaattgagctgcacaaatatctatttccataaattcattcatggatactatacaaatagattcacagcagtatttggcacccgcccataaaatttatttactctatcagggttgcaaagctactaatatcagctgatagcaacttaaattattggcctttgaatgacagattcaaacaagagataaattacatcaaaatcactatcattttttacatgaattaacttgaaaatgtaacaggtaaaccttactctttcaagaagaaaaatcaaatagcatagtttagtgttatttatcttccttccagctttcaccaagtgctaattacaagtaccatttaagtcagtttcttatttgagtatgaggtgtctatacatttctataatttaagattttggtaacgcttcatatcaaatgagttgtagatctacttaacgtatgacttctcctttcaaagaaggaaggaaggctgacaagggagggagaagggatacctgctaatgatgatgtgctagaaagacgactcattacatgcttatcattgctggaaggacttcttccctccactgagccgtgggatgtcataagagcccttcgaagagctctttttggagttttggagaaagagaatgctcttgtaaccttttttgaagtcttttttattgctcttgatgctctactcaatgtactgtccatatcttttgtatttacttcaaaggattctggatcagcagtataaataagattctcagcatctgctttacaaatggtgttagctacatgtcgacacagcatctttagccagttttcttttggaagttcatctgatgtcatctggaaactgagtagcacatttgcctgctctgttggtggcctcacaagcaaggcaaaagcattatggcaatcttctgtctctcttatgtccaataccttcttaatctgagaaagaggcattaggtgaatatgcttaagagaagctgggggtcgggtttggccatgaggactcctaaaagtgccaataaccttgtgccgttttcttgctatctctaggcaatcattgaagaggaagagagttacttgttctcctctgtcacaggggtgctcacctagagaaattgtttcaacccgctgtactaagcttcggtgagaagataaaagattagctgggcatccatctacttcataaacaacatcaaaaatttgcttttgagcttctgtttttctcttatcctcattaatatgcgtcattacttccttcagtgatccaatagctttttctaaagtgcttttgtctggattttcatcagccggacgcgtgggtcgactcn

SEQ ID NO: 21644 - DNA, 1631 bp, Homo sapiens
  misc_feature 1, 1625, 1626, 1627, 1628, 1629, 1630, 1631: n = A,T,C or G
nacgcgtccgctcttgaccgaaaagagttctttctctaggtgttctgagagaagtttgtaaatttggatagtacattctatcctgataaaaccaccttgctgtggtcttgatgtacaaaaaaaaattttttttttgagacagagtcttactctgtcacccaggctggaatgcagtggcgcgatcttggttcactgcagcccccgcctcctgggttcgagcgatcctcctgcctcaacctcccagctacttggcaggttgagacaggagaatcgcttgaacctgggaggtggaggttgcagtgagccgagactgcaccactgcgctcccacctgggtgacagagactctgtctcaaaaaaaaaggacatttatcattataacatcttattagagcccctaatttcttatctgaaggcactgttttttttttaaacagttaagtactgatgtcaacagacaaatatttctgatcagatagtcccctgtcaacagtagcaaatgtggtttcataaagtgggaagaaaacagcattttaaagtaactttttgggagactgatttgagtaataataaaactctggtctcccttaagaaaaaaaaacccttccacctttactgtgtcatttatatccccttagttccaaagttaattatcttatttctggatattgcttttataccaaagacccttatcagcccttgtaactacagtatctttagataagattcctctttccagtcagtcctgggaaatgtttctgttgcagagttaggcggtagatgggaagctgtgatggcagagctactatctaataaagtaacaactcgtagttgaggcttcctttctgtgtgtgatgggggatagggagttagctcccctgttgtctcagcactaagaaattgaggtcaggccaggcgcggtggttcactccttttattccagcactggggtggccaaggtgggcagattgcttgcgctctggagctcgagaccagcctgggcaacatggtgaggccctgtctctaccaaaaatgcaaaaaaaaagctgggcatggtgggtgcatgcttgtcccagctactgaggaggctgaggtgggaggatcgcttgggcctgggaggtggaggttgcagtgagctgagatggcgccactgcagtccaaggtgggtgacagagacgctgtctcaaagaaattgaggtcaggcttccttcttacagaattatttttttctctgtagttgcctcattttttcactttcttttcaatgagaatcgaagtgtttctttgggtttttttcccccttttaaaatcaacaggaaatgtttcacaggagggatgaaatgcttctgtggcttcctcagcacttgggcaggtagactcataggaaaccttgaatatgactttccttaggtctctaggctatggcactattagtgctctggtaaagggagagttacgatggagggccagctggactccgatgccccggttctcatattgaaaagggtattactccttttaaccctccttggggggtaaaccgggaagagtgagcctaatctgagaataaccttgctgggcccccgggtttctagacgggagaaacccatggcggacgtggcgcannnnnnn

SEQ ID NO: 21645 - DNA, 2679 bp, Homo sapiens
  misc_feature 1, 2, 3, 2677, 2678, 2679: n = A,T,C or G
nnnatgaatatctgcagaattcacggctacgagtgttctgagggaagcaaggaggcggcggcggccgcagcgagtggcgagtagtggaaacgttgcttctgaggggagcccaagatgaccggttctaacgagttcaagctgaaccagccacccgaggatggcatctcctccgtgaagttcagccccaacacctcccagttcctgcttgtctcctcctgggacacgtccgtgcgtctctacgatgtgccggccaactccatgcggctcaagtaccagcacaccggcgccgtcctggactgcgccttctacgatccaacgcatgcctggagtggaggactagatcatcaattgaaaatgcatgatttgaacactgatcaagaaaatcttgttgggacccatgatgcccctatcagatgtgttgaatactgtccagaagtgaatgtgatggtcactggaagttgggatcagacagttaaactgtgggatcccagaactccttgtaatgctgggaccttctctcagcctgaaaaggtatataccctctcagtgtctggagaccggctgattgtgggaacagcaggccgcagagtgttggtgtgggacttacggaacatgggttacgtgcagcagcgcagggagtccagcctgaaataccagactcgctgcatacgagcgtttccaaacaagcagggttatgtattaagctctattgaaggccgagtggcagttgagtatttggacccaagccctgaggtacagaagaagaagtatgccttcaaatgtcacagactaaaagaaaataatattgagcagatttacccagtcaatgccatttcttttcacaatatccacaatacatttgccacaggtggttctgatggctttgtaaatatttgggatccatttaacaaaaagcgactgtgccaattccatcggtaccccacgagcatcgcatcacttgccttcagtaatgatgggactacgcttgcaatagcgtcatcatatatgtatgaaatggatgacacagaacatcctgaagatggtatcttcattcgccaagtgacagatgcagaaacaaaacccaagtcaccatgtacttgacaagatttcatttacttaagtgccatgttgatgataataaaacaattcgtactccccaatggtggatttattactattaaagaaaccagggaaaatattaattttaatattataacaacctgaaaataatggaaaagaggtttttgaatttttttttttaaataaacaccttcttaagtgcatgagatggtttgatggtttgctgcattaaaggtatttgggcaaacaaaattggagggcaagtgactgcagttttgagaatcagttttgaccttgatgattttttgtttccactgtggaaataaatgtttgtaaataagtgtaataaaaatccctttgcattctttctggaccttaaatggtagaggaaaaggctcgtgagccatttgtttcttttgctggttatagttgctaattctaaagctgcttcagactgcttcatgaggaggttaatctacaattaaacaatatttcctcttggccgtccattattttctgaagcagatggttcatcatttcctgggctgttaaacaaagcgaggttaaggttagactcttgggaatcagctagttttcaatcttattagggtgcagaaggaaaactaataagaaaacctcctaatatcattttgtgactgtaaacaattatttattagcaaacaattgatcccagaagggcaaattgtttgagtcagtaatgagctgagaaaagacagagcatatctgtgtatttggaaaaataattgtaacgtaattgcagtgcatttagacaggcatctatttggacctgtttctatctctaaatgaatttttggaaacattaatgaggtttacatatttctctgacatttatatagttcttatgtccatttcagttgaccagccgctggtgattaaagttaaaaagaaaaaaattatagtgagaatgagattcatttcaatgtaatgcactaaagcagaacacgaacttagcttggcctattctaggtagttccaaatagtatttttgttgtcaaactttaaaatttatattaatttgcaaatgtatgtctctgagtaggacttggacctttcctgagatttattttatccgtgatgtattttttttaattcttttgatacagagaagggtctttttttttttaagtatttcagtgaaaacttggtgtaagtctgaacccatcttttgaaatgtattttcttcattgcaggtccacctaatcatcctgtgaaagtggtttctctatggaaagctttgtttgcttcctacaaatacatgcttattccttaagggatgtgttagagttactgtggatttctctgttttctgtcttacaagaaacttgtctatgtaccttaatactttgtttaggatgaggagtctttgtgtccctgtacagtagtctgacgtatttccccttctgtcccctagtaagcccagttgctgtatctgaacagtttgagctctttttgtaatatactctaaacctgttatttctgtgctaataaacgagatgcagaacccttgaaaaaaaaaaaaaaaaaagcaaggttggcctgttccatttccaataannn

SEQ ID NO: 21646 - DNA, 1696 bp, Homo sapiens
ttaaaaatcagagtgatttctgatccctgcaggtgacctctggaaaaaaggagggcaggaaccagccttactattttcatgttttcattgggcactaacatggaatggtaaaggtagtttatccttgaagacagatgtgcctggcttgtatcatatacaagagaaatcaattttgaagttgctgtccatagccctggtgacaaagaactagaacttaatatgacatttaaggggccagcatgactgatcctcttagagttttgaagccatgctcacagcttctgggctccctcagtcaccaaaggtgtgaagtatgattgctctctctctcctgaagcttaggaaactagatgatgcaatagaagactgcacaaatgcagtgaagcttgatgacacttacataaaagcctacttgagaagagctcagtggtaagtgcctctgatgggtagggggaagagggagttgccgctggcctcaggggaattgccttgtggatgacgaagcagacccagagatgttgtgaggtcatttggtccttccccctgcctctaggtgggattgttccagccctagactatctttatagacctccagcggaggagattgcacaagctccctcagtctcccatgcctgtgtctaacgcccctcacggtcagtaagtttcctctgatgcctgacccaaattccttttgttaaaaagtttaaatccatttcctttggagattttattttgtgttgtacacttatgctctaccctggcacagtgcttgacacataggtgctcactgaataaatgttttgttgaatgaatgtatggtgcttggaagagaaaacaactcttggagacagttgaaagttgtccttcatcctgtttgttctgggcgagggaagacaatcttagagttggaagagatgtaatccggctcagcctcccaggataaaggaacttccttttgaaacaccctggatggctactctctgcttgagtgttttgagtggagggcactctgtgtctgacagggtgattatgagccaggatgtgcctacctctaatgctcacatttgccccagagtcagggtgctccctggcatggttgctcctcttactcttagacccaccagctggttttctccagataggaacagggctaggagaaatctttctcagaaatccatctcttctgatttcagattattctctaggcggagaaaaacttcccgtctttaaagttcttagagaagatgtatttattgtatactaatcctccagcacctgctccactccttattataaaatgtcatatccaaagaacagatgctgtcactgatgcctgatgagccagtagtttaagcttccttgtctcatcagtggtacagaatatctcatggactacctcccacttagttttctcaaaattatctcacttaaaataggaaaactgctgctgtgtgtgatgctttttttaaaagtgaatttctaagttgatgactaagtctgtccaacagaaacatacagggaattataacttctgtgagactgactgtcagtcattccatctttgcaaaccactggcacacagaagcagaagctttggaagacaaaaaaagcaccctttgattcagccaaagactgactttaacagacgcaaaatgctatatacatgaaggtgtttgctgcaattttatgtataata

SEQ ID NO: 21647 - DNA, 418 bp, Homo sapiens
  misc_feature 1, 2, 3, 4, 5, 6, 7, 162, 164: n = A,T,C or G
nnnnnnnaaggggaagcccccaaagttcccagttaagggggggccccaccccctgggggaggaaaaggtgaaaaaattgtggggtttttaaaaaaaaaaaaaaatgggtgggggaatgaaggtttttaaaaaaaaaaaagggctttttttgtttttgtggtntntgcctcaaatatttgaccatttttaaatatcatgatttttttctttctgatcccacattttgacgtgtcaaagcttagagcaggaagtaggaatccacactttcacggaggggaaccgtttcaggctctgtataactatactcccaggaatgaagatgagctggagctcagagaaagtgatgtcattgatgtcatggaatagtgtgataacggctggtttgtggggacctcaagaagaaccaaattctttggtg

SEQ ID NO: 21648 - DNA, 465 bp, Homo sapiens
  misc_feature 1, 2: n = A,T,C or G
nnaagttttataaacacttttaatgcaaacattcaatagggcatatttcccactgctctcaagatttcatctctttctgctgccgtaggcataaatggcttcactccgttctttcttctctgcatcacgatagaattctcaagaagtaagtggaacacctttccctgtcatagttattttcatctagacatctggtggaagcatcagattccgacaaacaaggatttatgtcaggatctctcagcctctgtgttaccgagggcattctaacagtcttcttaccagttcgagtttggtgcatgagtttcttcacatttcatttccttttccttccggattctaaatacaaggcactctaagtttggatttccgaaagtcccctcctttgcatgagttcctcgtgtattaactccggcctccgcttcgccagcacccaggccgtctccagctccaaacaccccgcgt

SEQ ID NO: 21649 - DNA, 1054 bp, Homo sapiens
  misc_feature 1, 2, 3: n = A,T,C or G
nnngggctgtcacgactagtagcaggcggagatcgctgggagcggttgcggcgtgcggggagctgagttatagctgtgacttctgccctgccaggccgcacacaagctggctgacccggtttgtaaaaatggaatttcaagcagtagtgatggcagtaggtggaggatctcggatgacagacctaacttccagcattcccaaacctctgcttccagttgggaacaaacctttaatttggtacccattgaacctgcttgagcgtgttggatttgaagaagtcattgtggttacaaccagggatgttcaaaaggctctatgtgcagaattcaagatgaaaatgaagccagatattgtgtgtattcctgatgacgctgacatgggaactgcagattctttgcgctacatatatccaaaacttaagacagatgtgctggtgctgagctgtgatctgataacagacgttgccttacatgaggttgtggacctgtttagagcttatgatgcatcacttgctatgttgatgagaaaaggccaagatagcatagaacctgttcccggtcaaaaggggaaaaaaaaagcagtggagcagcgtgacttcattggagtggacagcacaggaaagaggctgctcttcatggctaatgaagcagacttggatgaagagctggtcattaagggatccatcctacagaagcattctagaatacgtttccacacggtcttgtggatgccacctctaagtggtttgaacaaatacatcgggggattttccctaatggacaatggcgtccattaacttcctatccgggttggaactgattcatattcagggggcgcaccggctgctcagcttcctcacaacggggcggacgacaccggggctcagggaaagggcgagctctaaattaaggttaaagaacacaacggaactggccataagctgcgagccgccgaacgggcgaattgcacacaggggttcccagaaggcgcttccgagagggcttgagacaggccttgtctacaacccgcagcggggcgccacactgcgttata

SEQ ID NO: 21650 - DNA, 4874 bp, Homo sapiens
  misc_feature 4845, 4846, 4847, 4848, 4849, 4850, 4851, 4852, 4853, 4854,4855, 4856, 4857, 4858, 4859, 4860, 4861, 4862, 4863, 4864,4865, 4866, 4867, 4868, 4869, 4870, 4871, 4872, 4873, 4874: n = A,T,C or G
gagtcgacccacgcgtccggtagatgcttccaaagctgaccacatgaaaaagatggctcccacggtcctggttcacagcagggctggaagtggcttagtgctctccggaagtgagattccgaaagaaacactatctcctccaggaaatggttgtgctatctatagatctgaaatcatcagcactgctccctcatcctgggtggtgcccgggccaggtcctaacgaagagaacaatggcaaaagcatgtcgctgaaaaacaaggcattggactgggcgataccacagcagcggagttcatcatgcccgcgcatgggcggcaccgatgctgtcatcactaacgtttcagggtcagtgtcgagtgcaggccgcccagcctccgcatcacccgcccccaatgccaatgcagatggcaccaaaaccagcaggagctctgtagaaaccacaccatccgttattcagcacgtgggccagcccccggccactcctgccaagcacagtagcagcaccagcagcaagggcgccaaagccagcaacccagaaccgagtttcaaagcaaacgagaacggccttccaccaagctctatatttctgtctccaaatgaggcattcaggtccccaccaattccctaccccaggagttacctcccttacccagcccctgagggcattgctgtaagtcccctctccttacatggcaaaggacctgtctaccctcacccagttttgttacccaatggcagtctgtttcctgggcaccttgccccaaagcctgggctgccctatgggcttcccaccggccgtccagagtttgtgacctaccaagatgccctggggttgggcatggtgcatcccatgttgataccacacacgcccatagagattactaaagaggagaaaccagagaggagatcccggtcccatgagagagcccgttacgaggacccaaccctccggaatcggttttccgagattttggaaactagcagcaccaagttacatccagatgtccccaccgacaagaacctaaagccgaaccccaactggaatcaagggaagactgttgtcaaaagcgacaagcttgtctacgtagaccttctccgagaagaaccagatgctctgacacaaacgtgtccaaacccagctttgcagcagagagtgttggccagagcgctgagccccccaagccctcagttgagccggccctgcagcagcaccgtgatttcatcgccctgagagaggagttggggcgcatcagtgacttccacgaaacttatactttcaaacagccagtcttcaccgtaagcaaggacagtgttctggcaggtaccaacaaagagaacctagggttgccagtctcgactccattcctggagccacctctggggagcgatggccctgctgtaacttttggtaaaacccaagaggatcccaaaccattttgtgtgggcagtgccccaccaagtgtggatgtgacccccacctataccaaagatggagctgatgaggctgaatcaaatgatggcaaagttctgaaaccgaagccatctaagctggcaaagagaatcgccaactcagcgggttacgtgggtgaccgattcaaatgtgtcactaccgaactgtatgcagattccagtcagctcagccgggagcaacgggcattgcagatggaaggattacaagaggacagtattttatgtctacccgctgcttactgtgagcgtgcaatgatgcgcttctcagagttggagatgaaagaaagagaaggtggccacccagcaaccaaagactccgagatgtgcaaattcagcccagccgactgggaaaggttgaaaggaaatcaggacaaaaagccaaagtcggtcaccctggaggaggccattgcagaacagaacgaaagtgagagatgcgagtatagtgttggaaacaagcaccgtgatccctttgaagccccagaggacaaagatcttcctgtggagaagtactttgtggagaggcagcctgtgagcgagcctcccgcagaccaggtggcctcggacatgcctcacagccccaccctccgggtggacaggaaacgcaaagtctcaggtgacagcagccacactgagaccactgcggaggaggtgccagaggaccctctgctgaaagccaaacgccgacgagtctctaaagatgactggcctgagagggaaatgacaaacagttcctctaaccacttagaagacccacattatagtgagctgaccaacctgaaggtgtgcattgaattaacagggctccatcctaaaaaacaacgccacttgctgcaccttagagaacgatgggagcagcaggtgtcggcagcagatggcaaacctggccggcaaagcaggaaggaagtgacccaggccactcagcctgaggccattcctcaggggactaacatcactgaagagaaacctggcaggaaaagggcagaggccaaaggcaacagaagctggtcggaagagtctcttaaacccagtgacaatgaacaaggcttgcctgtgttctccggctctccgcccatgaagagtctttcatccaccagtgcaggcggcaaaaagcaggctcagccaagctgcgcaccagcctccaggccgcctgccaaacagcagaaaattaaagaaaaccagaagacagatgtgctgtgtgcagacgaagaagaggattgccaggctgcctccctgctgcagaaatacaccgacaacagcgagaagccatccgggaagagactgtgcaaaaccaaacacttgatccctcaggagtccaggcggggattgccactgacaggggaatactacgtggagaatgccgatggcaaggtgactgtccggagattcagaaagcggccggagcccagttcggactatgatctgtcaccagccaagcaggagccaaagcccttcgaccgcttgcagcaactgctaccagcctcccagtccacacagctgccatgctcaagttcccctcaggagaccacccagtctcgccctatgccgccggaagcacggagacttattgtcaataagaacgctggcgagacccttctgcagcgggcagccaggcttggctatgaggaagtggtcctgtactgcttagagaacaagatttgtgatgtaaatcatcgggacaacgcaggttactgcgccctgcatgaagcttgtgctaggggctggctcaacattgtgcgacacctccttgaatatggcgctgatgtcaactgtagtgcccaggatggaaccaggcctctgcacgatgctgttgagaacgatcacttggaaattgtccgactacttctctcttatggtgctgaccccaccttggctacgtactcaggtagaaccatcatgaaaatgacccacagtgaacttatggaaaagttcttaacagattatttaaatgacctccagggtcgcaatgatgatgacgccagtggcacttgggacttctatggcagctctgtttgtgaaccagatgatgaaagtggctatgatgttttagccaaccccccaggaccagaagaccaggatgatgatgacgatgcctatagcgatgtgtttgaatttgaattttcagagacccccctcttaccgtgttataacatccaagtatctgtggctcaggggtgagcatggctgtcatgtgattgaaaactagctgagctgctcttgaggccacgaaactggctactgctttcggatgtccttaagaaattgaaaatgtcctcccgcatatttcgctgcaattttccaaacgtggaaattgtcaccattgcagaggcagaattttatcggcaggtttctgcaagtctcttgttctcttgctccaaagacctggaagccttcaaccctgaaagtaaggagctgttagatctggtggaattcacgaacgaaattcagactctgctgggctcctctgtagagtggctccaccccagtgatctggcctcagacaactactggtgagcaagctggacccaccatgtacagtgtgttatagtgttaatccttgtgcatatgtgtcataatacaactatttctgtaaagaaaggacactattacatatgaaaatatctcttctttatataagagaaattactccagtcagaaggacttagaaacatgtttttttccttttaaacttttaagtcagtttttatgaagttgttataatgtttctttacttttcaatgcacacatgctttgggatacgtttgtttttacttggaacatttgtttcttttcttttttaaggagaaaaaaaaatgagtaaaaggagctccacactttgacttaatttcatacaaagctctgatgacaggccatgactgtagagtggtcagaactgtgtggttggtttgagggagcgaattcggggaaggcacttggtgatataactttgttttgtttacagagtacctgctcgggccaggtaaatgctattggatgtaatccagtagtgtgtaatataaattcaaaccatatccacacacaacaactaattgtatgaaacttttatatcctaatttaaaagctgtgaaattagttttcacgcatcaaaccggattgtttatatgtttaaacattttatgctcttatttaaagaagactttgagctatttttttctgtaccctgtaaaatattgaaaactaacataatatgttgaggttgcttggaaatgtacataaaactaaaattttctgaatcgtgtgtttatgtttgaaatctgtgttttaactttgtaagtaaattctctgcctttgtatttatattttacaaaaattttcttaaaaggcaataaaactgttgaggaaaggagaaaattnnnnnnnnnnnnnnnnnnnnnnnnnnnnnn

SEQ ID NO: 21651 - DNA, 2139 bp, Homo sapiens
  misc_feature 1, 2, 3, 4, 5, 2099, 2100, 2101, 2102, 2103, 2104, 2105,2106, 2107, 2108, 2109, 2110, 2111, 2112, 2113, 2114, 2115,2116, 2117, 2118, 2119, 2120, 2121, 2122, 2123, 2124, 2125,2126, 2127, 2128, 2129, 2130, 2131, 2132, 2133, 2134: n = A,T,C or G
  misc_feature 2135, 2136, 2137, 2138, 2139: n = A,T,C or G
nnnnnccccttccccggctctagcaggccggcttctctgtccaatgcccacccggagctgggaggaggagtctgcgtaatgtgcgtgtgaagagactgggggagctggccggggctcacggtgtttgacccgtcggtcgtgcgtgagaggaaagggaaggaggaggtcccgaatagcggtcgccgaaatgttccggtgtggaggcctggcggcgggtgctttgaagcagaagctggtgcccttggtgcggaccgtgtgcgtccgaagcccgaggcagaggaaccggctcccaggcaacttgttccagcgatggcatgttcctctagaactccagatgacaagacaaatggctagctctggtgcatcagggggcaaaatcgataattctgtgttagtccttattgtgggcttatcaacagtaggagctggtgcctatgcctacaagactatgaaagaggatgaaaaaagatacaatgaaagaatttcagggttagggctgacaccagaacagaaacagaaaaaggccgcgttatctgcttcagaaggagaggaagttcctcaagacaaggcgccaagtcatgttcctttcctgctaattggtggaggcacagctgcttttgctgcagccagatccatccgggctcgggatcctggggccagggtactgattgtatctgaagatcctgagctgccgtacatgcgacctcctctttcaaaagaactgtggttttcagatgacccaaatgtcacaaagacactgcgattcaaacagtggaatggaaaagagagaagcatatatttccagccaccttctttctatgtctctgctcaggacctgcctcatattgagaatggtggtgtggctgtcctcactgggaagaaggtagtacagctggatgtgagagacaacatggtgaaacttaatgatggctctcaaataacctatgaaaagtgcttgattgcaacaggaggtactccaagaagtctgtctgccattgatagggctggagcagaggtgaagagtagaacaacgcttttcagaaagattggagactttagaagcttggagaagatttcacgggaagtcaaatcaattacgattatcggtgggggcttccttggtagcgaactggcctgtgctcttggcagaaaggctcgagccttgggcacagaagtgattcaactcttccccgagaaaggaaatatgggaaagatcctccccgaatacctcagcaactggaccatggaaaaagtcagacgagagggggttaaggtgatgcccaatgctattgtgcaatccgttggagtcagcagtggcaagttacttatcaagctgaaagacggcaggaaggtagaaactgaccacatagtggcagctgtgggcctggagcccaatgttgagttggccaagactggtggcctggaaatagactcagattttggtggcttccgggtaaatgcagagctacaagcacgctctaacatctgggtggcaggagatgctgcatgcttctacgatataaagttgggaaggaggcgggtagagcaccatgatcacgctgttgtgagtggaagattggctggagaaaatatgactggagctgctaagccgtactggcatcagtcaatgttctggagtgatttgggccccgatgttggctatgaagctattggtcttgtggacagtagtttgcccacagttggtgtttttgcaaaagcaactgcacaagacaaccccaaatctgccacagagcagtcaggaactggtatccgatcagagagtgagacagagtccgaggcctcagaaattactattcctcccagcaccccggcagttccacaggctcccgtccagggggaggactacggcaaaggtgtcatcttctacctcagggacaaagtggtcgtggggattgtgctatggaacatctttaaccgaatgccaatagcaaggaagatcattaaggacggtgagcagcatgaagatctcaatgaagtagccaaactattcaacattcatgaagactgaagccccacagtggaattggcaaacccattgactcggcctcctggagcggggcttttttttctcccgccannnnnnnnnnnnnnnnnnnnnnnnnnnnnnnnnnnnnnnnn

SEQ ID NO: 21652 - DNA, 1269 bp, Homo sapiens
  misc_feature 1, 2, 3, 1247, 1269: n = A,T,C or G
nnngtagaacctatttctaaggtttttccttttattttaaatttttcaaaaagaagtccctctttttatctttattacccccttttccctagcccctttattatgtacaaaccttggttaaaagcctaaaacttacagtccgacattcactttaacgtctactggaataatgttcccccctgccctgtaagctcctcccaagtttcaattgaactcaaattcacttctctgcgaagtacatgatcctcagtcaaatcagcactctactccaaaagtcccactatgctccaaggtcgctttgctgtgttgtgactgtttgcctgcttgtctccccactagactgcaagctactcaaaaggcaatcctgctttttcatttttaagtcgtcaagacacagcactctgtgggtactcaaattaatcaatagttcatcttatttacaatctctcaagcagctcattttatgttagttgcacaatctggaggtctggagttcttcacatgaaatttaataaattatcatgcaagctcatttttattcccattttttttacccagggagaatcagtctaccagggcaaataatgaggttaccaccttagtccctcttcccaaccccattttttagttactttcctttcattaaaatatccttatgcacttacaaataaaactaagtcccaagagggcaacaaaatataagattcttaatgatacaaaaacaatctttctgatactagatcttttatactagaaaaataaattcttgtgcttgaacatcatttttaagcacttagtgaattgagaatctgaactgccacttgaaatattcccgggaaagaaacattatgaaccaaatgaaggaacatagctattcaaagggacatatttttgtacttgttttgctccaatttctgctacatagactgctccagtctttctgtcgacttctaggagatgtggcaaaacttgatctgctagttggattgtgctgatcacagaacactccccaatgcttcccactgggggtgctgctacgactgagagcctgctaagattcagctgggccacaatcaagtacttcccatcaggagtaaacctgactgaagaaggtccctcttctgtgaaacaattattccatgctcctaaccactccccagtgtctttatcaaatacttggattcttttatttcctcggtcagcaacccacacctgagaaacacacaaaaatgtcaattgaaaaaatnccagagaagaaaaaagcggacn

SEQ ID NO: 21653 - DNA, 2519 bp, Homo sapiens
ggtccaatggttatgatataatttataactttagttttccatcgcacatttttaaaaaagtctttatttggccgggcgcggtggctcacgcctgtaatcccagcactttgggaggccgaggcgggtggatcatgaggtcaggagatcgagaccatcctggctaacaaggtgaaaccccgtctctactaaaaatacaaaaaattagccgggcgcggtggcgggcgcctgtagtcccagctactggggaggctgaggcaggagaatggcgtgaacccgggaagcggagcttgcagtgagccgagattgcgccactgcagtccgcagtccggcctgggcgacagagcgagactccgtctcaaaaaaaaaaaaaaaaaaaaaaaagtctttatttgaggttttcggcaaagtgctgacaagggtaaaactagtgttagaagatcatgctggttaccaagtggagtattccaggtgacagaggaggaccaaggatggtgacagtgggaaggaggagacagaggtaaaaggagactccacaccacaggtcactggtgatcgccctgtgagggcagggttgttttatacaagctgttcttcagtaccatgaacaggggcctggctgttgaggacgcccaataaatatccgttgacagagaaaggttgacaggggcagacggatccaggatgactcccaaattcctaacccagtgcaaaagcctggatgatgatcccagtctccattatgagggccccaggaggagaagctggattgcagggaaagatgaatccagaagccatctctctgatctagaggaaacgaggctgtgctgtgtggaagggattaatgttaggggagggtagaaacgccggttccttgggaactggagtgcaggtatgagctgggtgtcacttggctctgaacatactggctttgctgtaatgcttgaaaaggcgttggtatcttcattttacagttcattaacccaagtacgttttcttatttaaatgacaactttggtgctttaaaatgaggtaccactttttaaagctagctgtgtcgagttaaagaaaaaatcagcagttttttctcccagaaatgtaattgccaaacactattcatccccatcttaagttttacaaggtgatgtaatcagcttgttgtagtgatgctggccaaatggtgctcagcaggtgagaacaaaaaaaccccagatttcagtgaactaatacacagcttgagcgtttccatgtgctaatgttgcacacttactaaaaaactttggaaatggaaaataatgtattagtgcaacagttgatgtgcttctttgggcaaagatatagttttgttccacaatttgtacttaaaagcgaaagaacattgaaaacatagacttactggctgtagcaatgctggcctgttaactgataactagaacttaggttcacgtttatgtaaagtgtgtaaaacctagtagagcttgcatagtcggcactcagtaaatgtttggttccttttgccccttggtaagtttattttaccatcctcccacctgccactctggtccacatgttgatttaataaagtcagaatggcaggtgggaggatggtaaaataaacttcccaaggggcaaaaggaaccaaacatttactgagtgccgactatgcaagctctactaggttttacacactttacataaacgtgaacctaagttctagttatcagttaacaggccagcattgctacagccagtaagtctatgttttcaatgttctttcgcttttaagtacaaattgtggaacaaaactatatctttgcccaaagaagcacatcaactgttgcactaatacattattttccatttccaaagtttttagtaagtgtgcaacattagcacatggaaacgctcaagctgtgtattagttcactgagatctggggtttttttgttctcacctgctgagcaccatttggccagcatcactacaacaagctgattacatcaccttgtaaaacttaagatggggatgaatagtgtttggcaattacatttctgggagaaaaaactgctgattttttctttaactcgacacagctagctttaaaaagtggtacctcattttaaagcaccaaagttgtcatttaaataagaaaacgtacttgggttaatgaactgtaaaatgaagataccaacgccttttcaagcattacagcaaagccagtatgttcagagccaagtgacacccagctcatactgcactccagttcccaaggaaacggcgtttctaccctccccaaacttaagctgcccctcactcctccagccagccctcctgactttattaaatcaacatgtggaccagagtgttaatgagatgttattgcagaagagattgagaaaattggtatatcatgcagataacatacaaaatctttttgtaacgtaaaaaatgcagttttattattgcttgtgcctcaactgtttaagtgaatattaaagggccttggaaaaaaaacggacgcg

SEQ ID NO: 21654 - DNA, 3398 bp, Homo sapiens
  misc_feature 1, 2, 3386, 3387, 3388, 3389, 3390, 3391, 3392, 3393, 3394,3395, 3396, 3397, 3398: n = A,T,C or G
nnaactttatttatttattaaaacaataacaaggtcaaccacagatgtgaacctccagcaataaaagcagggattcaagggccagaaactcacacatattaacatggcctcatgcaatcatttgtctgtatatgttactctaagttgcatgagcacaaggtttaatatctatatctttaagaaaatacttgatattataaacagagtaaaagacatgatatagtagtgattactaaaaaaaaaaaaattagcagcttaaatctatctatatttgaaaaaacgtagtcacaagtaccacaaatgcagaatcagagcagcaggaagaaggttagtgcaattatactttcattaaaaaaaattctgaatcactgctatttaaaaacaccttgaagcaagtcttttgtttgagattgttttttaaactaaggtagcaaacattttgccatgtaatggcagtgttatatgccgttatcttgctttgtataaagaaaacaacatgagagatttttaatactggagtttggttacattacatatttaagcttctacacagaatgatggacacttcgagaagctaatccttatccagaaacattttaatctcttaaaaaacaaagcaaaacaaacaaacaacaaaaaacccaaaactacgttgctccttttcacaatagtgcacatttttaccataatttagttatggctacaaaacatcagaagattttttttaatgtatcttctctatggtaattaaaaaaaaagttgtgcccttctagtctttaattggcagaaatatgtcccaaaaaagaaactattgcatttaagccacatcaccaaaaaacaaaaaagaaaaaaaaaaaaaaaaaaacacgcgcccgccgccccccccgcgggcgataaccgttaggagggtctcccgagatgacagcccaatccaaaggtttccataaatcccagtcccggccgacaacagcccaactgaatatagctcctgggacccattaaaatgtagcgaacagtctacctcgtcaaaaagaatgcatgtaaaatatttggtgaaagaatttttttgtttaaaaggtgaaaaaaaagtataaacccaagaaactgattcactcccttacttcatgcatccataatctaaaccaaaaacgaaattttaaagcaagaacaaactactgctgcaagtttttgtaagtccattttctctgtacatacaaactgctcactactgaagggaaaaaaagaatataatccatggtgtctgctgattcaaaggggagaaacaaggctgtcatttagtatccaaaaactggtacatgtatgttctgcttttataatgtatatttttctctcttctgtttttcatatccaaaacttctaaatgctattttaggggcacagcagattagattccagcacttggtgaacagaattcacaagctgtgacaaaactctgtcatcttcagggtgcaattttgtttatatacactgtatgtatatatttcttttagatttggctgtagtggactggccatggttcaagtgggactatagcagtacatgggtcagggacagtcattttggctatgtacacattcatagtcggtccatggcttccaactagtagcgctatttccgaaggtctaatacacaaactgaaccatctgatgcactggctccaactttgtctcctgctgcattccagcaaacttcaaatattccacctgttcccctatagctgtgaactagagcacctgtctgcgtgttccagatgtgtacacatttgtcaaaagaaccacttgccagatacctgccatcaggactgaaagctacactgtacacaggctcttggtgttttgtcaaggtatggatgcatatccctcggtctacatcccataacctaacagtagaatcaaaggatgcacttgctaacataaggttggcatttggattattagtccctggtcctgttggactccatttgatagtataaatttctttattatgtgcttgcaaatcatggacacaattgtcttgtttcatactccatatctttaaagtcatgtcgtcagaacaggaggccaagagattgccagttgggtcccatttgatagcatttacttcattcgtatgtccttggaatgttttaataggtctgtcttgtcctaatttacagacatgaatgcacatatctgtactacaagaagcaaaggtgttgttgctctgccaatcaacatccaatgctggtgctgaatgaaaaggaaactgttgcttggcttcaccagtatgtgcgtcccaaataattgtagtcttgtctactccagcacttaggatgaaatttcctttcttattccattttaatgcaaatatagggcctttatgctgccctaaggtgctagcaaggttaccatctttagtccatattctggcaaacccatcataggaaccagttgctagaagtgtaccttcactattccaatctagagatgtgacatccttgttgcttggaacatcttgccctccttctcgtatacaatgtctaagtactaactgtgtagagccactggtgctgttctcactaagattccatattcttgctgttgagtctccagaccctgatgctaggagatcactaacagggttccaggcacagataaaaacttcagattcatggccccgcaacacaacagctttattaggagggatttcaacatccccatccacttccatcatatcagtatgattatttgctatagtatgtgctccattctcctccccatttgctgtgttttctccattttttgcagatccttgttggctggctgcagctgcggcagctgcagcagctgctgcctgttgctgtgcaagcttatctctataagcttgttgtcttgtttgtactacatcaggcattacggcatctatcagggacagagactctattggtcgaccatcaaacaaggtaccatcctcattaatactaacttctgcttctacatactgtagacctttctggatgatagaaatcaatgcagcgggtgggacgagggcaccatttatattggactgactgatatggctttctataccaaaggtaaatgctgaatgagaaaatcctgactcttgcaagtatctatataccaagaagttgacctcatcactgcttatactcatctttattcccacttaaaccatgaggtcacaacacaggatataacccattggcagtgcattgatgtggggatgtgcaactgaatatccggtcaccgccaatcacaagttgctgttgttgatgctggaaacggtggcctccaacgccgctcccccctcccgggaatggaggcacaaggaaattccccctgaccgccgccgccaccgcctccaannnnnnnnnnnnn

SEQ ID NO: 21655 - DNA, 3815 bp, Homo sapiens
  misc_feature 1600, 1613, 1615, 1644, 1650: n = A,T,C or G
acatattaggaattccattaaaccttatgtaatttttacttgcttagtcaaataaatgccttatctagttggccatcagtggtctatttaaaactgttttctttacaacctgggttgtgttccaaattaaggtagaaagtagagaggaaagagcattggaatgagaatcagaaaatcaggattctacttttctcattgtcactcaggaacaaactgtaaaggactatataaataagaagtaatctttttccgtggaaatagtataactgtgttatcccggtacaggtgtgtgtgtgcaaaagcataatgtgtttgcaaaggtttgcatttgtgtagtcatgtgtagacatgtatgctcatgtgtttttgtgtcaggataataaggtgactaagactaagacacatgcaaatcacccaggaaggcagtttctaagtcattactttttattttgaaggatttgtgaaactcttcacatcatggtgagagtttgtatgattaataagaagcagctttttcatgaaatgcttggaggtgaacgagttctcagcctgtgagatccgaccatcccattaactttgaagtttctcttgattaatagaagaaaaaaggggagggtgaagaaaaggaggaacatgctaaaaaccttatgacaatcatccaaatgtgaggaaagaacaaccgattcaccaactccactttttctattttacaactttctacatctcactcttgattttggccttcctggctgaaacagcctggcagtccctagagcccctgagaagagccctggttctccaaaagacagaggaggagaagccctgcaggatgcgctgaccacttcccagagaactgacaagtcggtgctcccaaagttttgaaccaacagccttaatgtgaaaaagaaattgcactgaaaggtaaaggaggaaatggtgatgaactgggcttatgtgagaatgtctatattttcataagacagccccagaatctttctctcagttacagcctcaggcaaaccacgttctggttggtgggttctgcagggatctctcccaccactgagcctctagtcccaaaaccatccttgacaacatcgtgtgtctgttacttccctttgcccacctccaggccacctggggaagcccacaggcagccaagaccctgaaatgaaatgaacacaaagtctgactcggtaagtattagtttcaaacagaacactaaagagaaaagttgaagctgcaatgtgtgtttaaggcagagcccagcagatccgtgtccacccatgtgccaataagacaatgggcaaagctacaaatggcaagagaaaaatgggactattaatgcgtgtggaaaaggccttaatagttaagttacagctaagaatgtcatgtcttgggttagaattttcatttttagcaccgttaatgtattcacttaaatctctgttagcaccttgccgtgtttgcagtggtggttatggcagggattttccgccaccacctcctcttcggtttcctctgcaccatcatcaaattctcctacttccacctggacaggattagctcgactagatacctcagtcacctctgccacagnttcttcgaaccananctgtctcatcaggcagggcctcttgctgnacggtncaagcctcccggcctggatcttctttctcctttgcctggccgggagggccttggcagcccctcagcaagaagccctgcctgatgagacagaggtggtggaagaaactgtggcagaggtgactgaggtatctgtgggagctaatcctgtccaggtggaagtaggagaatttgatgatggtgcagaggaaaccgaagaggaggtggtggcggaaaatccctgccagaaccaccactgcaaacacggcaaggtgtgcgagctggatgagaacaacacccccatgtgcgtgtgccaggaccccaccagctgcccagcccccattggcgagtttgagaaggtgtgcagcaatgacaacaagaccttcgactcttcctgccacttctttgccacaaagtgcaccctggagggcaccaagaagggccacaagctccacctggactacatcgggccttgcaaatacatccccccttgcctggactctgagctgaccgaattccccctgcgcatgcgggactggctcaagaacgtcctggtcaccctgtatgagagggatgaggacaacaaccttctgactgagaagcagaagctgcgggtgaagaagatccatgagaatgagaagcgcctggaggcaggagaccaccccgtggagctgctggcccgggacttcgagaagaactataacatgtacattctttccctgtaccactggcagattcgggcaagttgggaccagaacccccattgacgggtacctttcccaaaccgagctggctccactgcggtgtccccatcatccccatggagcattggaccacccgctttttcgagacctgtgacctggacaatgacaagtacatcgccctggatgagtgggccggctgcttcggcatcaagcagaaggatatcgacaaggatcttgtgatctaaatccactccttccacagtaccggattctctctttaaccctccccttcgtgtttcccccaatgtttaaaatgtttggatggtttgttgttctgcctggagacaaggtgctaacatagatttaagtgaatacattaacggtgctaaaaatgaaaattctaacccaagacatgacattcttagctgtaacttaactattaaggccttttccacacgcattaatagtcccatttttctcttgccatttgtagctttgcccattgtcttattggcacatgggtggacacggatctgctgggctctgccttaaacacacattgcagcttcaacttttctctttagtgttctgtttgaaactaatacttaccgagtcagactttgtgttcatttcatttcagggtcttggctgcctgtgggcttccccaggtggcctggaggtgggcaaagggaagtaacagacacacgatgttgtcaaggatggttttgggactagaggctcagtggtgggagagatccctgcagaacccaccaaccagaacgtggtttgcctgaggctgtaactgagagaaagattctggggctgtcttatgaaaatatagacattctcacataagcccagttcatcaccatttcctcctttacctttcagtgcagtttcttttcacattaggctgttggttcaaacttttgggagcacggactgtcagttctctgggaagtggtcagcgcatcctgcagggcttctcctcctctgtcttttggagaaccagggctcttctcaggggctctagggactgccaggctgtttcagccaggaaggccaaaatcaagagtgagatgtagaaagttgtaaaatagaaaaagtggagttggtgaatcgggttgttctttcctcacatttggatgattgtcataaggttttagcatgttcctccttttcttcacctccccttttttgcttctattaatcaagagaacttcaagttatgggatggtccgatctcacaggctgggaactggtttcactcccaggcatttcatggaaaagtggtctattatataccaaatcttacatgatgtggagagttccaatcttcgaataaaagtttggttgacggataaaaaaaaaaggggggtagataccaggcaggtgatcagttttaaaggcaagggataagaggggggaaaagggagaatggtgagattcgggttggacaaaccggcatcaggtgtggtgataaca

SEQ ID NO: 21656 - DNA, 935 bp, Homo sapiens
  misc_feature 1, 935: n = A,T,C or G
natcacgcacaaattgcaattacttcacactcacgataacccattaatctgtgaaggattaatctgttcatgaaggcagggccctcatgatggaatcacatcttaaagcccctacgtctgagtactgttacattggggatttagttttaatatgattttcagagcagaaaaacattcaaaccatagcaatatgtattgaatatctagatcatttccaaataagatattaatatgatactgaaacatttattgctgaacataaatttagaacttactttgcctacctattacagaagaacaaaagatatttgggcctattaaacctttcctctgccatttcctgtcctgtgtcataggactaggaatcgtgtttctagaaagtatgaaatcgtgtgcttgcaaacttggaagaaaacagttcatgactgcataccttctagttctctagtgttcactggaaattaaagacactaaaagttaacaattcttattaattaatcatattaatgtaattggaatttctagaaatattaggggaagcaactttatacgcaaagcataacagaaaaataaggtgtattttttctttgaaacctatgaaatatactggccaggcacggtggctcatgcttgtaatcccagcactttgggaagctgaagcggtggatcacctgagctcaggagtccgagaccagctggccacatgttgaaccatgtctctactaaaatacaaaattagcagtcatgtgcggtgctgtaccccagtactcggagctggggggaatcgtgaccgggtgggtgctgaccaaacctggcccagcgggaaagagactttaaaacaatggaccaaactgcacaagctctgccacacttgtcgaacccgtggacgcacaagaaaagggcatctggacctggaataacgaaacgacacatcn

SEQ ID NO: 21657 - DNA, 957 bp, Homo sapiens
agtcacccacgcgtccgggcctataaagtagtcgcggagacggggtgctggtttgcgtcgtagtctcctgcagcgtctggggtttccgttgcagtcctcggaaccaggacctcggcgtggcctagcgagttatggcgacgaaggccgtgtgcgtgctgaagggcgacggcccagtgcagggcatcatcaatttcgagcagaaggaaagtaatggaccagtgaaggtgtggggaagcattaaaggactgactgaaggcctgcatggattccatgttcatgagtttggagataatacagcaggctgtaccagtgcaggtcctcactttaatcctctatccagaaaacacggtgggccaaaggatgaagagaggcatgttggagacttgggcaatgtgactgctgacaaagatggtgtggccgatgtgtctattgaagattctgtgatctcactctcaggagaccattgcatcattggccgcacactggtggtccatgaaaaagcagatgacttgggcaaaggtggaaatgaagaaagtacaaagacaggaaacgctggaagtcgtttggcttgtggtgtaattgggatcgcccaataaacattcccttggatgtagtctgaggccccttaactcatctgttatcctgctagctgtagaaatgtatcctgataaacattaaacactgtaatcttaaaagtgtaattgtgtgactttttcagagttgctttaaagtacctgtagtgagaaactgatttatgatcacttggaagatttgtatagttttataaaactcagttaaaatgtctgtttcaatgacctgtattttgccagacttaaatcacagatgggtattaagcttgtcagaatttctttgtcattcaagcctgtgaataaaaaccctgtatggcacttattatgaggctattaaaagaatccaaattcaaaaaaaaaaaaaaaa

SEQ ID NO: 21658 - DNA, 469 bp, Homo sapiens
  misc_feature 469: n = A,T,C or G
acctctgtttctcatttccaaaatctgaggttgcacctgtgtttctcatttccaaagcctgaggatgcacctctgttcctcgtctccaaagcccgaggtcccacttctgttcctcatctccaaagcctgaggttgcacctctgtttctcgtctccaaagcccgaggtcgcacttctgtttcttgtctccaaagcccgaggttgcagctctgtttctcacctccaaagcctgaggttgcacctctgttcctcgtttccaaagcctgaggttgcctgcaagtctcttgaggattttttggtgtaaacaggttgagtttctggataggtgggcatattggcagctgaatatgtgggttttgagtgtgaaatacaggttcttagctatgacccagcaatcttctacttgttctgtgctcttccacataaattgctttttcttgattgtatttcataaagcaatttctgaggcn

SEQ ID NO: 21659 - DNA, 769 bp, Homo sapiens
tgtcagctcagtgcatcccaggcagctcttagtgtggagcagtgaactgtgtgtggttccttctacttggggatcatgcagagagcttcgcgtctgaagagagagctgcacatgttagccacagagccacccccaggcatcacatgttggcaagataaagaccaaatggatgacctgcgagctcaaatattaggtggagccaacacaccttatgagaaaggtgtttttaagctagaagttatcattcctgagaggtacccatttgaacctcctcagatccgatttctcactccaatttatcatccaaacattgattctgctggaaggatttgtctggatgttctcaaattgccaccaaaaggtgcttggagaccatccctcaacatcgcaactgtgttgacctctattcagctgctcatgtcagaacccaaccctgatgacccgctcatggctgacatagtaaatatccccattttcctctgcaacacatatcctaccttgtctataccgctaactctccctgtgtgaggatagctgcagcagctctaaccactgcaaatcatgtttttctccattaactcttttctttgatttcatctcagtcctcagaatttaaatataataagccagccttcctcaagaatgccagacagtggacagagaagcatgcaagacagaaacaaaaggctgatgaggaagagatgcttgataatctaccagaggctggtttccttttctgtgttgagttgtgtacctcggccgcgaccac

SEQ ID NO: 21660 - DNA, 4564 bp, Homo sapiens
  misc_feature 4558, 4559, 4560, 4561, 4562, 4563, 4564: n = A,T,C or G
cgcgtccggttcccggaggacacgggcacgtacacctgcgaggcctggaacagcgctggagaggtctcgcacccaggccgtgctcacggtacaagagcctcacgatggcacccagccctggttcatcagtaagcctcgctcagtgacagcctccctgggccagagtgtcctcatctcctgcgccatagctggtgacccctttcctaccgtgcactggctcagagatggcaaagccctctgcaaagacactggccacttcgaggtgcttcagaatgaggacgtgttcaccctggttctaaagaaggtgcagccctggcatgccggccagtatgagatcctgctcaagaaccgggttggcgaatgcagttgccaggtgtcactgatgctacagaacagctctgccagcagcccttcacgggggagggagcctgccagctgcgaggacctctgtggtggaggagttggtgctgatggtggtggtagtgaccgctatgggtccctgaggcctggctggccagcaagagggcagggttggctagaggaggaagacggcgaggacgtgcgaggggtgctgaagaggcgcgtggagacgaggcagcacactgaggaggcgatccgccagcaggaggtggagcagctggacttccgagacctcctggggaagaaggtgagtacaaagaccctatcggaagacgacctgaaggagatcccagccgagcagatggatttccgtgccaacctgcagcggcaagtgaagccaaagactgtgtctgaggaagagaggaaggtgcacagcccccagcaggtcgattttcgctctgtcctggccaagaaggggacttccaagacccccgtgcctgagaaggtgccaccgccaaaacctgccaccccggattttcgctcagtgctgggtggcaagaagaaattaccagcagagaatggcagcagcagtgccgagaccctgaatgccaaggcagtggagagttccaagcccctgagcaatgcacagccttcagggcccttgaaacccgtgggcaacgccaagcctgctgagaccctgaagccaatgggcaacgccaagcctgccgagaccctgaagcccatgggcaatgccaagcctgatgagaacctgaaatccgctagcaaagaagaactcaagaaagacgttaagaatgatgtgaactgcaagagaggccatgcagggaccacagataatgaaaagagatcagagagccaggggacagccccagccttcaagcagaagctgcaagatgttcatgtggcagagggcaagaagctgctgctccagtgccaggtgtcttctgaccccccagccaccatcatctggacgctgaatggaaagaccctcaagaccaccaagttcatcatcctctcccaggaaggctcactctgctccgtctccatcgagaaggcactgcctgaggacagaggcttatacaagtgtgtagccaagaatgacgctggccaggcggagtgctcctgccaagtcaccgtggatgatgctccagccagtgagaacaccaaggccccagagatgaaatcccggaggcccaagagctctcttcctcccgtgctaggaactgagagtgatgcgactgtgaaaaagaaacctgcccccaagacacctccgaaggcagcaatgccccctcagatcatccagttccctgaggaccagaaggtacgcgcaggagagtcagtggagctgtttggcaaagtgacaggcactcagcccatcacctgtacctggatgaagttccgaaagcagatccaggaaagcgagcacatgaaggtggagaacagcgagaatggcagcaagctcaccatcctggccgcgcgccaggagcactgcggctgctacacactgctggtggagaacaagctgggcagcaggcaggcccaggtcaacctcactgtcgtggataagccagaccccccagctggcacaccttgtgcctctgacattcggagctcctcactgaccctgtcctggtatggctcctcatatgatgggggcagtgctgtacagtcctacagcatcgagatctgggactcagccaacaagacgtggaaggaactagccacatgccgcagcacctctttcaacgtccaggacctgctgcctgaccacgaatataagttccgtgtacgtgcaatcaacgtgtatggaaccagtgagccaagccaggagtctgaactcacaacggtaggagagaaacctgaagagccgaaggatgaagtggaggtgtcagatgatgatgagaaggagcccgaggttgattaccggacagtgacaatcaatactgaacaaaaagtatctgacttctacgacattgaggagagattaggatctgggaaatttggacaggtctttcgacttgtagaaaagaaaactcgaaaagtctgggcagggaagttcttcaaggcatattcagcaaaagagaaagagaatatccggcaggagattagcatcatgaactgcctccaccaccctaagctggtccagtgtgtggatgcctttgaagaaaaggccaacatcgtcatggtcctggagatcgtgtcaggaggggagctgtttgagcgcatcattgacgaggactttgagctgacggagcgtgagtgcatcaagtacatgcggcagatctcggagggagtggagtacatccacaagcagggcatcgtgcacctggacctcaagccggagaacatcatgtgtgtcaacaagacgggcaccaggatcaagctcatcgactttggtctggccaggaggctggagaatgcggggtctctgaaggtcctctttggcaccccagaatttgtggctcctgaagtgatcaactatgagcccatcggctacgccacagacatgtggagcatcggggtcatctgctacatcctagtcagtggcctttcccccttcatgggagacaacgataacgaaaccttggccaacgttacctcagccacctgggacttcgacgacgaggcattcgatgagatctccgacgatgccaaggatttcatcagcaatctgctgaagaaagatatgaaaaaccgcctggactgcacgcagtgccttcagcatccatggctaatgaaagataccaagaacatggaggccaagaaactctccaaggaccggatgaagaagtacatggcaagaaggaaatggcagaaaacgggcaatgctgtgagagccattggaagactgtcctctatggcaatgatctcagggctcagtggcaggaaatcctcaacagggtcaccaaccagcccgctcaatgcagaaaaactagaatctgaagaagatgtgtcccaagctttccttgaggctgttgctgaggaaaagcctcatgtaaaaccctatttctctaagaccattcgcgatttagaagttgtggagggaagtgctgctagatttgactgcaagattgaaggatacccagaccccgaggttgtctggttcaaagatgaccagtcaatcagggagtcccgccacttccagatagactacgatgaggacgggaactgctctttaattattagtgatgtttgcggggatgacgatgccaagtacacctgcaaggctgtcaacagtcttggagaagccacctgcacagcagagctcattgtggaaacgatggaggaaggtgaaggggaaggggaagaggaagaagagtgaaacaaagccagagaaaagcagtttctaagtcatattaaaaggactatttctctaaaactcaaaaaaaaaaaaaaaactcaagatagtaaaagcacctagtgtgatagattatcggttaggtcatttgtgggttgattcttcagaaacagcagttgatacctagcagcgttattgatgggcattaatctatgttagttggcaccttaagatactagtgcagctagatttcatttagggaaatcaccagtaacttgactgaccaattgattttagagagaaagtaaccaaaccaaatatttatctgggcaaagtcataaattctccacttgaatgcgctcatgaaaaataaggccaaaacaagagttctgggccacagctcagcccagagggttcctgggggatgggaggcctctctctccccaccccctgatctagagaacgggggtttttctccccagtactcccaagaaattccattcctggaaagcacagtggacgccactttacttccaacagtaccacttgcacgatgttacaaactctccatttactctataccccttccaccgtgcagttttggctgactctcactggtacatgagtggttacgcataaggacataatgcttcttcgatctgaacgacagtgtcccaggtcatggatgactctggatcccttaggaaaatattttctacaaaacagtaggacatctcacttatcccctttgaagatgtctagcagttaacattgggtagaaccagtggaacacaaccctggtattggttctttgaacaggatcacagcggccaaattcagctgaagggcaccaatgctcaatggaaacgtgacatgctacannnnnnn

SEQ ID NO: 21661 - DNA, 2731 bp, Homo sapiens
  misc_feature 1, 2, 3, 2731: n = A,T,C or G
nnngcttgttctgtttggttatgtgttgtgtctgcttgtgtggttctcgtttcgtgcgtgtgtgttgttctgtgcatcgttctctgtttctcgttctggtatggttgcgctgcttgtgctttctgttttctccgtctcgctcgtctgctgctcttcagtgcatactgctgtattggttgttgcctccttcgtgcttttcctgtcccttctcgctccgctcgttgtgtgggtattgtgagatgctgctctgcctcgtccatttttttatatattctcccctgagagacattgtgtgtgggcgcggatgaatagggcggggtgtgccccctcattcctcttgaggtgtgtttcctccgggcgtataatctctctgtgttgtctcgcatatggttcccccgccccgtgttgtgttctctcccaagtgtcgcccctgttagattgttctcctctgcggccgtggttttagtgccgcgcgcgttgttgctgtgttatttcgctctcttttgcgcgcctttctcaaaatctgtgtgtctattatttgtgcgcccctctggggtttttttatggcgccccccctcctttttgtgttttttttttttttttgtttttttttttttgtttttttttttcacttccggcgtagccatggcggctaacgctactaccaacccgtcgcagctgctgccgttagagcttgtggacaaatgtataggatcaagaattcacatcgtgatgaagagtgataaggaaattgttggtactcttctaggatttgatgactttgtcaatatggtactggaagatgtcactgagtttgaaatcacaccagaaggaagaaggattactaaattagatcagattttgctaaatggaaataatataacaatgctggttcctggaggagaaggacctgaagtgtgaatgagtttccttgacttacactagattttgttttggcttataatgacaagaaaatggaattttttttcccactttctaatgtttaaatcccataaagctaagtttcccgttaaagggaagtgctttgaagatgtgtacccatttttgtaagttaatcatgattatcctggaaaaagaagaaaagagcttcttctttgcagatgaaaataaaggtgtttttggttaactgtcattttgtttattctactgcagtagccagtggaacaaagtttgtagttattttgccacttacttttctgtcattatatgcttatttgttttgtcatttacgtgaccatttgattctcaaacaaaagttgttccaaacaaaatgatgaactttgatttgaacaggtgcatttaaacaaccggaaatgatcacttagaaaattcaattaaaatgctgttgttttgtaatgaggatttttcttctgatttcaaattccatgaactcctattgaaaacaaacaatgtacaggtaatatatgcacattgtagaaatgcaggaattatctattggaattaccctaaagatagaaattttatctatttgcttataaaattgattcagaaggttattaccttaatgtagttattactgaattgccaggaaatgagtggagacagagctttaagataaaggatactaaaaacagctaagaactccaggactcaggtcaaatcaaggaactgataataagatcattgaactgtataaattaagtcaaagaactcctattaaaaacaaacaggtaatatatgcacattgtagaattgtaggtaagcaaaaaggagaaggttgatcatgctttgctgtatgtcttcgtagactttctcagtccactctcagtacacgttttattttacttgctcatcctgattatactgtttttaccctccacttaagtcattttttgaatttaaatggtgaatatctttctgtgtcaaatatttcaacattaatatgtacatagtattaaatggatttactataaattatttagcctattcttactggccacagtagtctaactagatctttatacatttgtatttttctagaataaactcaaaaatgtgtaagatcaaagggtatatattgtgttgccaagaaaaagttgtgccaatgtatatttttgccaggagtctttcatagtaccatttatatccttcccagcattagctgtgttctaccttctcttctcttgccatttttacaagaaaaccgggcatgtctaaagttttcttttcctttttttttttttttgggttttgggagagtctcacgggaatgcaggggcatgatctgggttcccgttgcaacctccagtcaggcgggtgtgcctgtgtcgcgatatcaacgcgacctccgcctcccaggttcatgtgatggtcctgcctcaccctcctgagtagctggggattcacaggtgggcgccaccattcccatctaatttaatatcttaacgagagagtggcggttttacctgtgtggccaggctgctctgagaactccgtgacctctagtgatcccaccggctttaagctctcccaaaaggggccgggtaattaaagggttgagccacaagggcttggcactaaaaatcttctgggataaattggacccccatagatatgcggcaattgacacatctgtggaggtttcgccatgaaaatggtggctttctcacaaattgaaatctggaggtctggaccatgttgcgaaaatcccaattggattgcactaccgatttgacaagggttaagagcn

SEQ ID NO: 21662 - DNA, 651 bp, Homo sapiens
  misc_feature 642, 643, 644, 645, 646, 647, 648, 649, 650, 651: n = A,T,C or G
ggggagggctgtaagtggcgcgattcgcggcagcgccccgatggaacctcctggtcctgtgagctgcaagatagaaagcaacatatgcccccaggtggcctccctcaccctggcaatggaaacgaacagccgagcttcaccggacaagactagaaatcgttcctccacccacccagagacaaagcatatttgacttcttcctctactggggcccttgcaagattccagctggtatgagccttctgcagagctagtgcagactaggatggctgtatcactaacagcagctgaaactctggcccttcagggtacacagggacaagagaagatgatgatgatgggaccaaaggaagaggaacagtcttgtgagtatgagaccaggctacctgggaaccactctaccagtcaagagatcttccgccaacgcttcaggcatctccgctaccaggagactcctggtccccgggaggccttgagccaactacgagtactctgctgtgagtggctgaggccacgagaaacacacgaaggagcagatcctggagttcctggtgctggaaacaattcttgaccatactgactgaggagctccaatcctgggttccaaggcctgcacatggaccttgcaccaggaagagccannnnnnnnnn

SEQ ID NO: 21663 - DNA, 647 bp, Homo sapiens
tggtgatcttattctgtttaagcagaacaccttgtttccggtgttggaacatggttcctttggcagaagtgctttttttttaatcgcagtactatttttataaagcaagaactattccatgccttggagaatgaatcatttaactgtgctatggagtagaagcaggaggttttcaacctagtcacagagcagcacctaccccctcctcctttccacacctgcaaactcttttacttgggctgaatatttagtgtaattacatctcagctttgagggctcctgtggcaaattcccggattaaaaggttccctggttgtgaaaatacatgagataaatcatgaaggccactatcatcctccttctgcttgcacaagtttcctgggctggaccgtttcaacagagaggcttatttgactttatgctagaagatgaggcttctgggataggcccagaagttcctgatgaccgcgacttcgagccctccctaggcccagtgtgccccttccgctgtcaatgccatcttcgagtggtccagtgttctgatttgggtctggacaaagtgccaaaggatctttcccctgacacaactctgctagacctgcaaaacaacaaaataaccgaaatcaaagatggagactttaagaacc

SEQ ID NO: 21664 - DNA, 527 bp, Homo sapiens
  misc_feature 1, 2, 527: n = A,T,C or G
nnagtaatggaaaagctgcatggagatatgttggaaatgattttatccagtgagaaaagtcggcttccagaacgaattactaaattcatggtcacacagatacttgttgctttgaggaatctgcattttaagaatattgtgcactgtgatttaaagccagaaaatgtgctgcctgcatcagcagagccatttcctcaggtgaagctgtgtgactttggatttgcacgcatcattggtgaaaagtcattcaggagatctgtggtagtaactccagcatccttagcccgtgaagttctctggagcaaaggttacaaccgttccctatatatgtggtcagtgggagttatcatctatgtgagcctcagtggcacatttctttttaatgaggatgaagatataaatgaccaaatccaaaatgctgcatttatgtacgcgggtgtttggaagcaaagataacttcctcggcttagccatcttcctggacacctaccccaatgatgagaccactgagcgcgtgttccggtccn

SEQ ID NO: 21665 - DNA, 1332 bp, Homo sapiens
  misc_feature 1, 2: n = A,T,C or G
nncgacccacgcgtccgaagaaagcatcaccacctccggagtcatgggccgttatcccaggggaaaaccctaccaaactaacgctaagaaaagtttaactctccttcatctattctattactccttcttctttcctcattctatggctgaccacctcattattaatgtaaccaggtcaagctcaccccaaactattaccttcgatgcatgtcttgtcataccctgtggagatctccaaagtcaaaagcaactctcagactcagagaagtatctctgcccctttaagataaaaggctccccctatcaagacccttgttccttaacgaatgcaggaaaacaggtctgccatagctggaatgatgttgtgtggacaactgaatatcaaggctggacctcgtcaaccggtggttgtatgtccttaaaaccatacattcacttcactaaagaaagtaccccccataattgccagtataaccaatgtaatccagtgcaaatttctattctcattccaacttctactgaccctaaacctactttaagttgcttatatggcatgggagccgaaatagcaggggcacatcttattggatattttgagatatgttttattactccttcacctcctacattccttctacattatcccccaatgttctgttcttcctccacccaaagataaaaccaaaatagatattgtagaagtaaatgacctaaaacaaactttagcaattgaaacaggatatcaagatgcaaatgcctggatggaatggattaaatattccgtccacactttaaacaaaagcaattgttatgcttgtgcgcacagcaggccagaggcccagattgtcccctttccactcagatggtcctcccgtcgaccaagcatgggctgtatggtagctctcttccaggattctacagcttggggcaatatatcatgccaagctctctctctgctctatcctgaagttcaacaccctgcgggtcagcccccgagggccatccagcttccgtctcccaatgtcagtttcatctcatgtctctcatgacaagggaaaacttggcattccgtggaagcttaatgggatgtagtgagcttaagcccttccaagagcttacccatcagtctgctgttagtcattctcgagcggatgtagcggatgtatggtggtattgtggtggacccttactggacactctgccaagtaactggagtggtacttgcactcttgtccaattcgctatcccttttgcccttgcatttctttaaccagaaaaagaaaagccacaacaccgtaaaataagagaagccccttatgggtcttttgactc

SEQ ID NO: 21666 - DNA, 1483 bp, Homo sapiens
  misc_feature 1, 1483: n = A,T,C or G
nccttcgggcgtggcgtgtgccggcgcggcggcgtgcggtcgtcgctgcgctgtcgctctcgcgctcgccttgtgtgggcccctctggtgcttgggctgtgtgtctctgggtcgctattaaatccggttcttctctgggggtgtcggggtgtgccctggtacctggtgtgttgccctgtgggtatgtctggggtggtcggccgtgtgccgccgcggtggtcctcccagtgcccgttcgcgtttgctcgccgcgtgttgtttttgcgcctctcctgcgttgtctcctgccctctctatgggccccctttgtccatgatgtgtgtctccgtgtttttgtcgcccctcctggggtttttttgtttcgccccccccctttttttgttttgtttttttttttgtttttgtgtgttttgtacagaattccccaaactttaatgctgtgctctgaaaagggaggctggaggttgtggtgggtcacagtgttgctgacacctctggcctccagccctgcatccctaggcaccatgtgaccaggcagtgagaaggacggggcctcactcccatgccagactgctcctcgggctgagcaggacctgaagctctcagggcttccaccaaagcccagcaaacttgggggaggcctgagggggcatcagcagtccttaaaggcctgagcttgcaacactcaggcaggactcggctgagggcctctgtggtgccaccatggggtaggaggtaaagagagaccctggttccagcctgggaaccagtgggtgccctgaagggaggggaggcctcagggagttcgggacaggagtgtgcatggtactgggcggcccatgggggctcctggcctcttggttcaggcaatccctgagctggggacacattccatcttaggtccaagagacggaggtcaggagcatccctagaacgacctcccaggcacgaggaaggcccggggcagggccgggcgcagcgtggctggcttcagtaccctcgggcatcttgactcctgccctctgggactgcaaagggatctgcgggcgcctctgctgagtcaatcgtctggtaggcactacggtcctgagaagacccaaggaaaccagtgtggaccaggagctcacccccgcgctcccggtacatgtggtagacgaagcagcaggagagcggcttgagcagcaagctgaggatggccatgcccacgccaaagcggcccgtgtccgtgaggctgacccgcgggtagaagatgctgatgtgcacgatgtccaggaagatggtggccagcaagccacccagaaacatgcttatggcgtcgatggagtcccgctgagccacagcccaagcccaaggccaggatgtgaattgccggcatgagccgaaatcatgcccggttgtgccgacgggaactcgttccgggccacctaggggggggcaggggtgccgaaccgcgtcacgcatggacaggaagggccactataan

SEQ ID NO: 21667 - DNA, 4998 bp, Homo sapiens
agcaacctatctcgacaagtcgcgccttacgcactgctcacctcagaactcgcgaatatgctttgccactgcggcgggtcgccgcaaccgagctcagccctgtggctcctcctcgctgccctgcgcggattggtggcagacggcaaccgggccgctgattgggcggcgaaggagccattcggggagactctggtgggttcggctgccccaagagtgataagttcggcttcagacacgccttagcgccagcagtgagtcggagctctatggaggtggcagcgggtaccgagtggcggctgcagcagcgactcctctgagctgagtttgaggccgtccccgactccttcctcccccttccctcccccttttttttgttttccgttcccctttcccctcccttccctatccccgacgaccggatcctgaggaggcagctgcggtggcagctgctgagttctcggtgaaggtatttcatttctcctgtcccctcccctccccaccccatctattaatattattcttttgaagattcttcgttgtcaagccgccaaagtggagagtgcgattgcagaagggggtgcttctcgtttcagtgcttcttcgggcggaggaggaagtaggggtgcacctcagcactatcccaagactgctggcaacagcgagttcctggggaaaaccccagggcaaaacgctcagaaatggattcctgcacgaagcactagacgagatgacaactccgcagcaaacaactccgcaaacgaaaaagaacgacatgatgcaatcttcaggaaagtaagaggcatactaaataagcttactcctgaaaagtttgacaagctatgccttgagctcctcaatgtgggtgtagagtctaaactcatccttaaaggggtcatactgctgattgtggacaaagccctagaagagccaaagtatagctcactgtatgctcagctatgtctgcgattggcagaagatgcaccaaactttgatggcccagcagcagagggtcaaccaggacagaagcaaagcaccacattcagacgcctcctaatttccaaattacaagatgaatttgaaaaccgaactagaaatgttgatgtctatgataagcgtgaaaatcccctcctccccgaggaggaggaacagagagccattgctaagatcaagatgttgggaaacatcaaattcattggagagcttggcaagcttgatcttattcacgaatctatccttcataagtgcatcaaaacacttttggaaaagaagaagagagtccaactcaaagatatgggagaggatttggagtgcctctgtcagataatgaggacagtgggacctagattagaccatgaacgagccaagtccttaatggatcagtactttgcccgaatgtgctccttgatgttaagtaaggaattgccagcaaggattcgtttcctgctgcaggataccgtagagttgcgagaacaccattgggttcctcgcaaggcttttcttgacaatggaccaaagacgatcaatcaaattcgtcaagatgcagtaaaagatctaggggtgtttattcctgctcctatggctcaagggatgagaagtgacttctttctggagggaccgttcatgccacccaggatgaaaatggatagggacccacttggaggacttgctgatatgtttggacaaatgccaggtagcggaattggtactggtccaggagttatccaggatagattttcacccaccatgggacgtcatcgttcaaatcaactcttcaatggccatgggggacacatcatgcctcccacacaatcgcagtttggagagatgggaggcaagtttatgaaaagccaggggctaagccagctctaccataaccagagtcagggactcttatcccagctgcaaggacagtcgaaggatatgccacctcggttttctaagaaaggacagcttaatgcagatgagattagcctgaggcctgctcagtcgttcctaatgaataaaaatcaagtgccaaagcttcagccccagataactatgattcctcctagtgcacaaccaccacgcactcaaacaccacctctgggacagacacctcagcttggtctcaaaactaatccaccacttatccaggaaaagcctgccaagaccagcaaaaagccaccaccgtcaaaggaagaactccttaaactaactgaaactgttgtgactgaatatctaaatagtggaaatgcaaatgaggctgtcaatggtgtaagagaaatgagggctcctaaacactttcttcctgagatgttaagcaaagtaatcatcctgtcactagatagaagcgatgaagataaagaaaaagcaagttctttgatcagtttactcaaacaggaagggatagccacaagtgacaacttcatgcaggctttcctgaatgtattggaccagtgtcccaaactggaggttgacatccctttggtgaaatcctatttagcacagtttgcagctcgtgccatcatttcagagctggtgagcatttcagaactagctcaaccactagaaagtggcacccattttcctctcttcctactttgtcttcagcagttagctaaattacaagatcgagaatggttaacagaactttttcaacaaagcaaggtcaatatgcagaaaatgctcccagaaattgatcagaataaggaccgcatgttggagattttggaaggaaagggactgagtttcttattcccactcctcaaattggagaaggaactgttgaagcaaataaagttggatccatcccctcaaaccatatataaatggattaaagataacatctctcccaaacttcatgtagataaaggatttgtgaacatcttaatgactagcttcttacagtacatttctagtgaagtaaacccccccagcgatgaaacagattcatcctctgctccttccaaagaacagttagagcaggaaaaacaactactactatctttcaagccagtaatgcagaaatttcttcatgatcacgttgatctacaagtcagtgccctgtatgctctccaggtgcactgctataacagcaacttcccaaaaggcatgttacttcgcttttttgtgcacttctatgacatggaaattattgaagaagaagctttcttggcttggaaagaagatataacccaagagtttccgggaaaaggcaaggctttgttccaggtgaatcagtggctaacctggttagaaactgctgaagaagaagaatcagaggaagaagctgactaaagaaccagccaaagccttaaattgtgcaaaacatactgttgctatgatgtaactgcatttgacctaaccactgcgaaaattcattccgctgtaatgttttcacaatatttaaagcagaagcacgtcagttaggatttccttctgcataaggtttttttgtagtgtaatgtcttaatcatagtctaccatcaaatattttaggagtatctttaatgtttagatagtatattagcagcatgcaataattacatcataagttctcaagcagaggcagtctattgcaaggaccttctttgctgccagttatcataggctgttttaagttagaaaactgaatagcaacactgaatactgtagaaatgcactttgctcagtaatacttgagttgttgcaatatttgattatccatttggttgttacagaaaaattcttaactgtaattgatggttgttgccgtaatagtatattgcctgtatttctacctctagtaatgggctttatgtgctagattttaatatccttgagcctgggcaagtgcacaagtctttttaaaagaaacatggtttacttgcacaaaactgatcagttttgagagatcgttaatgcccttgaagtggtttttgtgggtgtgaaacaaatggtgagaatttgaattggtccctcctattatagtattgaaattaagtctacttaatttatcaagtcatgttcatgccctgattttatatacttgtatctatcaataaacattgtgatacttgaaaaaaaaaaaaaaaaaaaaaaaaaaaaaaaaaaaaaaacaaaaaaaaaaaaaaaaaaaaaaaaaaaaacaaaaaaaaaaaaaaaaaagcgaaaagaagaagagcgagagagagcgaaactaaaaatgagagagactcaacgaataggagagtaaccaaaacaaaatagtcggcacagctaagatgacgaaggcacacagcgtgcttccactaatatgctagttggcgtgcaccaatgctcagcgaggactaaggtagcctgttgacataacagggcgtcacttgtgaacaataggtacttttcaaaaacacaacggccaccgacgaaccacatatctactcacaaaagaggcgcgcagcaacaatcagacgaacccgaacagtctagactgtgcgggaaatcgagccagacccatacctaggataaaaacctcacgagaggtacgaggcggcgagccaaataaagacagcaccgccacaacaagcaaccaggagtgcaaccgggcagcggcggaagaaaagctgtgcgaagcgcgcagagaaagtaacctcgaacaacacaacatactacaggagcatgcgtgatgaaaacgaacgaccgacacagaacacacaaaaaacatatcacagccgggaggcaagaagaagacacgcgagaacgcatagacacagactgatgtagagaaagagatgccgagcgaagcatgaataagagcgcacggtaaggtaagagaagcagaacacagtacagaagcaagaaagcaaaaaaggaaaacaataacacggaaaaacacacatagaacacagcaagaatgtacaaccatcaaataataaaaagatagacacaagaacgccaaggcactaataaagatgaaaagaatgagagataagaaaggagaaaagcaagacagcaacagacaagatagaatagagtaacatacaccagaacaagtagataaga

SEQ ID NO: 21668 - DNA, 856 bp, Homo sapiens
  misc_feature 1, 2, 3, 4, 5, 6, 7, 8, 9, 10, 11, 12, 853, 854, 855, 856: n = A,T,C or G
nnnnnnnnnnnncgaaagtcttctagaattaattaacgcgggcaaatagttgtaatttgtactttgtgctgataaagaaaactggacgttatttttggtataaattctttttctgtcttatgtccctgagaactcgtcaagtcttgagtgggccttgattttatcctattacacgtgggaacattagattacttaaggcaattatattttcctatacatttctgatgtttctccaaggtgtcacaagctgactctgaagatattgttgcattagggaagaagtgtgtcattgtaaatgaagcagttcttaatttatacgcaataaaagttttttaagcttatcttcctaaagcttatacacacgcaaaacacacccaatacactgtcatagcatactgaaatgtaaaagggttggacatatagttgactgacatcaaaaagttaatattcctaaaacatcttattcattgataaatcatcttttttgaagaactgtgtaagagaggattgctgagtcaatcaacgtaagtaatactaccaaataaaaagtaacaaagaaatgagagatgataggtaattccagttttctgaatgaacaggaaacctagggcatactgcgcttcacaggagaataggatatgactgctttttgaagagataattcaatacaagttagttaaatttctatttttctgcattctaatgaaataatggtaaatttccagccttttgggattccagttctatgggaatgactatagaagtagtccatggcaatcaacacaaagtatatacggctacagaggaaaaacctcagattcgtgaatgaaagtagattgtatatgtttgtaannnn

SEQ ID NO: 21669 - DNA, 910 bp, Homo sapiens
  misc_feature 1, 2, 3, 4, 5, 6, 7, 8, 9, 10, 11, 12, 13, 14, 15, 909, 910: n = A,T,C or G
nnnnnnnnnnnnnnncgacccccctttttttcgcgcgaagcttcattgtggaccctctttctctcccaaaccccttccagccacacgacccatgtggccccgccaacacccgttaagccggacccaaacgaatttcgatcccaggccctaatagggaaccttccctctttgaaccatttccagctcgtacctttggcaggacattccgcacagaaacacccagatgatattgttcccggaaccgaaccacacaaacccaggaagcctgaattcttatgattcccatgaagacacatcaataccagaagagtaaaaacatagatcctgcttctgtataataaaggaagttaaaaaaataaagtgttggaaatactgctagtgttaatgttgacaagactctctggatacttgaggcagccttgtttctgggttgtaccttgcagaaaagcaaatatagtaaatagaagttgccaacactgaagagaagattaacaaatctgagcatcccaatggagcagacaacatgttcagaccatccaaagatccaaatggcaggtttgatcactccaattgacaccaggtacaagccaggtaatgtagtaatcatgggatcccactgggaaagggagaaatggccctcacagtagcgctgcgcctgaggcaggtggaagatctcgtccatgtagggctctcgcaacgcccggctgaaggcggagaagaggaggcaggatactaaaaaggtacagctcaaggcggccgagaaatagtaaccttccagctgcgccattccagctcccacagccactgcccaagaacctactcctggaaaattctgagcctggaaacccgagctggaaacttgggctcgaaatgggcgcgctagacaggactagccagacagggccacann

SEQ ID NO: 21670 - DNA, 431 bp, Homo sapiens
  misc_feature 402, 403, 404, 405, 406, 407, 408, 409, 410, 411, 412, 413,414, 415, 416, 417, 418, 419, 420, 421, 422, 423, 424, 425,426, 427, 428, 429, 430, 431: n = A,T,C or G
acgcgggatgtattttaattagattgtgtctaattagtttctatctaaagtgctatgtattaggataattcaatatttaattatccctccccttccatgaacctgtagagcctccctatggagagcatttgtggtagcccacgcaaaccctttagtaaatctttcattctctttattaaccttggaataatttgaaaggtttttgaattgggactatttctttttttttcaatccactcaacatttattaaattccttaataaatcattggaggaaagcagtgatatttttgagaatattgcaattaattattgaggatgagaagaaatgtttgacttaggatattatagataacttaagggcacttaaactttttttcccctatgtaagaaataagtgccnnnnnnnnnnnnnnnnnnnnnnnnnnnnnn

SEQ ID NO: 21671 - DNA, 1943 bp, Homo sapiens
  misc_feature 1, 2, 1942, 1943: n = A,T,C or G
nngagacggcattccccagagttcatgaagggaggatagcatacgacttaggaatctccttggagctcaagactcaggaactttcccccagctcggaggtccctgaggcgctctagcgcgctggccgcactcgcagcccaggtcgccagtgcgcacgcgcaagagttaggtggggcgccagagccggggcacctgcgcaggcttggctgcgccctctcgcgccgcacgctctgcgggttcctcccttcttccgagcctctcctctggccgccgcgcgggagagaggccgagatggcagatgagattgccaaggctcaggtcgctcggcctggtggcgacacgatctttgggaagatcatccgcaaggaaataccagccaaaatcatttttgaggatgaccggtgccttgctttccatgacatttcccctcaagcaccaacacattttctggtgatacccaagaaacatatatcccagatttctgtggcagaagatgatgatgaaagtcttcttggacacttaatgattgttggcaagaaatgtgctgctgatctgggcctgaataagggttatcgaatggtggtgaatgaaggttcagatggtggacagtctgtctatcacgttcatctccatgttcttggaggtcggcaaatgcattggcctcctggttaagcacgttttggggataattttctcttctttaggcaatgattaagttaggcaatttccagtatgttaagtaacacacttatttttgcctgtgtatggagagattcaagaaataattttaaaaccgcatacataataaaagacattgttgcatggtaacaaaacaccgactaacacccaccaacacacacaacaacaacgctgcggccccgaataaccggcgcggccaagactgtcctcccgcatgtgttttcaccccccgtcgtctttattagtctccaccccactccaccgccacgaccaccctcaccccagcccaccccccaacccgacacgccccacacccacagcagaagagagaagggagcagacggccgacaaagagaaagcgcaaacggcggaaggggcaaggcaacacaaagacgaggtagaaaagagaaagagcacgagcgagaacaagcccgacccgccaacacacagaccaagcaggagcgaggcggggcagcagaagaagaggggacggaaaagggcacaaccacagcaccaagcaacacacacgcaagcagaagacgcagcaaaagggcggcgacgaaaagagagcggaggagagggacgcgcagcaacgaggcgacagcacgaccggacgacccgaacgaagccggacgaacaagaccgccagagagaacaacgacacgccgcggcagagccaacggacagagcgaccagaggcgacgacatcgaacggaggcgggcgcgagagcgacgagcggacgagggagagccaagacgagggaggcgaacaagaccgaacggcacgacgcccgagcccgagaagcgcaaagagaaggagccaagggggacgagcgcacggggaccaagcaccaggcagagacggacagaagcagcagaacggagagggagcccgacgacgggcgcgcggaccgggggcgaggagcgaagggacaggacgcggcgcgagggagcacgcgcacgtgacgcagacaaggcgagagagccgggagaagagggagacgagaagcagagggagggcggcgaccggaggacgaacaacagacgaacgccgccgcggaggcaagagacagggaagagccagcgacggacgccaagaacagagagagggggagcagcgacgcgacgacacgacgagcgcgcaaggacgcgagcgcgatgcggaccgcggccaggccacagcgacaagggagcgacgccaaggagtcgacagcgcaccgcgcgacgcccacgcgcaacaacnn

SEQ ID NO: 21672 - DNA, 649 bp, Homo sapiens
  misc_feature 1, 2, 648, 649: n = A,T,C or G
nnggtctttacaaaggagatttttactgaaaaaaaacgatttataggagatgggttgttaaaattatgttgcttcgggcaccttgggacatttaacaatgcaggaagcacataccaagggaaaatgtacactccagagtgtctcctagcacgtggctacttttgagcatttatcaggtataaaccatcaggtaaatgagccacttggctttcaaattgatatggagccacaaattaattctaatttgtgcagttactttatttacactgtaaaaggggtgggtgggtatgtaatagaaccaagtccttttgaaaaaattttttaaaaaaaaatttctgtgggtacatagtaggtatatcacattctactttgatgtttaactgtaagtataaaattaaatttctcttagatcggattttacctcttgtatacgagaaactacattcttagtttatttgggttctttatgaagtttcaaaccacatgccaactgtgatgcttgttttatttgaaacatttaggctgtgtccagtttgggaggtctacgttttcctgaatttctacacccttcccctagatatacctacacttttaaaaaatttgcttcattgcatcctggactcatgtatttatttactaccaacaacnn

SEQ ID NO: 21673 - DNA, 1550 bp, Homo sapiens
  misc_feature 1534, 1535, 1536, 1537, 1538, 1539, 1540, 1541, 1542, 1543,1544, 1545, 1546, 1547, 1548, 1549, 1550: n = A,T,C or G
cgtccgcccagctggaatgcagtggtgtgatcttggctcactgcaacctctgcctcccaggttcaagcaattctcctgccttagcctccagagtagctgagactacaggcacacaccaccacatttggctaatttttttatttttagtagagactggctatcaccatgttggccaggctgatcttgaactcctgacctcaagtgatccacatgcctctgcctcccaaagtgctgggattataggtgtgagtcactgtgcctgacaaatataagcctttaaagagaagaaggttttcattttgaagacaaacattaggtacataaagagggttgtagtgtctttacttgtatcacagattttattgtacacattatgtactaaaggaaaatcctgaagcagtgctcaaactttgatcaacatcagggagtttatattggagaaaaactgcaaatgtaatatatttggaaaaacatttttcaaaaactactgcttagaaaacaccaggggatttatactaaaatatatttttgcagatgcagtaagtataaaagaaatttaatccaaaattaagtgtgtgtaaatatcagagaattcacagtagaaatatctaaggcactgacattttagacattgaactaatcagtgtgctgagtacagaaaataatccaaaattaaagttggtagataaattatttgtatataactttaaaagaggtagaaatatttttagttataattacatttaaagtatacttttttctttgaaaaaattacaaaatttttaaaaagtgaatgatgtaattcaactcaaattacttcatgcttttcattctattcacatgtgaaagcatgtgatcaattgctgcttcatcaaagatatgagacattcttttttgttaggtgggcaatattttttaccttttctatggaagagtaaagacattacaatgtaggatgcatgataaaaatctaagtggagaggctctttgtgtttaatttataatattgaatgatgtatgagggaagtgttcagaggaatattctgcattctagtgaaaatatcttttattttagttaaaattaaattaaaattagtagtatatctttttactaactacttttatgtaataaaatgcagcacatttaaaaaattttagattattgtgaacttaattttttaattaaactttttttttaacatgttaagaccaattgtgcattcagtgaagtattatcatgccactaacttcaacctatcccaccttactcaagggtgttggtaaaagatagtaaccaatgtactattaataacagagtggctaacatctctaataattctcttgcaaggactttaactaagaacttattaagaacattggtccataggtaaatttatcttttcttattaaaatattttctaacttggggggacccggggttttttgccgaatgcatttggacaggcatgaaaggttacaaatgggagaaaactcacacacgttatgttaaacgggactttaaggagaaggtgannnnnnnnnnnnnnnnn

SEQ ID NO: 21674 - DNA, 2284 bp, Homo sapiens
  misc_feature 2276, 2283, 2284: n = A,T,C or G
ttttttttttttttttttttttttttttttttagacatagatacttatttatttgcatatttaaagtttacacacatgctatgactccaatgttttaaaaaaataagcccttaacagctctgagacacatggcctcttctgtatcccaagcaaatccctaaatggaggtagagcacgtgttcctatttttcacactctcatatgggagataagtggttaaggaggactagaaacccaatcaggcctaccggggtgccggacagacacacagcattcctaaaggaatgccaccagagaaaaaatacaagtctgtacatatatctttattttcatacttaaaaagaatcacatactcattccaacagctttaccaggcttcgccaacccaataagttacacactcactcaggtactaggaaggttattgcacagctccttaactgatcggggtcagggcagagtggtcactttccccacagccaggctctggatttgcctcctgtgaagacaccatgcctagcacaggctgacggggcggctgcagtcgaaccttgcctccagattatgaaccagtataagtagcacaattctcgtggctactttcacttcagagtgtcatgtttattgatgtggagctttctgaatagggaggttaaggcacacctgctgagtaaaacaaatatttcttgtgtagcgttctagattgagggcagcagtcaatggtaaaataaacttcagtagcatgttcctgtcaggttatatggcagccctggctcaaggatttctccccctgcacgattcctaagactgtttgctagctgattctttgttttggcaatttgatggttttgatgaatttgctgtgatccaggggtgttcaagtacttctctgagcattggcctctggctgggattatgcttcaacagtcttgaaatgaggtccctggctccctctgttacaaagtcagggaatgtgaattcaacccgtgatattcttttgtaggtctcttggtatgtgtttgcctcaaaaggaggcttcccaactaaaaattcatagcaaagaactccaaggctccagagatccaccttctcatcatgcatccgaccttcaatcatttcagggggcaggtagtccagggtgccacagagagtggtcctcctggaagatggagcatgtactgaccacccaaaatctgcaattttaagctctccagctgatccaagaagtaagttctctggcttaatgtctctatgaataactctcttcgaatgacagtaagacagggcatttgccaattctgttatataagtagcagttctctgctcatcaaactttgaaagtttctgaagttctctataaactgttccaagtggtgcatattccagaattaggtagactctggtagcatcatggaaataaccatacagtctaagaatattaggatgccgaaggtgggactgtatttctacttctcttctgagctgatgctccactccggctttctccagctgagctttaaataacactttaagagccagaataaacttgctttgcttttctcttgccaaataaacattaccaaactttcctttacccagagggcgaccaatttcaaagtcttccaaagcccactgcctcttttttgattcttcatttttctgttttgatgccagttcctcctcaggattattttcaggtgccgatggcaggggctgcttgctcttttgggtgttattcagtggcctggagacaggatgaggtacactggttgcctgcaattgcttctgcttctgattctgaaccggcttgtgactggagacaagcttttgtgcttgcaaaggaacgcgctgggaagaatttgaaggacacaagacccgctgagcctggccactatttacaggtaatggattctgacaaggaatttgctgagtcacgagaacacgttttggacctccaactggagctgtagccttaacaggtcctgaaatgcagttttctttagatcggtccatgatgcctctagctgtaataagtaacaagcagtatcctacagggcgcctcggtgcccaggagcggatgcaaaggcgctgggcgggcacaaggcagcgccaaggacactcagggacggaggaaccgacaggggacttgacgctccgccactccgaccagccgccccttgtccccgccgtcctcgtccgccactgagatatcccccacggtctacccacccgtcggctcccacctgcgacccaaggacccaagtcttccaagagtnccggacnn

SEQ ID NO: 21675 - DNA, 1938 bp, Homo sapiens
  misc_feature 1, 2, 3, 4, 5, 129, 1917, 1918, 1919, 1920, 1921, 1922, 1923,1924, 1925, 1926, 1927, 1928, 1929, 1930, 1931, 1932, 1933,1934, 1935, 1936, 1937, 1938: n = A,T,C or G
nnnnnaatttgggtaacgccagggttttcccagtcacgacgttgtaaaacgacggccagtgaattgtaatacgactcactatagggcgaattgggtaccgggccccccctcgagttttttttttttttntttttttttttccaggtatgtacatacatatataatatataaatataaagacatatatatgcacagacttaactccaacacgactggagtgtcgggagggcaactgggctgccctctccgccctccaggactgcgggacaagtctcccggcgcccgggtcgcaggagacccggagccctaaaacggcccctgcgcggcttgggccttccggctttccgtccgccgcggccgccattggctgggttcggcgcagctaacagacggcggcagtgcgagaaagccgaagatggcggtccccgcggcgctgatcctacgggagagccccaggtagctgatccgttaagctcttgcggtagccgcgcccaggaaggcccagatcgggctcgcacaaggctgtccttgctgcctgccgcctgggcgccgcggcgggcccggttgagtggggtggggtggggtgggctgccgaggttgcgacgctgcgtctgcggagtgcgtggggccgtgtagcgcctctacagtcacggtggtccacctgtggggctcacagtgcgcctggcagctgaggtctgtacggaagcgtgtggtctgcaagcgtggggtctgcgtcactgttcgcggagtttggtatcagaagttcccgggtgctgccttcagtgccgctgatcctacgggagagccccagcatgaagaaagcagtgtcactgataaatgcaatagatacaggaagatttccacggttgctcgactcggattcgttcaaaagacttcacctgaaggctgagagcagtttcagtgaagaagaggaagaaaaacttcaagcggcattttctctagatgaaacaagatcttcacctagattcttgaaacaatatcatttatttgagaacaggcagtgtatcacaatgtgaagccagcagctttgcagcagcaattagagaacattcatcttagacaagacaaagctgaagcatttgtcaatactatggtcttctatgggtcaagaaacagttgaaaagttccggcaggagaattctgggctccctgtaagctagagactgttggatggcagctttaaccttcagatggctcactctgctcaagcaaaactataaatctcctcaagctgtgttacaactcggagtgaacaatgaagattcaaagagcctggcagacagttcttgtggaattcagtcacaacggagcttcgttgatttctataacaagctagagactatacgagcacagctggatgcccttacatgatgtctcgaagaatggcatctcatcacgctcctgcacctcattcatctgccatggagataccttgccaggctcgtggttctcctgaaagggattcactggacttggcttcggtaactcaatggcttatcacttcctcacacaataacacccactagagaccacggacaacaaccgacggccaacgacatcccgcaacatccgcggacgccacagaccctgtacggaaacccgaccctcaacggcaacaagcggccaacaaacatgcgaacaggcacacgcggaccaccgacaccacggacccgcaaaagcgggggagacgaccaacgagtgaggagaccgcggaccacacaaccgcgccccccaagaaagaatgcgagaaacaacaacacacccgaaaacaacgacgaaagtgacgaaaatccaacaagaccacaacacgtcgacagcccaccaccaggacaactgcgcctctctcgacgcccagtatttcgtcgcagcacggaacccacccacccccaccccgannnnnnnnnnnnnnnnnnnnnn

SEQ ID NO: 21676 - DNA, 1187 bp, Homo sapiens
  misc_feature 1, 2, 3, 4, 1186, 1187: n = A,T,C or G
nnnncaaacatatcttcagatctgtgaccggggcccccaatgggactgataatattagcttcaaaccaataatatcccgggttaaaataaaaatcatagtgcaaagtaccgattgtaaaattatgctatattaacttttaagtctgtaataacttgacatcaaaatgttatgtaattaccataaataatggctagcgagaacatctttggaaattctcaaattacctttcttactacactgtttgcagaatgaatgtagaaatgatcctgttagctttctgaatgttctgtggttgaatgtgtttttgcttaaataaagcttttggtatttgtttaaattacacttcttgagaagtggaaattttaggatcatctttgctttgtttcagttttgtgatttttgaaatgaatgtttagtttactgagccagttggtcatttcttcctcatgtcgttaagtccagtgagtaagcctgaactgtgaataaattaccaaaaacttgcttagaatttcattttgaagcaatttgctaatatttgaagtgtatacacatttgtagttatgttaaaaattgtattgtactaagaatgtaatcaatgtctactttagttgtaaacatttctgatgtcaaaactttattcattactgttgattttaagaataagaaatcactgcctaaatattaccaaaagccactgtctctacccgaacttcccagtttgggaaagaatcgttagataaaacaaaggctctgccctttctgataccaaactccacagatactttctcacatcttttaaaacattttgcaataacatattgtttataggaagtttacagggtatgcaatgattaaaacttttaagtgaattgatagttgcaaaagaaaggataatatttaaggtcagtgagtagcaagacaatctaaagtttctgtaatatctggctctctgttaattatagagcaaagtttcccttacagaatccttttatgaacagcaagctagagtctatccctagtggttatagcacctgctgcgtttttcaggagacagttaggccagggtgatttgaatggatagatgtgctgttttgcctgcttgtagaattcagcccagtctttggtctctctctctctccccctcctccacctctccctctctcttcttctgcaccagagcctaann

SEQ ID NO: 21677 - DNA, 835 bp, Homo sapiens
  misc_feature 1, 2, 3, 4, 5, 6, 7, 8, 9, 830, 831, 832, 833, 834, 835: n = A,T,C or G
nnnnnnnnncatatgagcaatctctatggggaaaaagcaccatgtgaaatacagaaatcctttaagtaacagagtcaagcaagacaaatattttgattctgtcataatcacatcccatatcctctgatctctgattctctagcctggtcatcttataaagatgagtcaaccaaaaataacaactataatgtaacctgtgccagttagtcaaagacaaggcaaattaaatgcctctacagacattcatattttttctcctgcttgtaaaaagacattcagaaaaactacaaagatgaccctgcctaccagaaagcactctaacttttcaactttcaaagtacaaccaacactatctccctgataacatccaaccattaattaaaatcaacctcaaaaatctgaaaacgttgtgcacaccataattactaagctaaaattactatatttctcagtttacaggaaaacaagtaaacatttactttctgcttttggacaaacagattaaattatttttaagaatgttcttgcctccatatgactcagcttactgtgggatgcagaacacctaagtgaggaggaccaagggctctagacctgcctaaaaacccaacctgcaccactccctgctaccagcagggtcctgaatgggccacctgggtatctcctccaggctcacattcttgacaccagataccatgtacgcggggaggcattgaagcagccagcgcatgggcttctgctgaaggggcaggcggagcttgaggaaaccgcaaataagtttttttctttttgaaagatagagaataatacaactactttaaaaatatagnnnnnn

SEQ ID NO: 21678 - DNA, 1026 bp, Homo sapiens
  misc_feature 1, 2, 1025, 1026: n = A,T,C or G
nnccaactgctcctccgcggtggcggccgcccgggcaggtacgcggggagggccaggtctcagggctcctggagctgcaggcggcgggaggggctacaaatgcttgactcagtgatgcagaacctttcagagttagctggaagccacagccctgcctcttgatgcagcctggatccagccggtgtgaagaggagaccccttccctcttgtggggtttggatcctgtgtttctagcctttgcaaaactctacatcagggatatcctggacatgaaggagtcccgccaggtgccaggtgtatttttgtacaatggacatccaataaaacaggtagatgtcttgggaactgtcattggagtgagagaaagagatgctttctacagttatggagtggatgacagcactggagttataaactgcatctgctggaaaaagttgaatactgagtctgtatcagctgctccaagtgcagcaagagagctcagcttaacctcacaacttaagaagctacaagagaccattgagcagaaaacaaagatagagatcggggacacgatccgagtcagaggcagtatccgcacatacagagaagagcgagagattcatgccaccgcttactataaagtggacgacccagtgtggaacattcaaattgcaaggatgcttgagctgcccactatctacaggaaagtttatgaccagccttttcacagctcagccctagagaaagaagaggcactaagcaatccaggcgccctggacctccccagtctcacgagtttgctgagtgaaaaagccaaagaatctcagggagaccgagtgcgagctatacagcggagctgacagggggagctgtgccttcaataagcgggatcaagtgctgtcgccaggattagaggacctcaggatccagtttcaagcaaccgcggaaaggcgtacaagaggggaccactagagaaaaacgagacgataagcgacataggactaggcaacaaagaacagatacaacaaaacatgtatgcgcann

SEQ ID NO: 21679 - DNA, 520 bp, Homo sapiens
  misc_feature 1, 2, 3, 520: n = A,T,C or G
nnnccggcttcttcctgccttgtggcctcacctgtttataaggactggacttttatttattaagttgtgttgttttattgacaatacatgcatcatatcttttgactttgaaggatatctcatgtcaaaggaatcaagttatgatttatagaggattcagctggaataccttgtgggtgctggctgagggtggcaaaacgcctaccgagacatgaaggttttagccactagttttgtccttgggagcctggggttggccttctacctgcctttggtggtgactacacctaaaacactggccatccctgagaagctgcaagaagctgtggggaaagttatcatcaatgccacaacctgtactgtcacctgtggccttggctataaggaggagaccgtctgtgaggtgggccctgatggagtgagaaggaaatgtcagactcggcgcttagaatgtctgaccaactggatctgtgggatgctccatttcaccattctcattggcaggaatttgagcttagcn

SEQ ID NO: 21680 - DNA, 3240 bp, Homo sapiens
aaccaaacattgtaacagatgcaatatgcttctttgaccaaattgaaagatttactagaggagtttagcagcagtgtttttcaaggagaagaattagtgaacttgaagccaggtcatttgaaattatccagtcagagaagcaaaaagaaaaaaaaataaaaaaagaatgaagacagcctagagtactaatgggacagcatcaattttatcaatgtagattgtatggaagttccatatgttggaaagagaaaggagcaaaaagcttatttgaagaaatactggccaaaacttcccaaactgaaggaaggcagtggacatccagattcaagaagccagatggactccagagtagaacaatccgaagacatctacatggaaacacactgtaatcaaattgtcaaagaattttgaaagcagcaggataagaacaacttgtcatatacaaaggagattctgtgggactctaagtggatttcttagcagaaaccttgcaggtcagaaagaagtgggatgatatagtcaaactgctggaagaaaaactgccagcaaagtactgtatgtggcaaaacttttctttaaaagtaaaagagaaataagattctcaaaatctgagagagttcatcaccactatatctgacttaaacgccaatgggagtctgttaaatggaaacaaaagtatgttcaacatgaaagtataaaattaaatgataaagctatggacaaatagagacctgcatattattgtaatggtgaagaatcctgcaaaaatgtctctctatccatctctcgaagacttgaaggtagacaaagtaattcaggctcaaactgctttttctgcaaaccctgccaatccagcaattttgtcagaagcttctgctcctatccctcacgatggaaatctctatcccagactgtatccagagctctctcaatacatggggctgagtttaaatgaagaagaaatacgtgcaaatgtggccgtggtttctggtgcaccacttcaggggcagttggtagcaagaccttccagtataaactatatggtggctcctgtaactggtaatgatgttggaattcgtagagcagaaattaagcaagggattcgtgaagtcattttgtgtaaggatcaagatggaaaaattggactcaggcttaaatcaatagataatggtatatttgttcagctagtccaggctaattctccagcctcattggttggtctgagatttggggaccaagtacttcagatcaatggtgaaaactgtgcaggatggagctctgataaagcgcacaaggtgctcaaacaggcttttggagagaagattaccatgaccattcgtgacaggccctttgaacggacgattaccatgcataaggatagcactggacatgttggttttatctttaaaaatggaaaaataacatccatagtgaaagatagctctgcagccagaaatggtcttctcacggaacataacatctgtgaaatcaatggacagaatgtcattggattgaaggactctcaaattgcagacatactgtcaacatctgggactgtagttactattacaatcatgcctgcttttatctttgaacatattattaagcggatggcaccaagcattatgaaaagcctaatggaccacaccattcctgaggtttaaaattcacggcaccatggaaatgtagctgaacgtctccagtttccttctttggcaacttctgtattatgcacgtgaagccttcccggagccagcgagcatatgctgcatgaggacctttctatcttacattatggctgggaatcttactctttcatctgataccttgttcagatttcaaaatagttgtagccttatcctggttttacagatgtgaaactttcaagagatttactgactttcctagaatagtttctctactggaaacctgatgcttttataagccattgtgattaggatgactgttacaggcttagctttgtgtgaaaaccagtcacctttctcctaggtaatgagtagtgctgttcatattactttagttctatagcatgttaaagatgcaagtatgctatagaactaaagtaatatgaacagcactactcattacctaggagaaaggtgactggttttcacacaaagctaagcctgtaacagtcatcctaatcacaatggcttataaaagcatcaggtttccagtagagaaactattctaggaaagtcagtaaatctcttgaaagtttcacatctgtaaaaccaggataaggctacaactattttgaaatctgaacaggtatcagatgaaagagtaagattcccagccaaaatataagatagaaaggtcctcatgcagcatatgctcgctggctccgggaaggcttcacgtgcataatacagaagttgccaaagaaggaaactggagacgttcagctacatttccatggtgccgtgaattttaaacctcaggaatggtgtggtccattaggcttttcataatgcttggtgccatccgcttaataatatgttcaaagataaaagcaggcatgattgtaatagtaactacagtcccaaatgttgacagtatgtctgcaatttgagagtccttcaatccaatgacattctgtccattgatttcacagatgttatgttccgtgagaagaccatttctggctgcagagctatctttcactatggatgttatttttccatttttaaagataaaaccaacatgtccagtgctatccttatgcatggtaatcgtccgttcaaagggcctgtcacgaatggtcatggtaatcttctctccaaaagcctgtttgagcaccttgtgcgctttatcagagctccatcctgcacagttttcaccattgatctgaagtacttggtccccaaatctcagaccaaccaatgaggctggagaattagcctggactagctgaacaaatataccattatctattgatttaagcctgagtccaatttttccatcttgatccttacacaaaatgacttcacgaatcccttgcttaatttctgctctacgaattccaacatcattaccagttacaggagccaccatatagtttatactggaaggtcttgctaccaacccctgaagtggtgcaccagaaaccacggccacatttgcacgtatttcttcttcatttaaactcagccccatgtattgagagagctctggatacagtctgggatagagatttcccggacgcgtgggtcgact

SEQ ID NO: 21681 - DNA, 933 bp, Homo sapiens
  misc_feature 1, 2, 3, 4, 933: n = A,T,C or G
nnnnagagacggcgaaggagctggaaactatgggggcggttcccgtaggatcaccaggcatcgatcgaaggtttccggtaaccagcatacaccatctcatccgaaacagcggggttcggcttctcctatggcaggatctggggcgaaaagatcaagagatggtgaactggagaccagtctaaacacccaaggttgtaccacagagggagacctgctgtttgcccagaagtgtaaagaactccaaggatttatacctcctctcacagacctactcaatgggctgaagatgggtcgttttgagagaggattaagcagttttcagcagagtgtggcaatggacaggatccagcgtattgtaggtgttttgcagaagccacagatgggggaacgttacctaggaaccttgctacaggtagaagggatgttaaagacttggtttccacaaatagctgcccagaagtcatcattgggtggtggcaagcatcagctgaccaagcattttccaagccaccacagtgattcagctgcttcctctcctgcatctcctatggaaaagatggaccagacacagctaggacatctagctttaaaaccaaagcagccttggcacctcacacaatggccagctatgaacctcacctggattcacaccactccaatttgcaacccccctctcagctccccaggtactatctccttagccatggttcctttaagcactggaaacggcattggcgtcattctttcctccagcatggagtgcaacccttcaccatctggccaacacccagtccactaataagattccgtcttcccggtgagccatgaatttggaaaggccgcggccaagtgccacacggccaaagggatacctcccgtccccggcaaaagcatcggcggggaaaaccccgcgggcttccacacggagggaan

SEQ ID NO: 21682 - DNA, 442 bp, Homo sapiens
  misc_feature 331, 332, 432, 433, 434, 435, 436, 437, 438, 439, 440, 441,442: n = A,T,C or G
acgcggggacacagaggccaggccttagcacggctcagccatgagcaacaggagtagcttttcccggctcacctggttcaggaagcagaggaaagctgtggtcagcaccagcgacaagaagatgcccaacggaatcttggaggagcaagagcagcaaagggtgatgctgctcagcaggtcaccctcagggcccaagaagtattttcccatccccgtggagcacctggaggaggagatccgtatcagatccgccgacgactgcaagcagtttcgggaggagttcaactcattgccatctggacacatacaaggaacttttgaactggcaaannaaaaaaaaaaaaaaaaaaaggtttttttggggggaacccctttggggggaattcccccccctggggggggttttttgggggtaccagcctgggccccaannnnnnnnnnn

SEQ ID NO: 21683 - DNA, 353 bp, Homo sapiens
acgcggggacttacgcggagcggcaatgtgaggaagcctcccgccaaacagatgagggaggaggaggggagaggccggagagagaagcggctttcgggaaggaaagtgtgatctaggaggtggaatagtcctctccaaactttgacctgagaatgaccctctatttggatttggattacacaaagtttaacgttttttggaaaaatcctacctaggtaatgtgtagttctcaatgcatcatgtcaggcagcttatgatgccaatttgtcccatggtaagttttttttttatctctatgggtgcgtagtaggtgtatgtgtttgcggggtacctgcccgggcggccgctaaggg

SEQ ID NO: 21684 - DNA, 370 bp, Homo sapiens
  misc_feature 1, 2, 3, 370: n = A,T,C or G
nnngcgcgggtgctaatttcattatcaatggggatgctaaaatacacttggaaactatttctctgaattccaagagctgaaatcttagatttgatgtagtattacgcgaacaactaccaaaatagtaaacattgctgaagcccattcaataatggagtgctcttcgggtgctgaatttaagcgggcattttaaggttctgtggctcctcggccacaatgggtgatgtcactgatagaacgaagctgagtttccaagggtttggggctgtgcaagagtaaacactagagcttgagttgttatccagctggcaagcacggaagtctttgaagaatgtaatgtaaaaagggaaaagaatgtaaagctttttgn

SEQ ID NO: 21685 - DNA, 472 bp, Homo sapiens
  misc_feature 1, 6, 472: n = A,T,C or G
ncaaanacgtgctacgtcactgtgcgatcgggttgtgcttagcttggggtctcctggccccttgacgcgtcaggttgctgtacccctgcatcggatgcgctgtaccctgcgctggctccgtgaaccttagggacaacaccgggacacccgcgaggccggaaaatggactcagtggcttttgaggatgtgtctgtgagcttcagccaggaggagtgggctctgctggctccttcacagaagaaactctacagagatgtgatgcaggaaacattcaagaacctggcatctataggggaaaaatgggaagacccgaatgttgaagatcaacacaaaaaccaaggacgaaatctaagaagccatacgggagagagactctgtgaaggtaaagaaggtagtcaatgtgcagaaaacttcagtcccaatctcagtgtgacgaagaagactgccggagtaaaaccatatgagtgtaccn

SEQ ID NO: 21686 - DNA, 326 bp, Homo sapiens
  misc_feature 1, 2, 322, 323, 324, 325, 326: n = A,T,C or G
nnattgggggcacttttatttacagccaaggaaaaaagaaaactaccttctatttaaaatgggaaagcttgtttgtatgaaaacaaatatttcatcatcacttattttctatactgttggcaactaagttttacatttttcattttcaacagagatttgaattttaatgtcccagaaatataaagaagatggctttaaaatgtcctatatgttggcagtcctaccctgaaaacttttttggcttatctttggttctgagctacagtcttcgcagagactaaattagtgactggccaccataaaaaaattgcccctcctggcnnnnn

SEQ ID NO: 21687 - DNA, 6531 bp, Homo sapiens
gcgtccgatcttgggcccggcgcgcagacccgcggagtttcccgtgccgacgccccggggccacttccagtgcggagtagcggaggcgtgggggcctcgaggggctggcgcggcccagcggtcgggccagggtcgtgccgccggcgggtcgggccgggcaatgcctcgcgggcgcaatgaatccgcggcaggggtattccctcagcggatactacacccatccatttcaaggctatgagcacagacagctcagataccagcagcctgggccaggatcttcccccagtagtttcctgcttaagcaaatagaatttctcaaggggcagctcccagaagcaccggtgattggaaagcagacaccgtcactgccaccttccctcccaggactccggccaaggtttccagtactacttgcctccagtaccagaggcaggcaagtggacatcaggggtgtccccaggggcgtgcatctcggaagtcaggggctccagagagggttccagcatccttcaccacgtggcaggagtctgccacagagaggtgttgattgcctttcctcacatttccaggaactgagtatctaccaagatcaggaacaaaggatcttaaagttcctggaagagcttggggaagggaaggccaccacagcacatgatctgtctgggaaacttgggactccgaagaaagaaatcaatcgagttttatactccctggcaaagaagggcaagctacagaaagaggcaggaacaccccctttgtggaaaatcgcggtctccactcaggcttggaaccagcacagcggagtggtaagaccagacggtcatagccaaggagccccaaactcagacccgagtttggaaccggaagacagaaactccacatctgtctcagaagatcttcttgagccttttattgcagtctcagctcaggcttggaaccagcacagcggagtggtaagaccagacagtcatagccaaggatccccaaactcagacccaggtttggaacctgaagacagcaactccacatctgccttggaagatcctcttgagtttttagacatggccgagatcaaggagaaaatctgcgactatctcttcaatgtgtctgactcctctgccctgaatttggctaaaaatattggccttaccaaggcccgagatataaatgctgtgctaattgacatggaaaggcagggggatgtctatagacaagggacaacccctcccatatggcatttgacagacaagaagcgagagaggatgcaaatcaagagaaatacgaacagtgttcctgaaaccgctacagctgcaatccctgagaccagaagaaacgcagagttcctcacctgtaatatacccacatcaaatgcctcaaataacatggtaaccacagaaaaagtggagaatgggcaggaacctgtcataaagttagaaaacaggcaagaggccagaccagaaccagcaagactgaaaccacctgttcattacaatggcccctcaaaagcagggtatgttgactttgaaaatggccagtgggccacagatgacatcccagatgacttgaatagtatccgcgcagcaccaggtgagtttcgagccatcatggagatgccctccttctacagtcatggcttgccacggtgttcaccctacaagaaactgacagagtgccagctgaagaaccccatcagcgggctgttagaatatgcccagttcgctagtcaaacctgtgagttcaacatgatagagcagagtggaccaccccatgaacctcgatttaaattccaggttgtcatcaatggccgagagtttcccccagctgaagctggaagcaagaaagtggccaagcaggatgcagctatgaaagccatgacaattctgctagaggaagccaaagccaaggacagtggaaaatcagaagaatcatcccactattccacagagaaagaatcagagaagactgcagagtcccagacccccaccccttcagccacatccttcttttctgggaagagccccgtcaccacactgcttgagtgtatgcacaaattggggaactcctgcgaattccgtctcctgtccaaagaaggccctgcccatgaacccaagttccaatactgtgttgcagtgggagcccaaactttccccagtgtgagtgctcccagcaagaaagtggcaaagcagatggccgcagaggaagccatgaaggccctgcatggggaggcgaccaactccatggcttctgataaccagcctgaaggtatgatctcagagtcacttgataacttggaatccatgatgcccaacaaggtcaggaagattggcgagctcgtgagatacctgaacaccaaccctgtgggtggcctttggagtacgcccgctcccatggctttgctgctgaattcaagttggtcgaccagtccggacctcctcacgagcccaagttcgtttaccaagcaaaagttgggggtcgctggttcccagccgtctgcgcacacagcaagaagcaaggcaagcaggaagcagcagatgcggctctccgtgtcttgattggggagaacgagaaggcagaacgcatgggtttcacagagctccctctcactggcagcaccttccatgaccagatagccatgctgagccaccggtgcttcaacactctgactaacagcttccagccctccttgctcggccgcaagattctggccgccatcattatgaaaaaagactctgaggacatgggtgtcgtcgtcagcttgggaacagggaatcgctgtgtgaaaggagattctctcagcctaaaaggagaaactgtcaatgactgccatgcagaaataatctcccggagaggcttcatcaggtttctctacagtgagttaatgaaatacaactcccagactgcgaaggatagtatatttgaacctgctaagggaggagaaaagctccaaataaaaaagactgtgtcattccatctgtatatcagcactgctccgtgtggagatggcgccctctttgacaagtcctgcagcgaccgtgctatggaaagcacagaatcccgccactaccctgtcttcgagaatcccaaacaaggaaagctccgcaccaaggtggagaacggagaaggcacaatccctgtggaatccagtgacattgtgcctacgtgggatggcattcggctcggggagagactccgtaccatgtcctgtagtgacaaaatcctacgctggaacgtgctgggcctgcaaggggcactgttgacccacttcctgcagcccatttatctcaaatctgtcacattgggttaccttttcagccaagggcatctgacccgtgctatttgctgtcgtgtgacaagagatgggagtgcatttgaggatggactacgacatccctttattgtcaaccaccccaaggttggcagagtcagcatatatgattccaaaaggcaatccgggaagactaaggagacaagcgtcaactggtgtctggctgatggctatgacctggagatcctggacggtaccagaggcactgtggatgggccacggaatgaattgtcccgggtctccaaaaagaacatttttcttctatttaagaagctctgctccttccgttaccgcagggatctactgagactctcctatggtgaggccaagaaagctgcccgtgactacgagacggccaagaactacttcaaaaaaggcctgaaggatatgggctatgggaactggattagcaaaccccaggaggaaaagaacttttatctctgcccagtatagtatgctccagtgacagatggattagggtgtgtcatactagggtgtgagagaggtaggtcgtagcattcctcatcacatggtcaggggatttttttttctcctttttttttctttttaagccataattggtgatactgaaaactttgggttcccatttatcctgctttctttgggattgctaggcaaggtctggccaggccccccttttttcccccaagtgaagaggcagaaacctaagaagttatcttttctttctacccaaagcatacatagtcactgagcacctgcggtccatttcctcttaaaagttttgttttgatttgtttccatttcctttccctttgtgtttgctacactgacctcttgcggtcttgattaggtttcagtcaactctggatcatgtcagggactgataatttcatttgtggattacgcagacccctctacttcccctctttcccttctgagattctttccttgtgatctgaatgtctccttttccccctcagagggcaaagaggtgaacataaaggatttggtgaaacatttgtaagggtaggagttgaaaactgcagttcccagtgccacggaagtgtgattggagcctgcagataatgctcagccatcctcccatcctgcactttagccagctgcagggcgggcaaggcaaggaaagctgcttccctggaagtgtatcactttctccggcagctgggaagtctagaaccagccagactgggttaagggagctgctcaagcaatagcagaggtttcacccggcaggatgacacagaccacttcccagggagcacgggcatgccttggaatattgccaagcttccagctgcctcttctcttaaagcattcctaggaatattttccccgccaatgctgggcgtacaccctagccaacgggacaaatcctagagggtataaaatcatctctgctcagataatcatgacttagcaagaataagggcaaaaaatcctgttggcttaacgtcactgttccacccggtgtaatatctctcatgacagtgacaccaagggaagttgactaagtcacatgtaaattaggagtgttttaaagaatgccatagatgttgattcttaactgctacagataacctgtaattgagcagatttaaaattcaggcatacttttccatttatccaagtgctttcatttttccagatggcttcagaagtaggctcgtgggcagggcgcagacctgatctttatagggttgacatagaaagcagtagttgtgggtgaaagggcaggttgtcttcaaactctgtgaggtagaatcctttgtctatacctccatgaacattgactcgtgtgttcagagcctttggcctctctgtggagtctggctctctggctcctgtgcattctttgaatagtcactcgtaaaaactgtcagtgcttgaaactgtttcctttactcatgttgaagggactttgttggcttttagagtgttggtcatgactccaagagcagagcagggaagagcccaagcatagacttggtgccgtggtgatggctgcagtccagttttgtgatgctgcttttacgtgtccctcgataacagtcagctagacacactcaggaggactactgaggctctgcgaccttcaggagctgagcctgcctctctcctttagatgacagaccttcatctgggaacgtgctgagccagcaccctcagatgatttccctccaaactgctgactaggtcatcctctgtctggtagagacattcacatctttgcttttattctatgctctctgtacttttgaccaaaaattgaccaaagtaagaaaatgcaagttctaaaaatagactaaggatgcctttgcagaacaccaaagcatcccaaggaactggtagggaagtggcgcctgtctcctggagtggaagaggcctgctccctggctctgggtctgctgggggcacagtaaatcagtcttggcacccacatccagggcagagaggtctgtggttctcagcatcagaaggcagcgcagcccctctcctcttcaggctacagggttgtcacctgctgagtcctcaggttgtttggcctctctggtccatcttgggcattaggttctccagcagagctctggccagctgcctcttctttaactgggaacacaggctctcacaagatcagaacccccactcacccccaagatcttatctagcaagcctgtagtattcagtttctgttgtaggaagagagcgaggcatccctgaattccacgcatctgctggaaacgagccgtgtcagatcgcacatccctgcgcccccatgcccccatgcccctctgagtcacacaggacagaggaggcagagcttctgcccactgttatcttcactttctttgtccagtcttttgtttttaataagcagtgaccctccctactcttctttttaatgatttttgtagttgatttgtctgaactgtggctactgtgcattccttgaataatcacttgtaaaaattgtcagtgcttgaagctgtttcctttactcacattgaagggacttcgttggttttttggagtcttggttgtgactccaagagcagagtgaggaagacccccaagcatagactcgggtactgtgatgatggctgcagtccagttttatgattctgcttttatgtgtcccttgataacagtgacttaacaatatacattcctcataaataaaaaaaaaacaagaatctgaattctta

SEQ ID NO: 21688 - DNA, 2474 bp, Homo sapiens
gctaaatctttatatacagaaatatcagtacttgaacaaattcaaagcacatgggtttatgaacccttgctccttgcatggtcattaggttcaaattataactgatttacattttcagctatatttacttttaaatgcttgagtttcccattttaaaatctaaactagacatcttaatcggtgaaagtgtttaaactacttattgttggtaggcacatcgtgtcaagtgaagtagttttataggtatgggttttttctcccccttcaccagggtgggtggaataagttgatttggccaatgtgtaatatttaaactgttctgtaaaataagtgtctggccatttggtatgatttctgtgtgtgaaaggtcccaaaatcaaaatggtacatccataatcagccaccatttaacccttccttgttctaaaacaaaaaccaaagggcgctggttggtagggtgaggtgggggagtattttaatttttggaatttgggaagcagacagctttactttgtaaggttggaacagcagcactatacatgaaatataaaccaaaaacctttactgtttctaaatttcctagattgctattatttggttgtaagttgagtattccacagaaagtggtaattatctcttctctcttcctccattagaaaattaggtaaataatggattcctataatgggagcatcaccacttattaaaacacacatagaatgatgaattaaaaaagttttctaggattgtcttttattctgccacatttattgataaacagtgaaggaatttttaaaaaatttttaagaattgtttgtcacgtcatttttagaaatgttctacctgtatatggtaatgtccagttttaaaaatattggacatcttcaatcttaaacatttctatttagctgattggttctcacatatacttctaaaagaaacttttatgttataagagttactttttggataagatttattaatctcagttacctactattctgacattttaggaaggaggtaattgtttttaatgatggataaacttgtgctggtgttttggatcttatgatgctgagcatgttctgcactggtgctaatgtctaatataattttatatttacacacatacgtgctacccagagattaatttagtccatatgaactattgacccattgttcattgagacagcaacatacgcactcctaaatcagtgtgtttagacttttcaagtatctaactcatttccaaacatgtaccatgttttataaacctcttgatttccagcaacatactatagaaaacacctgctactcaaaacacaacttctcagtgtcatccattgctgtcgtgagagacaacatagcaatatctggtatgttgcaagctttcaagatagcctgaacttaaaaagttggtgcattagttgtatctgatggatataaatttgcctcctagttcactttgtgtcaagagctaaaactgtgaacctaactttctcttattggtgggtaataactgaaaataaagatttattttcatgctcacttcttaaaagtcataaaaacaatcaaataggatcatgtttattgtcatgtgtttcctggtttctgacctgtgtgcacacccctgtgtgtttataatttttaaattgaattttatatggggtttttatttgctaaaaaccaggctgttgaatcacatttgggaagggtacttatcttaatgactaatgacttaattgggaaagttgaattcttgtaaaatacaaaatccaaggacttcttggatttaatctgattgtcacttcttagcagatcacttttttgataatgaaagttaagcatactgaatgctacttttgattgacaaactggctataatagtctaggggaaaaatccctaaacagataaagattcctaaagtaatggtggcagctgatgtttcagtgaacttttatcttgatgcgtttaaatggaagtaatgccagacctgagatttttaaggcatttttacagcttgtattgaaatgattggagacatggtttctttattagctattttgagacctgtggagttaagcaagacttttaaaaattggcaccatatacatctagttagttcctttactcttatttttttaaataaaagtagtacacatcatttccagggttgtaaatatatttggggcttgtttttggtatggatttaaaaggaggatattaagtattcattctaattttgttatttttctagttgccagagatggttgcactgaaatagaacagggagttgcatacaaagcctaaatgtgtattggatttcgaaaatactaggttggtgcaattggttttgtaccaacctaacatgtttttaggaaagtaccattatgtggaaggaaacaacaggtgttaaaaggttcaaagggatgagaaataggaagttactagaacctaactgatgttgacctta

SEQ ID NO: 21689 - DNA, 2013 bp, Homo sapiens
  misc_feature 1, 2, 3, 1965, 2011, 2012, 2013: n = A,T,C or G
nnnagaagaggtgcgaaaatggccctggaaaaagggcaggggcgcctttgagattccccccacagtgtaacggtgtgttgaacaaacaccggctgacagcctctcaccaggtagacccgagagcatttgaatccccaggggaaggccaccaccgctcagtcaaagaactccccggacacatcgatcaaccaggagacgctttccctcacaaccttgaagccaacagtcatcatgatgtacaacgagcaaggcataaaataaaacactgggaagcaggaagagtgacaagaaaatgacagggagcaaggagggtgcaacccagttcccatctggcaagtgcctaaagccccgctcagcctctgttccagctgggtgatgtttaggcaaagtcactaccccgccccactactgtgccccaagacagagtctgtggtataaactaactgtgctgactttgggcaataaaggacctagaattctaagtactgaattaaaaatacagaacctactaacactactgtattaacaagctgactcctataatcttttggagatgacagatgatactggtttttaaaatacccaatcacatatatgcattcaagaaaatattttgtctttatttttattacaagtgcgctagctcccatttcctcagtgctctttagcaatgagtttttatgttaaacacttccaactgtcagtattaccatgaaatcaacattagaaaataaggtagaaaactgagtgttttgcttaaaaaataaaaaaggattaaatagctgttgtatccaaacatcacgttctgcttccatctctacattccactttccccattcttggagattaaaaaaacagggttagaaactttaatatctgacagactacaaagggcaaagacgtggcacatggccagtgccacacctacctggttgccacagcattctgaaacagaccacactttcaggaaaatgactaagtacttgaaagggtcagtatgttctgtgttttcagatgaggaagtctgatgaccgcaaaacgctcttcagacgcgccgaccttggtggcttttggagagatgcatccgagctcgctgctggcaaactctcaagtccaagtgtgcggctccctccggaaagaggcctcacggatgggtggttccattttctctgcgctgtgtagctcctacttacagctgacgattctcgacttcggacggcctccctggagatgtcacacgccgcccatgcacgttcaagacgactggcagctccgcagaggccttcgctgctgggaacacagccgtgacagtgtcggaactcatctacctcaacgctgaatggcaggctccaagttgaaaagtttctgttttaatgttttgctggatttaaggttaacctctaatacttatcaaaatagttacgtgggtaacaacagacgctttcattcccctatactgaccactaaaacaaaaattccaatgttttttccttttgttatgagacggttttcaacaatttcagtgttgaaataggatttatttaaaatatttctttgcttaaaaaaaccaaaaaatttaaaagtttggctttcagcacatatccaggccactgtaatggccttcagaaatattaaaatcgtaaacatcaatgaacactctaagtcttccttaaacgtaatatgagaaggtccagtctagtactctttaaggcaaagttgtgtcagttctcattattttgacattttgtagtgtttacaatttaagagatcaacgtaacattcccctaaatagctgttgtaataagcatcaccattacttcaacactgtaatactgtgtaccatgaggagaagaggtctgttaattctgcattgcatagaaataaaattcaactaaaataaaactaaaaaattctactaaaagcctgtcataaaaagaatggtaacaactttctgctttaggttcnatggaagttagggaccggctcctccaattggacgctcacatcacannn

SEQ ID NO: 21690 - DNA, 709 bp, Homo sapiens
  misc_feature 1, 2, 706, 707, 708, 709: n = A,T,C or G
nnccttaattaaattattctcccccccccgagtgtgaagggaaggctaaggacgcatcggtgctggagagttgagaatatgccttcccctccacccccaacccagtcaccttatttgaaaaaaaattaaaaaacaccttttatttaaaaacctaaccctggaagtttgctcgctgcctgaaaatcatatgcgtggtttttcctgtttcctgctctgtagctgacatcaggggagcaacgtgaacacaggaaaatggaaatcaacatttgaaacttttaaatggaagctttattggggttccacatatggaaaactgcaaatagcagaagtatgtgactcaataaattattctggagtgaccacatcctctaactgcctcccaggacaagacggagaatgtgaacaatgctcctgaaggcccctttccctcaaagaatcactgcaattgaaggaaaaatgctccatgtcccctctgccagttggtgtttatcaaaggacaacggaggaagagagacaaagtgcctggatgtgtgtgttaatcaagagttgtcaggaccctgcctctaaaagaaagcgctaaaatgatgcttttgacaagacttttctcaaagtggatgcagtctaagggttggaaaacaaggcccaatcaggctaggtctgacttgtcgcctgcttttgtaaataaagtttttattggctcacagannnn

SEQ ID NO: 21691 - DNA, 569 bp, Homo sapiens
  misc_feature 1, 2, 3, 4, 5, 6, 7: n = A,T,C or G
nnnnnnnggtgctgataaatattgatgaattctgctctctgctctctatggttgtcaacactgcagagttgaggcctcatatctcacctgcactgctgcaacagcttactggtcccttgctcccagccttctcctcttcagtccatcgtccacacagcactggggaaggggagccacttgaaacaaaagtcaacaactggttgtagttcataaacacagagctgtttgtgtcccctgtatctggaatgccattatgacccactacattttttctttcctacccctcttaaaactcagttcaggtagcagctccactaggaagccttggctgaccataatcccattcaattccatttcacctcttcgcaggcagtctggggttagggaccctttctctttgctccccaaaataaactggttatctctactattggatttacaacattgtattataatcttctccatgtgtgccttctctagtagaatgtgagctctttgaggccaaggtctatttaatttgtttgaaaaattcattgttatctcctcaaagcctagcacatagtaggtcc

SEQ ID NO: 21692 - DNA, 2066 bp, Homo sapiens
  misc_feature 2064, 2065, 2066: n = A,T,C or G
tatagggaatttggccctcgaggccaagaattcggcacgaggactcaaaggtagatgtaatttttacacctatgagtatttgtccaatttctgtctcttcctcaccattgggtatctattctttatatgtaaataagataaggtcatctgatagccttattcagtcttcatcattttcatcatgttcctatgtagattattggacatttattgtagcactacataactgattataaaaatctgtaaatgaattagcactttcatattgaaacaagcctgctagcctatgtataaaatagcaaaatgtttgctgtttataaaaagatgtaatggggtggggggcaggggtaatttcaagttattaatttaaaaatgaactagcaatttgtacctggtgactttgtggtgcactcacctctgatagtgacttgaattcggtatgtaaaaaggggttagtggtatttcattgctgctaaaaatgacaactccctctgtgtcctgtttttcttaaagctgtcagtgtacaagtgggtatttgaataccagaccttactgtaaaaaataaaaaaggtggtatctagagcatgtaaattggatataaagttctgctcttaaagagttgatctaagagtatggctaaacatctatatatgcaatctattaaaagaacttaattcggctattatgtcttgatttgattgcagtttttcctaattataacaaatttttcctcattggctgtttttaatcctgtgcctagaaggagtacaaaatgcaaaatttacaaaatggatatttagcacttaccactccccttttccccatctcttctaccgtctgtgatcgggtatcctgatctgactagataagctgagggacatggttcctcaaaacatatgatccactctcaacaagccgcaaagaaacgtcagagtggtgtgtccttttctaatgtgtgaaaaccgttgatctacagcgcgagagcaacatggcttgttatatgtcacaatttcaaattgaaagcaacatcttaatggattcaaaactattacaagctgttgtctaaaacaggtgagaaaaaaatttataactgtaaaaacaaatgcacatattgatatttaaaatgcgtaattaagaaaacccattgttgttgtgtttttcttgtataccaataattaagccactactgttggcactgtttggttttctattttaacactgaaggagtgaaagtatttcctatatttatgaatttactactaaaatcttggcaaaaaaagaaaaaaattgtctaacgtgtgtgggtgaaaactgttaatcaagtgtttctactcccccccgaaaatcccctgaaagttggacaccaactgtataccctaggttgcttaaagggatttcactattatataaagtcaataaaaatgaagtagttgtatatatgcaacattgtgtacagaggggaaataatgaatagtattaaagaaacattctcgtcttcctttacctttaatcccctaatacctagtctactttttaaattttcagacttcactgctttttgaattcataattctaattttcacattattgttaatggaaaatcatatctaataaaggttttagttattcccatgcacagtatgaaaattctcatttgctgaggttttgtttcaagaaaatgtattggcatgtctttgagaacatgttttattgtctcctgtgtcatataatccaaactaatctccgtttacagactttaacttgaaattagaccttataattaaactatttaaatagtgttcaaatgatagtttctaatgcatcaaatatatacctcagtttcatgattcttaacattataattgggtagatcaggaatttaacgtgttagttaaagagggcggattttggaactttgcgacgtttacaacattctcgtgggaggaaaagggaggttttttcaaccgcttccaagtatacctaatttagggcaaacatgatgggcaactgtttcggcaaacaacgaaggcttgaaccaatgaaagatggaaaccagtatcgaannn

SEQ ID NO: 21693 - DNA, 1025 bp, Homo sapiens
  misc_feature 1, 2, 3, 4, 1023, 1024, 1025: n = A,T,C or G
nnnncctcccggggtcggaggccgattcgccgtgtggcgggttcgagtcccgcctcctgactctggcctctagtccctgagtcccgggcgggctgcattcgtcggggaaacctctcctcgaccaggggcacctctactcgaccaggggcagacggggtactttgggcttcatcatggaggactacctgcagggttgtcgagctgctctgcaggagtcccgacctctacatgttgtgctgggaaatgaagcctgtgatttggactccacagtgtctgctcttgccctggctttttacctagcaaagacaactgaggctgaggaagtctttgtgccagttttaaatataaaacgttctgaactacctctgcgaggtgacattgtcttctttcttcagaaggttcatattccagagagtatcttgattttgcgggatgagattgacctccatgcattataccaggctggcaactcaccctcatccttgtcgaccatcatatcttatccaagactggaccacttgagcagatgctgagaaaggagcagaagactatctatagacaaggcgtcaaggtggccattagtgcaatctatatggcatcggcgatctgtgaagtcctggaacggctcccatctccagcctggaagctgagccctggctcaagtaaccacgctaacttcatggctaatcttgacagggcaaaccaggtttctcacgagagaaacttctggccctggaacaggaaggcctggcagggaaatctgggagacagaaagaaccctacaggacagctgacgaaagagaatgtgtcagggacaaaggtggcaaggacatgcaagagaaagaaacaggcaacaatcgacggacaaaaaagcagaccccacggaccacagacacacaagggagacagaacacaacacgggagcccacctcgagggacgagcaacgggcgacgtagagcaaaaagagcatacaagcgcatgaaggaatagtacaacaacagcggaggcgcacacaacaacgnnn

SEQ ID NO: 21694 - DNA, 894 bp, Homo sapiens
  misc_feature 1, 673, 675, 888, 889, 890, 891, 892, 893, 894: n = A,T,C or G
nactgaaggagagcccatttagatgaggagaaaaggtgaaagcccctacctattggaggaagatcttcagcatcttttgttgctactttgacctcaagcccttcatcccactttggagaatggttttgtatagcctctgaagtcaggatctcaggaagtcctgaggagggactctggaataaaaacccttgcctctttccaggccaatttctcgtgttggaaagtcagaagacccagtcttggctttactttcttggggtgaaagagaaatagggtaggctcagaacatgctcatgttattaaggcagcagtccccctggcctttgaggaagtacttatgagatgggtgtcactgtctgaaggttctccaaattgtctgtgaactgcttaggtaggagtgcactgcagtttcctgctagttcccacctgttgtgccccaactttgcttctagatctctggggtgggaggagtgaccttctcaatggaaggggcctccttggtctggagaagagatctgaggtcccaccttagaaatgaaagggaaaccctcagggagccatgacccagggaccttcacactcccccatgtttgttacttgttatccctcccccaacctgcctctgttttccccagagtgattagcagtaaaacccttcaatgaaaaaaaaaananatgcatgcggccgcatttcgagctcacttggccaattcgcctatagggggtccgattacaattcactgggcccgcgtttacaaccgtcggattgggaaaacccctggcgtaccccaattaaatcgcctggaagacatccccctttcgcccagttgggtaataaccaggcccaaccgatcgcccttcccaacattggccaaccttgcgaatggnnnnnnn

SEQ ID NO: 21695 - DNA, 396 bp, Homo sapiens
atattattccgataccctttaactatatcccagctacaggtgtggagaatggaaagtctggacgtaaagtggggatgccggttatttctatagaagaatttcgaaggctggggacacatgttaagggggcagaacttgtggaaggctgtgatgggattttgggagacaactttcggcccactcaacctcttagtgacagagtcattagagctgcatttcagtagccaaagaggacaggaacaagtctgtcttcatgagggaggaagacaatggtcctataatgcccttggataagaaaaggaaacttttgagctgcaccttcagtttatcctcaaagcctgcgttgtttgtcttcatctaatccagctttgatggacatctgtgatggttgcctgt

SEQ ID NO: 21696 - DNA, 510 bp, Homo sapiens
  misc_feature 502, 503, 504, 505, 506, 507, 508, 509, 510: n = A,T,C or G
acgcggggatatttgctaagagcaccatgcgcgcagcagccatctccactccaaagttagacaaaatgccaggaatgttcttctctgctaacccaaaggaattgaaaggaaccactcattcacttctagacgacaaaatgcaaaaaaggaggccaaagactttgtaagtttgttcagagtctcactttgtgaattttaacaagttatctttaatggcagaaggattgagaatgaatggaagagagtgtgagcatttagtttagccagatcagaggagttaattgcctgttgtgagtaataagtaatattcagctgcattaaaaaataaatcttgatatggcattaaattgggttggagtttttctctacacaggctcataaaaatgggttctatagcaaaatgttgtatcaaccatttttagtattgccttattccttagagaaatttattctatggctttttacaaattaaatgaattctgaagaaatatgaatattcacnnnnnnnnn

SEQ ID NO: 21697 - DNA, 2749 bp, Homo sapiens
  misc_feature 1, 2728, 2729, 2730, 2731, 2732, 2733, 2734, 2735, 2736,2737, 2738, 2739, 2740, 2741, 2742, 2743, 2744, 2745, 2746,2747, 2748, 2749: n = A,T,C or G
nccacccacgcgtccggaaggaattacaaattctgtaatgcctgaatgtaagaatcctttcaagttaatgattggatcatcaaatgccatgggaaggctatatgtacaagaactgcctggaagccaacaacaagaactccaccctgtctacccccgacagagattgggcagcagtgaacatggacagaaatctccattccgtggcagccatggaggcctgcccagcccagcgtcatcaggttcccagatatatggagatggttcaatctctccaaggactgacccacttggaagtcctgatgttttcacaagaagtaatcctggttttcatggagctcccaattctagtcctattcacctgaataggactcctctttctccaccttcagtaatgctacatggttctcctgtacagtcatcctgtgcaatggctggaaggactaatatacctctttccccaaccttgactacaaagagtccagtaatgaaaaaaccaatgtgtaatttttcaactaatatggaaataccacgagcaatgttccaccacaaaccaccccaaggcccacctccccctcctccaccttcttgtgctcttcagaaaaagccattaacatctgagaaagatccacttggcattcttgaccctattcctagtaaaccagtgaatcagaaccctgttatcattaatccaaccagtttccattcaaatgtccactctcaggtacctatgatgaatgtaagcatgcctcctgctgttgttcctttgccaagtaatctcccattgccaactgtaaaacctggtcacatgaatcatgggagtcatgtacaaagagttcagcattcagcttcaacctccctgtccccttctccagtgacatcccccgtgcacatgatggggactggaattggaaggattgaggcatcgccccaaagatcacgctcatcttccacatcatcagatcatggaaatttcatgatgccacctgtaggaccccaggccacttctagtggtattaaggttccacccaggtcaccaaggtcaacaatagggtccccaaggccatcaatgccatcaagcccttctaccaagtccgatggacatcatcagtacaaggatatccctaacccattaattgctggaataagtaatgtactaaataccccaagcagtgcagcttttcctactgcatctgccggaagtagttctgtaaagagtcagcctggtttgctgggaatgcctttaaatcagatcttgaaccagcacaatgctgcctcctttccagcaagtagtttactctcagcagcagccaaagcacagctagcaaatcaaaacaaacttgctggtaacaacagtagcagcagtagcaattctggagctgttgccggcagtggcaacactgaaggacatagcactttaaacaccatgttccctcctactgccaacatgcttctcccaacaggtgaagggcaaagtggtcgagcagcactaagagataagctgatgtctcagcaaaaagacgcattgcggaaaagaaaacaaccacctacgacagtgttgagtttgctcagacagtctcaaatggatagttctgcagttcctaaacctggacctgacttgctaaggaagcagggtcagggttcatttcccatcagttcaatgtctcagttactacagtctatgagttgtcaaagctctcacttgagtagcaatagtaccccgggttgtggggcctcaaatactgctttgccttgctctgctaaccagctgcattttacagatcccagtatgaactctagtgttcttcagaacatacctttaagaggggaagccgtgcactgccacaatgcaaacactaactttgttcacagtaacagtccagtccccaaccaccatcttgcaggtttaataaatcagattcaggctagcgggaactgtgggatgctcagtcagtcgggcatggctttaggaaattccttacatcccaatccacctcagtcaagaatttcaacgtcctccactccagtgataccaaacagcattgttagcagctataatcaaacaagttctgaagcaggtatggttttattagaaaaaagtacccaaaggtactaaacttttctacttttttaaaaaatttgtaccaaaatatttattatgataagaaatgatcctttccccattgtgaaattctcttcatttctttagtatttataattttatttacagaatgctagggatttgtctattgggaagattaacagctaagaggatttcatgtgtttccattatttgttgtcaatctgtgtcattttgaatattgttcgactttcacttggttttataaccattggactccaaactgcaaaataagccatacgaggcagggtttcctggtttgtgagacatgtccttggtctatgccaatataaaagccatctccctagcttttgtttgtattcaggtaaatgaagtttatcttggaaaaatccaaaaaggcaaaaataaatggattttttttcttgctgctgaacagaagtaggtgaatggataggaaaaggtaactagaagttgtacgaagtagaaggctgtcttctaatgtgttttcttatcctagtttgctatccttattatttgtttgagaaaactcaaaaatggatattggctactcccttttaaaaaaaaagctaataatttaagctttctaataaaaaaaaggcttgaaaaccnnnnnnnnnnnnnnnnnnnnnn

SEQ ID NO: 21698 - DNA, 1078 bp, Homo sapiens
  misc_feature 1: n = A,T,C or G
nacgactttagatatgtcatctcactgcctttgggcttccaagatttttgatgaggaatcggctgttaactcttgtcaaaaattctgtgtgacgagttgcttctctcttgctgctttcaaaatcctgtcttcaggttttgacaatcctaatataacatgtcttggtgtggatctgagttcatcctgcttggattttattgagctttttggatgtgtagattcatgtctttcatcagatttgggaaattttctatcattatttctttaaatattctttctgtcccttttctttttctgcgattcctatatgagtatatgagtatgaatatactaatgaatataataactatatgaatatatgagtacattagtatgcttgatgatgtctcacagctctctcaggttttttttcctaaatattttttttctttcttctcctttggataatttcaattattttctcttcaaattcactgttctcttcttttgcatgcccaaatctttgttgaatccctctagtgggttttccatttcagggattatactttttagctctagaatttgtttggttcctttttataatttctatctctttattgatattctcattttgttcatgcatggttttcctgatttcctttagttcttcgtccatgttttcctttagctcgctgaacatacttaagatagttgatttaatgtctttgggtaataattccaatgtctggacttcctcaaggatggtgcctgtcaattttttttcctgtgaatggaccatggttttctatttctttttatgttttgtaattttttgttgagaactggacattatgagtattacattgtggtaactgagaatctaattctgtcatgcctcagagattgctgatttttgcttattgagggctggagccaactatttgtgacttttccaactatttttgtgaagtgtgtattctttgcagtatggggtcagtgaagtttctgttgtgatatctctgtggttaaccagtgacctaagatttccttaaatatctggcttgccaaaaggaggaataaagaaaaaaaaaaaataggt

SEQ ID NO: 21699 - DNA, 3877 bp, Homo sapiens
  misc_feature 3769, 3770, 3771, 3877: n = A,T,C or G
gcgtccggcggacgcgaagcctggctgaggctgcgaagggcgagcggcgcagggaccccgcgggcgtctggggcttccgcggcgcccgcctctgctccctcccctcgggcgctgggtgccgaccggccggctggccggcgccgcctactgggaagatggcgctgcacttccagagtttggctgaattggaagtgttatgtactcatctctacatagggactgatcttacacaaagaatagaggctgagaaagcactcttggaacttattgacagtccagaatgtctcagcaagtgtcaacttttattagaacaaggaacaacatcctatgctcagctccttgcagcaacatgtctttcaaaacttgtcagccgagtcagtcctttacctgttgagcagaggatggacatcagaaactacattctgaattacgtggcatcacagcccaagctggctccctttgtcatccaagctcttattcaagtcattgctaaaatcactaagttggggtggtttgaggttcagaaagaccaatttgtcttcagagaaattattgctgatgtgaagaagtttctccagggtactgtggaacactgcataataggagtaataatcctttctgaattgactcaggaaatgaacctggttgattattctagaccttcagcaaaacacaggaaaatagctacctcatttcgtgatacttctctcaaagacgttttagtgctagcatgctctcttttaaaagaggtgtttgccaaacctttaaatcttcaggatcaatgtcagcaaaatctggtaatgcaggtcttgaaactggtccttaactgccttaactttgacttcattggcagttcagcagatgaatctgcagatgatctttgcacggtgcagattccaacaacttggagaacaattttcctggaaccagaaacattggatcttttcttcaatttgtatcattcacttccaccactactatctcagttagcactttcatgtttagttcagtttgcttcgacaagaaggtccttatttaacagtcctgaacgtgccaagtaccttggtaatttaattaagggagtaaaaaggatacttgaaaaccctcagggtttgtctgatccaggtaattatcatgaattttgtcgatttttggctcgtttaaagacaaattatcagctgggagaattagttatggtgaaggaatatcctgaagttattagattgattgctaattttaccattactagcctacagcactgggaatttgctcctaacagtgttcattatttattaactctgtggcaaaggatggtagcatctgttccttttgtgaaatcaactgaaccccacctattagacacttatgcaccagaaatcacgaaggcctttatcacttctcggttggactctgttgccatagttgtgagagatcacttagatgatccactggatgatactgccactgtgtttcagcagttggagcagttgtgcacggtcagcagatgtgaatatgaaaagacatgtgctcttcttgtgcagttattcgaccaaaatgcacagaattaccaaaaacttctgcatccatattctggtgtaactgtggacatcaccattcaggaaggacgtcttgcatggctggtatacttagttgggacagttgtaggaggaagattaacatataccagtacagatgagcatgatgctatggatggagaattatcctgtcgagtttttcagcttatatctttaatggataccggattgcctcgatgttgtaatgagaaaatagagcttgcaattctgtggttcttggatcagtttcgtaaaacatatgttggtgatcaacttcaaagaacctcaaaggtatatgctcgtatgtcagaagtcttaggaataacagatgacaaccacgttctagagacgttcatgacaaaaattgttacaaaccttaaatactggggaagatatgagcctgtaatttcaaggactcttcagttcctaaatgacctttctgttggttatatccttttaaaaaaacttgtgaagatagatgctgtgaaattcatgctaaaaaaccacacgagtgaacacttcccttttcttggcatcagtgacaatcatagtctcagcgacttcaggtgtcgaacaaccttctacacagcgctcactcgccttctgatggtagatctgggtgaagatgaggatgaatttgagaatttcatgctgcctcttacagttgcttttgaaacagtattacaaatattcaacaacaactttaaacaagaagatgtaaagcgtatgttgatcgggctggcaagagatcttcgagggattgcctttgcactgaacacaaagaccagctacaccatgctgtttgactggatgtacccaacgtaccttccccttcttcagaatgctgttgaacggtggtatggagagccaacatgtacaactcccatcttgaaacttatggcagaacttatgcaaaacagatcccagcgtttgaattttgatgtatcatctcctaatggaattcttctcttcagagaagctagtaaaatggtttgcacttatggtaatcagatcctgtcccttgggagcctctcaaaagatcagatttatccaatgaaactcaagggcatctccatctgctattcagctctcaagtctgccttgtgtggaaattatgtcagctttggcgtcttcaagttgtatggggacaaccattttgacaatgtactccaggcttttgtcaaaatgctgctgtcagtgtcccacagtgacttgctacaataccggaaactgagccagtcttattatccactcctggaatgtctcactcaggaccatatgagcttcatcatcaacttagagcctcctgtactcatgtatgttctcacatctatctcagagggactcactactcttgatacagttgtctcctccagctgctgtaccagtttagactacatcgtcacctacctcttcaagcacatagcaaaagagggcaagaagccacttcgatgcagagaggctacccaggctggtcagagactattacattttatgcagcaaaacccagatgtcctgcagcagatgatgtctgtcctcatgaacaccattgtctttgaagactgtcggaaccagtggtcagtatccaggcctctcctggggctcatcctgctcaatgagaagtatttcagtgaactgagagcaagtttgataaacagccagcccctccccaagcaggaggtccttgcccagtgcttcagaaacctaatggaaggagtggagcagaacctgtccgtcaagaacagagacaggttcacccaaaatctgtctgtattcagaagagatgtggcagaggcgttgcgcagtgatggcaacactgaaccatgcagtctcgacatgatgagctgacccgacttttctgaccatgtgcggagcagcctttatcaagagactcctgaaggtctgggtctcaggacagtgatgttggctagcccaggggaatgtatttttcaaaacatacaagcaacagcaaaagccctaacttcttatacgtctagcctaattataagaatttctaacagtaccagtgtaaattcagtcttttctctgaaaagcaaaggatgtgttttcagtctttctatcaaatattatctttgttctcctaatgctctgaaaggatgtagaaacaatatttaaccaaagaacgtaataaaccaggtttgcacctaagtgtaaaaaagaaaaaaaaaaaattnnnaaaaaaataaaaaaaaataaaaactcgagggggggcccgcaacccaattcgccctatagagagtcgtataacaattcactggccgccgtttaacaacgtccggacn

SEQ ID NO: 21700 - DNA, 703 bp, Homo sapiens
gtagagacagggtttcgccatgttgacgagactggtctcgaactcctggcctcaagtgatctgccgcctcagcttctcaaagtactgggattatataggcatgagccactgagcctggccctgaagcgtttttctcaaaggccctcagtgagataaattagatttggtatctcctgtcctgggccagggatctctctacaagagcccctgcccctctgttggaggcacagttttagaataaggaggaggagggagaagagaaaatgtaaaggagggagatctttcccaggccgcaccatttctgtcactcacatggacccaagataaaagaatggccaaaccctcacaacccctgatgtttgaagagttccaagttgaagggaaacaaagaagtgtttgatggtgccagagaggggctgctctccagaaagctaaaatttaatttcttttttcctctgagttctgtacgcggggcagtggtgtgatctcagctcactgcaacttccatgtcccaggttcaagcgattctcctgcctcagcctcctgagtagctgggactacaggcgccctgccaccatgcccagctagtttttgtatttttagtagagacagggtttcaccatattggccaggctggtctggaactcctgaccttaagtgacctgcccacctcggcctcccaaagtgctgagattacaggtgt

SEQ ID NO: 21701 - DNA, 418 bp, Homo sapiens
  misc_feature 412, 413, 414, 415, 416, 417, 418: n = A,T,C or G
accctgtaagagtaaagacttcaaagagggataaattaggaaatatatgtggagggatgatggttttggatatgtagaacttgaagctctgtgatggagatctctttggatcaagtagaaatgtgttggagctcagaggtaaaggctaaaatattaatttgggagtaagttacattaagtgaaaggtgaagctatggggaaggcgagaccccccaagggagaagtggttgtagatagaaacttataaaaaaatgcctttatttaaactttttcttgtattgatccagtgatatatgtaagcatggagcatggaattttttgaataaatcccacttgattaactattgttagctcatgtctcctacaaataaaatgaaaaggaaatcattcttcgtgtttgaatgccaatgannnnnnn

SEQ ID NO: 21702 - DNA, 1356 bp, Homo sapiens
  misc_feature 1, 2, 3, 4, 5, 6, 7, 8, 9, 10, 11, 1355, 1356: n = A,T,C or G
nnnnnnnnnnnccgtctgtatcatcattcgccttctttttcaaagtatgtcacccactcattttattattctacctatccgttttgtaatgtatttcgcctcccccgaagacacctacccatccgttcgtgctgacatacactagtatgtacccgccagcagaagaccatgacataaagagagatggcgaaactgaaacggattatttcttttgtcttcaaaacatctcatcaattatcactcaccattctacctggacttagaaaactccaccacattgtaactgacattatttaggagtgccaaatgagtaaacacccaatcctgcatctttagtcctccaaatctgatcaagaagttgagcaagttccaaactctgcctgctgtgtccactgctattaacacatttccatcacctcgaagtgtttccaggacatttgtcagaagctgctcatctctctgttttcttctaggctgtacatatgtagcattgaatgaatctgtgataagtagggaaggcctgcttagcatttccagggaacatccatttaaatggatctccctcttgtggttgaagtcaactgcataaacaatttcttcttctccatctttgactattttccatattgttccacctatcatatgaccagctggcagaggtgtgatagacaggccatgtcctttacctttcaaattcacaatctgagagaattttagctgctgtattttatcaaaggctgcatccacatcatctaatgtaaagagtgtaaaatcttctgtattgtgtcgagactgataaagatcatacatgaacatctgtcccattttataaacaggaatggttgcatagatagcacagttcagacccaactttccgacagcatacgggagggcaccaaggtggagaggatcagggtgagacaacagcactgcatcaatctggtgaacatgcttcctcagggaatcaataatatccatagaaaagtgctcatcccagccacagtccaataaaaatctaaactcatcaacttggagaagatagcaaagggcagattcttcttggaccccagaaagggtagttaatttgataatagacgtcattttttttggtccagaaacagcaagctagaagagttgatatcttagtcgtatatatgatgaaacaccaggaattctgaagagttctttattaatctcgtcaggcctcccccaacgccgtccacagcccttcccaacccctaggcgaatccaggttcaagacgtagaaaagccgatgctgggtcagcagcgccagggactaccggccggcagaagccccacagtggcagccgccatttgcggaccggacgcgtggnn

SEQ ID NO: 21703 - DNA, 462 bp, Homo sapiens
  misc_feature 462: n = A,T,C or G
accgcgcccgttcatagctcaagaccagatagctgcaggatttgaatcaatattttggtgggtaactatcagtaaaaacatagattggataaattacatctattataaccagcagcggtttattaactacactagagatgctgtcaaaggaatagctgaacagttagggcctactagccagatggcttgggaaaacagaatggccctagacatgatattagccaaaaaaggtggagtttgtgttatgatcaaaactcaatgttgtaccttcatcccaaacaatactgcccctagtgggagcataacaagggccttacaaggccttactgctttatccagtgaattagctaaaaattctggagtcaatgaccctttttcaggatggctagaaaggtggtttggtaaatgggaaaggaatcatagcctcaattcttacttctcttgcagccgtaataggtgtan

SEQ ID NO: 21704 - DNA, 682 bp, Homo sapiens
  misc_feature 1, 2, 3, 4, 5, 6, 7, 8, 9, 10, 11, 682: n = A,T,C or G
nnnnnnnnnnnagaaactctcaccatgcttaccgtccttcacatttcctatccccaaagcactttttgaatgttttcttagtttaattttgtacaagggagaattaaggcccacttttggcacattgaacctagtccatgtcctgcatgccctgcagctcccctctgccctccaatccattttctttatactggtggctttcgccttcctgttagtcattgctatttcatcatagcctccttttatccttcctacttcatttcttttcttccctcaagtttacgttgtttgttttttaattattttagaccaagatcactccatggatgaaatgacagctgtggtgaaaattgaaaaaggagttggtggcaataatgggggcaatggtaatggtggtggtgccttttcacaggctcgaagtagcagcacaggcagtagcagcagcactggaggaggagggcaggagtcccagccatcccctttggctctgctggcagcaacttgcagcagaattgagtcacccaatgagaacagcaacaactcccagggcccgagtcagtcagggggaacaggtgagcttgacctcacagccacacaactttcacagggtgccaatggctggcagatcatctcttcctcctctggggctacccctacctcaaaggaacagaatggcagcagn

SEQ ID NO: 21705 - DNA, 2815 bp, Homo sapiens
cgacccacgcgtccgctccgtaccgcatgtaaacagtcccagccggcccagcccggccccggaggagcccgcgcaggccgagccgagcgccgcgctgcccgcccgggaggagggcgcctaggagcgggagggcgggcggcggcgggaggcgggcgcggggccgcgatggatttccagcagctggccgacgttgcggagaaatggtgctccaacacgcccttcgagctcatcgccaccgaggagaccgaacgcaggatggatttctacgccgaccccggcgtctccttctatgtgctgtgtccggacaacggctgcggcgacaattttcacgtgtggagtgagagcgaggactgcctgcctttcttgcagctagcacaggattacatctcctcctgcggcaagaagacgctccacgaagtcctggaaaaagtcttcaagtctttcagacctgtaggtgcctgcttggcttctcaccacagcttgttttctatgttactggggcttccggatgcagatgacgatgcgtttgaagagtacagtgctgacgtggaagaagaggagccagaggcggaccacccccagatgggggtcagccagcagtaaatctgggggctcccctgagaaggagagtgagccccacagtaacctaggtggggtcactgcccctcctgggttagcattttgcattagcacttcgaaataggacatctggctcccagcatccaaattaaaatgaaatacctttttaacctaccttccttcttcctagcttccttcaccaaatcgcactggctcctggactcttttcctatcttcaccacgaactgctgcttgctcgcttgctcctcagtcctagcttcatcaaacactggttcctggaatcctgtctgctgctgtcttcctagattcactgaatccacttctgtgtagcacctgggtcagctgtcaattaatgctagtcctcaggatttaaaaaataatcttaactcaaagtccaatgcaaaaacattaagttggtaattactcttgatcttgaattacttccgttacgaaagtccttcacatttttcaaactaagctactatatttaaggccttccaaattcttctaactcttccaaaagccttctgccttagttttttttaaattacaccagtccttttagtagctttttgatgtgatttttaaccaacttccccttctagcttcaagtattcttctaaattggttctggtctacgtaaacaccctcatcttctcaagctttaccttctaacttctgcaccaccagaaattaaattgatgggcttttaaaataaattggttaccaataatttcctcattttttcagtgctattttatccaatttttggctttatatttttctatcttctatacttctccaatacttgtcttagcttgtttttcattttctatctgaaactcttgacaatattttcattttctatcttgtttctatcttccaattttcttctaagtttgtacattttgcccttagctttttgtttcctagcttgtcttttttcttctgcttcctacttttcaggtttaaatttatcttttttcttctaaaagtatgtttttatcttctaatttctgcaccaccagaaattaaattgatgggcttttaaaataaattggttaccaataatttcctcattttttcagtgctattttatccaatttttggctttatatttttctatcttctatacttctccaatacttgtcttagcttgtttttcattttctatctgaaactcttgacaatattttcattttctatcttgtttctatcttccaattttcttctaagtttgtacattttgcccttagctttttgtttcctagcttgtcttttttcttctgcttcctacttttcaggtttaaatttatcttttttcttctaaaagtatgtttttatcttctaatttccctatcttctctattcttttcttctaacttctgcaccaccagaaattaaattgatgggcttttaaaataaattggttaccaataatttcctcattttttcagtgctattttatccaatttttggctttatatttttctatcttctatacttctccaatacttgtcttagcttgtttttcattttctatctgaaactcttgacatattttcattttctatcttgtttctatcttccattttcttctaagtttgtacattttgcccttagctttttgtttcctagcttgtcttttttcttctgcttcctacttttcaggtttaaatttatcttttttcttctaaaagtatgtttttatcttctaatttccctatcttctctattcttttcttcgccttcccgtacttctgtcttccagttcgtggtgaagataggaaaagagtccaggagccagtgcgatttggtgaaggaagctaggaagaaggaaggagcgctaacgatttggtggtgaagctaggaaaaaggattccaggaaggagcgagtgcaatttggtgatgaaggactttcgtaacggaagtaattcaagatcaagagtaattaccaacttaatgtttttgcattggactttgagttaagattattttttaaatcctgaggactagcattaattgacagctgacccaggtgctacacagaagtggattcagtgaatctaggaagacagcagcagacaggattccaggaaccagtgtttgatgaagctaggactgaggagcaagcgagcaagcagcagttcgtggtgaagataggaagcagaagaaaaaagacaagctaggaaacaaaaagctaagggcaaaatgt

SEQ ID NO: 21706 - DNA, 3754 bp, Homo sapiens
  misc_feature 1, 2, 3, 3752, 3753, 3754: n = A,T,C or G
nnnccgattttttatctattataaataatgaaactgctagcgatctcatactgtctctcagagcacaatatgcacaaatttctctaggatatatacctcagagtagaattaatgggtcaaagagtatgtatatcttcaacttgactagataatggaaaaactatctcccaaagtggttgtacaacttatattttcatcagcaatgtttgtgtgttgggtagtagaattttgtaataattgcattattagagtcatttattaatctgcatcatgccaaaagaagattcaccccaacttattggattttttttctttctcttctagaggaatttaaaagttttgccttaaagcatccagaatatgctaagatatttacaacatacctagacctccagacgtgccatgtgttttcattaccaaaagaagtccagacaaccccctccaccgccagtaataaagtcagccctgaaaagcatgaagagagtacctcagacaaaaaagatgactgaaagcagtatttccaataaggaaaacacagtagcttttgcttgaaattgtaaaggcacttattgataatacttttaatgtgttggtaatgatgtttaaaattgaaagatttttaaaacaaaaatgatagattttcttactaaaaatgtttttattaaccttgcttttattggaaaaaatcaagcaatatttcgttttcttttgtgttatattgtactttactgattcatttactggtgatacatatgtttttatggattttccagtttaatttgcatatacaaatgaatgcaatggtctattggtgagcattgagcaacactgtataaagttttaaaaatgtaaacactttttaatctactttcctctaaaaatcaataatattctattatttctaatccttttccacttgggaaataacaatgaagaatctgagaatttgacatctataactttacagattcatttttccatttaaatttcagtttcttggatcactgaatatgggaagggagagcttcactaattagacgcagcttcttaagaacttatattctctttgacatacatctctattgtagttttttgttttgttttgttttttgagatggagtcttgctctgtcacccaggctggagtgcagtggtgcaatctcagctcactgcaacctctgcctcctgggttcaagtgattctcgtacctcagactcccgagtagttgggattacaggtgcccaccaccacacccgactaatttttgtatttttagtagccatgtggttttgccatgttggccaggctggtttcgaactcctgacctcaggtgatccacccacctcagcctcccaaagtgctgggattacaggtgtgagccaccgttcccggcctattgtagattttcttaactacttgctaaggaaatcatatccttttacatgaactacaggtttagaacttggttttaagacaactgctatggccagaaggtaaatgggaattgccttattgaaggtaacattgattgcctaataagaaaatgaattgtttgccacagagttgaatttaatttgagttagatagttcagaatgtagcacttgccctataaatgaatcagatttgttctatttatataatattagaattaatatattatcatgtaagtgggaattttattttgttaagtggactctcaaattttagaacttgtgtgaaatatctcccagaaaacacaaaaggtttcaaggtatcacccaaagctagggaatcaacaaacgtactttattaatgcaagaccacaatttaagccccaggcaggaatccaacagtaacatttttcctttaggttaagcagtaatttttttgaattgtcatttttaatgggtctcacacatgcatattgctaatatcattcatgtttgaggttttcaacaaagaaccaatttattaatataatgtacaaaaatagttggttcattttctgaattcagtctttgaaataaaactccttgttttggccgtgtttctgaatgtattggtgattcacccccaagctaattttttaaagtcatttttgaagttgggaagtctcatgagagatgttgaagtatgtatttaatcaagagtcatgatttcaaactagttttacatattaagcagttagtgttctaatttaatgggtaaatgtgtgtttggataaatatctgaaaattttatccttaagtatatataattatttgcctcttatatgtcttaaagctatttaaacaaggtgttaaatgagccaaaacaattaagtaattagaacagtacatttttatcagtctgtcatatgcaatgaatgtatgtaatactaaaaaatcatgactacttttatcaaagaaaaaccacacattaatcctattaatcatgaaagcgtagcattgtaaattaaaggttttctttgaggctcttgaaagtgatcccattgctttcctgttttaaaaatattttatgctctttatttccacttctgtgaatgtgatatttctattttgtgattatgttactgaataaacaaacttgctacataaaattcttagcaattaaaaaaattctgattctgccattttgtctcaaatgtaatatacccttttaatatcatatgtttacatatttatgaatgattaatcatttttgtttgcattaaactttatgaaatgtcagaaatgattttactctaatgaaactcaaattttgcccaaagtagcaatattcttaaagatgttgaattttgactggttgaattttatatagtaacacacaagtcgtgatcatcaatattattgcagaccaggactctgcttatatgccttgctaacaaagatttctttcacagaggcttttctcctctcaagacttaaagtaagaattacattttattaagtcagttaaatgcaccatggcttcatatagtaatataaaaaaactctttgaagtgagaaatattatatcctaaaacctctaaaccacaaacattcaattgaaagagttctgttgaaggataatgacatactgactgcttacagaccaagttgcttgcattttgtatgtttagccctcctttgccactgcttttagagccttggaaggctaagtgtgatagtaatgctagctctaatgcatatttaaaggagactgcctcgcttttagaagacatctggtctgctctctgcatgaggcacagcagtaaagctctttgattcccagaatcaagaactctccccttcagactattaccgaatgcaaggtggttaattgaaggccactaattgatgctcaaatagaaggatattgactatattggaacagatggagtctctactacaaaagtctttgggtatttgtttcttacatagaaaatgctaacatgaatagaaagatactggtgcaagaccattcccgggaaagtagacatacttacatttttttccttttctgctcatttgaatgactcatttatgttaaatgtttatccagtgcactaatgctatgcttgatagaaaggagcttccctttttccaattctttccacttgcgataggacgtaccgggaattgcccttccccatggaaccgtctagaatgtctccaaaattcgtggtgagcccgtatataactgtcacagcgcattaataaaaatctttaacaacacacacaaaaaaaaaccaacctacatcacgagaggaccaatattaacaccaatgaccnnn

SEQ ID NO: 21707 - DNA, 1042 bp, Homo sapiens
  misc_feature 1, 2, 3, 4, 5, 6, 7, 8, 9, 10, 1038, 1039, 1040, 1041, 1042: n = A,T,C or G
nnnnnnnnnnagtggaggagtgagaggagtatgaggggggtagtgtggagtgtgttgagttgggagtgagtagaggatgatgcgagtggtttttaaaggtatggacagggagcatatttgtgggtgatgcgatatacaaatcgtgtgaaatagggtgtgggatataaggtgtggaagacgcggaatgtggggataacgaagcaggggaattctgcagaggggaggtgtggtggggtcacccgggggccttttgcgcaggcggctgggatggtgcctgattgttcccgtggttgtgcgggaaggctccgctaggtgctgctgggccaagacagtactgagatgaattggctgggcaacagagtggttggcaggactagccagctgaatgaagctgaaggagccctgcaaccacctggttcacaatacctggccagcaaaagtagtgatgcgaggacaggcttggtagaaaggacattatccagctatatagccacgctttggtggatccccgatcgcgagagtgtgccctggctgaaaagaccagaagtatctcatagtaaaggtgctgtagccagtatttgtatacctccagaataagcttctgtaactcagcgtcaagaagacacttctgagctaaagctgaatcagccatcctaactggatatctcaacacaggacaagattttggaatctgaggctcaactaagttaagaatttaccacagagattaaaatagtggctcccgttgctgtagctgcccaatggtgttgcaggcgtgatgactgcggtttctgtttctctgtaacatcaattacttagggtctgtataagagtttcaatgcagtgccaccagcgtcagtcgacccctttggctttgattttgtagtgcattcttgatccctagactccggcaagtactcatgaagtttgtttactatgaaatagaaaaggtcactggtctcagatggaaatgcagaaatcacccgtcttctgcgtcgctcacagctgggagctgtagaccggagctgttcctattcnnnnn

SEQ ID NO: 21708 - DNA, 832 bp, Homo sapiens
  misc_feature 1, 2, 3, 4, 5, 6, 7, 8, 9, 10, 11, 12, 13, 14, 15, 16, 17,18, 19, 832: n = A,T,C or G
nnnnnnnnnnnnnnnnnnngcattttgacagcccaaattttattttacaaaccaatgacagctactagaagatgctttaggaaaccttagctaagccacataaacaatcagacctatacaagtacagaaaaatctaaacatgcttcagaactaaaaaaaaaacaaaaaaaaacaaaaaaaacaaaaaaaaaaaaccaagttgtacgtcctgagggcatacaacttaatttctacaaaaacatactttttcaaaagggctatgagagtatcaattgacaaaagcagaacaagtagcatgattagacagagaagtcttaattgcttaacacaagataaactcagcagttttaaagtgtctgtatccattttaaatgattagtccaggggtagaaaagatgaggatggtttcatcatactttgaaaaggaaactcccactggagctaaaacaaacttacagtccaggttataagaatccaagttacatagtaaattattaactattattttcataccaagttcatgcttaggcaataagaaaatcctgtttgcagcattaattacatgtaattcagtttccaggcacatagttagaggtcacacacaggcagagaaagaacaaatgccagcccagtcatctcactgcctcagtccagcagccagtggcccaggacttcatctacactgtctatctgcttcccagccacttaagccccacgagggaaggcaaggcagctagccctggaggtgagaagacaccgttgatccaccagcgcaggtgcagggccctctgcagatttgttccaccagtgtatctcccatagaaaatgggan

SEQ ID NO: 21709 - DNA, 2133 bp, Homo sapiens
  misc_feature 1, 2130, 2131, 2132, 2133: n = A,T,C or G
nctcctcgactggccgtcagccgccatctcgtgtcgcgtgtatccgatccagcagttcgatcgttcccgttctctcgctcgactctccttctcatctgtgcatcatcgtacttcgtccgtcgtctgtcctgctcatccgttggtctgggtcccggcatcgctcgtgcatcgacgctcgtcgctctgatcgctcgctggcgctcgtctcgccgcctgcgacagagccccacggagacgcgacgtggtacacccgccacccctgtactacttctgcagtcgggctgcgtcgattccgcagcggactccttcaccactgtcgtgccacgcagtagccattagttcgactctcggtgctcctcccttgaatcctaccaatgcttcatgccgtcctgtccggtgtgtagtgccttcctgtgtgtccttcttcgagttctgtgtttgcctgtcctagtctgtgtccccatgccggtgcaccgtgggggatgtcctggatttttcttgcagcaagaaaagtcgtcaatggggtcacgcaagtgcttgatgttcatcttccttgcattgtagtaatttgccatcagcagctcttccggcacgctcttctatggccaccaggtgtcaatccgaggtgtactcgggtccccatttttgcacaggaatgcctgagcagcttccactgatccaccttggtaagttatatcgggatctgcgtcttcagacaccttgctcaacagcatcttcaacaatcttctggtgcaagttccaggctctctggtcaacgattatggcgacctccttctccaaggcctgcaggaaggcaaccagagcaacagctcctggtgggccatctgtctcttctggaggctcatgattgaaatgtgtggggaacccagtggtgatgagcactgagcgggcatgggacagcgagagagaggccttcagcagctcatctttacagagcaggtgcccaatcccccggttccctgggtctatgccgatcatagactctagttctctgatcttctgagaagcagagactgacgcgatgctgtagtgcagaggatcttgggaaatgtgatggacctctggaattctctctggggtgagacaaccaggtggagcctttgcatccttcaggtcagtcataactgtgcagcctgggatgctggcaaaagccagtggggtctcacagctgctgacagctccgagactggtcagcggagaaggccagaacactggaacctcccctgggggacacaccatggcatccccgtaggcaggtttggaaagctctttgattcccaacagttctgggtcgcccatgtgaacaggttgcccctgctcacctccgagggagcagcaggcccgcaccagcccttccagcttgtccttgggaatgggcctcatcgtgaccaccagagggcagcagaagccagcatgggtaacacaaggcactgttgtcttgtatgcacccgcctggctgtgacctgctgggtctcttctggggagccccgctttctccaaggcctcctccagggagaagctgcagcccaggaagaaggccaccatgtccttcagctgctccgagtactgctccagcgaagccaggctgccggtgcaggcaccgaactcgtatttccagaactggggatggcccatcctggtctctgagatagcaccttgagggggcagcatccacttttctggctcactctggcccagcaggggtagaggaccagtgttgacctggcagaatctttcaaaagctggagcaagggacctgggcaggaccaccaggctggctggtcggagctctccagccatgctggatgtatttctgatgtttggtttcttttgtagaatcaaactccttatggcagagggaaggcgggacctcaggtggagtgtgaagggcatcgtgtcaacttgaataagtagcagagaatcttacagagtcgtccctttgaaggcagggttaaacagggtgtaacttggctcctgatatgttctgtcctcaggtgctatctggcttgaaccaagccttgacttttcaaggagaggaacagctgggcctcagtggagaatttcaggaattttctgccttgctcacgggttttgccctgccattgtccnnnn

SEQ ID NO: 21710 - DNA, 1907 bp, Homo sapiens
tagggagtcgacccacgcgtccgctcccttttaactaaactgaaagctcattgaagagagaaaaaaaggtatgtttgcattcttgctcattgattgatttaacaaatactttaaaatttacttaacaacctatgcgtatttaataacttgaaagactctaatgtttactattagatggattttgctgagaagcatactactataatctgcagatgaaccggaaatctcctggctttaaaacaagcatttcaagatgctgtgttgttaatttatggaaagcatgattgtttctgacttcttaaaggtttccaaagagcacagggaaatcacgcaactgcctgtgtgttaccacaaagcctaactggctttactttgacattcttgcattttctcatctgccttagtttctctgccagaatcacatttttcttttggtgcatagtttttagtaattagaatagctatttccaatgtcataactagggcagtgaaacctaatacaactggtttgggacatggggattttccacctctccaattcttttggaaactccctctcagcccagaagtaggtcttagaaacactacaacccagttgccacacagggggtgcaaaagtgactatggtgactgcaaaatttagaggtcaaaacagagatagtgcaaaacaccccataccacagtaatatttagaaatcttgttccacatgcggatacagttctctaaattcaacatagattttgtaagtagttcttcattggtgtgcttttctgtctatctgcagaagttctgatctgttgtctgatacagcttaggatagttctcattcagtggttttcaaagtgtgattcccagatagcagcatcaacatgatctgggaacttgtcaggaatgcaaattcttgagccccaccccagaccttattgtgtcagaaactcaagggggtaggtcccaacaatttatgttaacaagccctccaggtgattctgatgcatgcttaagtttgaaaactgctgtttaaattcaacatatttcattgtagattaggaaattaaaagccagatataagtgacttaacctaggccataaagcaagtaaatgcttgtaaatgtatttattaatcaatgttcagggtgaactgttgatatataaaattaataatttgtttaatcataatatgaagcttattctcaaacttttcgttatgtgccttcactacgttttagaagtaataattttatactacatcattacaaaagccctaagtctcaccttaacaacatgccttcctccaatcataagtgtttggtgtacatatgcatataaaatattatcctaaggtggggcgcagtggaacccgggaggcagaggttgcagtgagccgagattgtgccactgcactccagcctgggtgacacagtgagtctccgtctcaaaaaaaaaaaaaaactcatatggataggcttaagtttttaatttgcaattgggtcttttacagaatttcttctgggctatattttatagcatttccctaattttcaaaactgttcttaaagtgcgggtgactttctaccaaagaaatccctcaaattaaaattttgagggaaacacatagttttatttactccttttaatctttttaattgaaatatactatgtatacaatctacagatctaagtgcccagttcaatgagcttcaacaattctatacacctatgttatcttcatccaaaacaagatacagaacagcttcatcacctcagaaaatttctttgtgcccctttacaatcacttctcaccctgtctctcaccgttcaaccacttcctgacttatatcacaatagatctgtttttcctatagtctgttattagacttcagacaatatcaggtgcattcagggtagt

SEQ ID NO: 21711 - DNA, 916 bp, Homo sapiens
cactatagggagtcgacccacgcgtccggtggcgttggctgctagagcgatgccgggccggagttgcgtcgccttagtcctcctggctgccgccgtcagctgtgccgtcgcgcagcacgcgccgccgtggacagaggactgcagaaaatcaacctatcctccttcaggaccaacgtacagaggtgcagttccatggtacaccataaatcttgacttaccaccctacaaaagatggcatgaattgatgcttgacaaggcaccagtgctaaaggttatagtgaattctctgaagaatatgataaatacattcgtgccaagtggaaaaattatgcaggtggtggatgaaaaattgcctggcctacttggcaactttcctggcccttttgaagaggaaatgaagggtattgccgctgttactgatatacctttaggtaaagttcacttagaagctttaaaaaaaaagtaattaaattcttttacaagtttccattgaggtgtgatatacatacacagcacaggtgctgtatgtcttagatatacagcacaggtgctgtatgtcttagatatacagcacaggtgcacaggtcttagatatacagctcagtgaagcttcagaaatgcatgcatgcatgtagccatgactcagatcaagatacggaagagcccagcactccacgatgctccatcatgcccctttgcagaaaatactgcctcctccagtaaacactattctgatgtcactatagattagttttgcctcttcgtgaactttgtataaatagaactgaacaatatgaactgtcctgtgtgatttcttgtatttcattatgggtggtgtgctattgtatcaacagggtatttgggtggttttcagatttgtgatattaacaataaaggaattataaatattgtagta

SEQ ID NO: 21712 - DNA, 3873 bp, Homo sapiens
  misc_feature 1, 3839, 3868, 3869, 3870, 3871, 3872, 3873: n = A,T,C or G
ngcggccgctcctcgcctggctgcagcggcggcagccccagtgctgcccctgtgcggcgcccctttcccgctccgccgcgcactgttgtcatggaggaaccaagatggcggctctggcctacaacctgggcaagcgggagatcaaccactacttcagcgtgaggagcgccaaggtgctggcgctggtggccgtgctgctgctcgcagcgtgccacctcgcctcccgccgctaccgaggcaatgattcgtgtgaataccttctctcaagtggcagatttcttggagagaaagtttggcaacctcacagttgtatgatgcataaatacaaaatcagtgaagcaaagaactgccttgtagataaacatattgcatttattggagattccagaattcgtcaattgttttattcttttgtaaaaataattaatccccaattcaaagaagaaggaaataagcatgaaaacattccttttgaagacaagactgcatcagttaaagtggattttctgtggcatcctgaagttaatggttctatgaaacagtgtatcaaagtgtggactgaggattccattgcaaagccacatgtgattgtagcaggagctgccacatggtccatcaagattcacaatggtagcagtgaagcgctttctcaatataaaatgaacatcacctccatagcaccacttttagaaaaattggcaaagactagtgatgtttattgggtcttacaagatcctgtttatgaagatctattaagtgaaaataggaagatgatcactaatgagaagatagatgcttacaatgaagctgcagtcagtattttgaatagtagcaccagaaattctaaatcaaatgttaagatgttcagtgtttccaaattaattgctcaagaaaccatcatggaatctttggatggcttacatcttcctgaatcgagcagagaaactactgcaatgattcttatgaatgtgtattgcaataagattttgaagcctgtagatgggtcctgttgtcaacctcggcctcctgttactctcatacagaagctagctgcttgttttttcactttatctattatcggatatttaattttttacataattcatcgtaatgctcatcggaagaataagccgtgtactgatttggaaagtggagaggaaaagaaaaatattatcaatacccctgtgtcttcattagaaatacttttacaatctttctgcaaacttggcctgattatggcatatttctatatgtgtgaccgtgcaaatctgttcatgaaggaaaacaaattttatacacattcatctttctttattccaattatctacattttggttttgggagtattttataatgaaaatactaaagagactaaagtattaaatagagaacaaacagacgaatggaaaggctggatgcaacttgtgattttgatttatcacatttctggagcaagtacatttttgcctgtatacatgcacattcgagttctggttgctgcatatttatttcagacagggtatgggcatttctcatacttttggataaaaggagattttggaatctatagagtatgtcaggttttatttcgtctcaatttcctggtagtggtgttatgtatagtaatggatcgaccttatcaattctattactttgtccccttggtcactgtatggttcatggtcatatatgttactttagcactatggccacaaataatccaaaaaaaagcaaacggaaattgtttctggcattttggcttactgttgaaactaggctttttgctgttattcatatgttttttggcatattctcagggtgcatttgagaagatcttttctctttggccattgtccaagtgttttgaactgaaagggaatgtatatgaatggtggttcagatggaggttagaccgttatgtagttttccacggaatgctgtttgcttttatttatctggctttgcagaagcgtcaaatactttctgaaggaaagggtgaacctcttttttcaaacaaaatttcaaattttctgttgtttatttcagtagtttctttcttgacctattccatctgggctagcagttgtaaaaacaaagcagagtgcaatgaactccatccgtctgtttctgtggtacagattttagccttcatcctaataagaaacatccctggatatgcccgttcagtttacagttcattttttgcttggtttggaaaaatttcattagagctatttatttgccagtatcacatatggctggcagcggacacaaggggtatcttggtactgatacctggaaaccctatgctcaacatcattgtcagcactttcatatttgtttgtgtggcacatgaaatttctcagatcactaatgatcttgcacagattattattcctaaagataactcatctctcttgaaaaggttggcatgtatagctgcatttttttgtggactcctcatcttatcatccattcaagataaatcaaaacattaggttccaaaaattctaaaaaacctaaactcttcaggctacctttgtgtgtctctagaagagaaaagcatctatctggagatataaatgtgtatgtaaatataaacgtttgtggcaagaggacagttctgtgacatctgttgaacatatgtggttgtatatattggaaatgtacatatccaatatgaaatactaaaacaaacaaacaaacaaaaaaccagaatgcattgtataggattgcatgtgaagtcttttctactgaatctatatttccatttgtaagtgattttaagttaacatatgaaggcagggaaatgattacctttccagtaaaaagtatagataatttaattaacttagtgacaccaccaagtgttttgatataactaaatttgtggtaataagactgtctgcacctgtattcattgtggaacttcctctttcattggaaactttcttactcaagaatgacggcagtattgttttcttatatgtgcaatgaagtggaatgataaacagtatgcctttaatttatatgtgttcttgttctgatgttgtttcctgaaatgatttttcttcctaactgtggttttcgggtatgcaagcctaaatctttgtacactttgtctcacagaatagttctgaggctccatgacagggttttgtcattgttgatgttattgttgcttcgttttataaaaaagccaaaattttttttccaatccaaacgttcacctgtttcctttcctcaagctataccagtgtaataccagttaccctgtggatccatttaatatgttatccccactaattaattttcgtatattatttccaatatttggaaagctctttatagccatttggtatttcctattacccacctcctattttaaatatttatcagtctaaacttgtgcagtgtagtaaacatgcaagttgttacgattgagctgtattaccataagtagaattttaagtaaactggtgaatttgggcaataaatgtttttgctttttgtttgatttttttttacaagctaactgttagaggtatacatttatttatctgttgtacagatttgattatgattttaatgtttgaaagattgcacttgtttgcttttactatatgtggggtaaaatatattttctgttcacagtatatgaaaatatggagtaatttaaacagtaaataaacattctgtggatgcttatttttgtattggcaaagtatcaattaaactatatgtgttctttttcaaaaaacccatcccccccaacacaatctttctctcccccctcctcctacacccctctcacatctccaccctcttttatcctcttnacccccatttcgctctctcttttccctannnnnn

SEQ ID NO: 21713 - DNA, 1799 bp, Homo sapiens
  misc_feature 1: n = A,T,C or G
nacatactgtgctaggtgcgaggctgcctcgtgaattcctggggactggaggacctgtctggttattatacagacgcataactggaggtgggatccacacagctcagaacagctggatcttgctcagtctctgccaggggaagattccttggaggaggccctgcagcgacatggagggagctgctttgctgagagtctctgtcctctgcatctggatgagtgcacttttccttggtgtgggagtgagggcagaggaagctggagcgagggtgcaacaaaacgttccaagtgggacagatactggagatcctcaaagtaagcccctcggtgactgggctgctggcaccatggacccagagagcagtatctttattgaggatgccattaagtatttcaaggaaaaagtgagcacacagaatctgctactcctgctgactgataatgaggcctggaacggattcgtggctgctgctgaactgcccaggaatgaggcagatgagctccgtaaagctctggacaaccttgcaagacaaatgatcatgaaagacaaaaactggcacgataaaggccagcagtacagaaactggtttctgaaagagtttcctcggttgaaaagtaagcttgaggataacataagaaggctccgtgcccttgcagatggggttcagaaggtccacaaaggcaccaccatcgccaatgtggtgtctggctctctcagcatttcctctggcatcctgaccctcgtcggcatgggtctggcacccttcacagagggaggcagccttgtactcttggaacctgggatggagttgggaatcacagcagctttgaccgggattaccagcagtaccatagactacggaaagaagtggtggacacaagcccaagcccacgacctggtcatcaaaagccttgacaaattgaaggaggtgaaggagtttttgggtgagaacatatccaactttctttccttagctggcaatacttaccaactcacacgaggcattgggaaggacatccgtgccctcagacgagccagagccaatcttcagtcagtaccgcatgcctcagcctcacgcccccgggtcactgagccaatctcagctgaaagcggtgaacaggtggagagagttaatgaacccagcatcctggaaatgagcagaggagtcaagctcacggatgtggcccctgtaagcttctttcttgtgctggatgtagtctacctcgtgtacgaatcaaagcacttacatgagggggcaaagtcagagacagctgaggagctgaagaaggtggctcaggagctggaggagaagctaaacattctcaacaataattataagattctgcaggcggaccaagaactgtgaccacagggcagggcagccaccaggagagatatgcctggcaggggccaggacaaaatgcaaacttttttttttttctgagacagagtcttgctctgtcgccaaggtggagcttgcagtgagccgagatatcgccactgcactccagcctgggtgacagagcgagactccatctcaaaaaaaaaaaaaaaaaaaaaaagaatatattgacggaagaatagagaggaggcttgaaggaaccagcaatgagaaggccaggaaaagaaagagctgaaaatggagaaagcccaagagttagaacagttggatacaggagaagaaacagcggctccactacagacccagccccaggttcaatgtcctccgaagaatgaagtctttccctggtgatggtcccctgccctgtctttccagcatccactctcccttgtcctc

SEQ ID NO: 21714 - DNA, 6428 bp, Homo sapiens
  misc_feature 6427, 6428: n = A,T,C or G
acgcggggcattactgttggagctacagggagagaaacaggaggagactgcaagagatcatttgggaaggccgtgggcacgctctttactccatgtgtgggacattcattgcggaataacatcggaggagaagtttcccagagctatggggacttcccatccggcgttcctggtcttaggctgtcttctcacagggctgagcctaatcctctgccagctttcattaccctctatccttccaaatgaaaatgaaaaggttgtgcagctgaattcatccttttctctgagatgctttggggagagtgaagtgagctggcagtaccccatgtctgaagaagagagctccgatgtggaaatcagaaatgaagaaaacaacagcggcctttttgtgacggtcttggaagtgagcagtgcctcggcggcccacacagggttgtacacttgctattacaaccacactcagacagaagagaatgagcttgaaggcaggcacatttacatctatgtgccagacccagatgtagcctttgtacctctaggaatgacggattatttagtcatcgtggaggatgatgattctgccattataccttgtcgcacaactgatcccgagactcctgtaaccttacacaacagtgagggggtggtacctgcctcctacgacagcagacagggctttaatgggaccttcactgtagggccctatatctgtgaggccaccgtcaaaggaaagaagttccagaccatcccatttaatgtttatgctttaaaagcaacatcagagctggatctagaaatggaagctcttaaaaccgtgtataagtcaggggaaacgattgtggtcacctgtgctgtttttaacaatgaggtggttgaccttcaatggacttaccctggagaagtgaaaggcaaaggcatcacaatgctggaagaaatcaaagtcccatccatcaaattggtgtacactttgacggtccccgaggccacggtgaaagacagtggagattacgaatgtgctgcccgccaggctaccagggaggtcaaagaaatgaagaaagtcactatttctgtccatgagaaaggtttcattgaaatcaaacccaccttcagccagttggaagctgtcaacctgcatgaagtcaaacattttgttgtagaggtgcgggcctacccacctcccaggatatcctggctgaaaaacaatctgactctgattgaaaatctcactgagatcaccactgatgtggaaaagattcaggaaataaggtatcgaagcaaattaaagctgatccgtgctaaggaagaagacagtggccattatactattgtagctcaaaatgaagatgctgtgaagagctatacttttgaactgttaactcaagttccttcatccattctggacttggtcgatgatcaccatggctcaactgggggacagacggtgaggtgcacagctgaaggcacgccgcttcctgatattgagtggatgatatgcaaagatattaagaaatgtaataatgaaacttcctggactattttggccaacaatgtctcaaacatcatcacggagatccactcccgagacaggagtaccgtggagggccgtgtgactttcgccaaagtggaggagaccatcgccgtgcgatgcctggctaagaatctccttggagctgagaaccgagagctgaagctggtggctcccaccctgcgttctgaactcacggtggctgctgcagtcctggtgctgttggtgattgtgatcatctcacttattgtcctggttgtcatttggaaacagaaaccgaggtatgaaattcgctggagggtcattgaatcaatcagcccggatggacatgaatatatttatgtggacccgatgcagctgccttatgactcaagatgggagtttccaagagatggactagtgcttggtcgggtcttggggtctggagcgtttgggaaggtggttgaaggaacagcctatggattaagccggtcccaacctgtcatgaaagttgcagtgaagatgctaaaacccacggccagatccagtgaaaaacaagctctcatgtctgaactgaagataatgactcacctggggccacatttgaacattgtaaacttgctgggagcctgcaccaagtcaggccccatttacatcatcacagagtattgcttctatggagatttggtcaactatttgcataagaatagggatagcttcctgagccaccacccagagaagccaaagaaagagctggatatctttggattgaaccctgctgatgaaagcacacggagctatgttattttatcttttgaaaacaatggtgactacatggacatgaagcaggctgatactacacagtatgtccccatgctagaaaggaaagaggtttctaaatattccgacatccagagatcactctatgatcgtccagcctcatataagaagaaatctatgttagactcagaagtcaaaaacctcctttcagatgataactcagaaggccttactttattggatttgttgagcttcacctatcaagttgcccgaggaatggagtttttggcttcaaaaaattgtgtccaccgtgatctggctgctcgcaacgtcctcctggcacaaggaaaaattgtgaagatctgtgactttggcctggccagagacatcatgcatgattcgaactatgtgtcgaaaggcagtacctttctgcccgtgaagtggatggctcctgagagcatctttgacaacctctacaccacactgagtgatgtctggtcttatggcattctgctctgggagatcttttcccttggtggcaccccttaccccggcatgatggtggattctactttctacaataagatcaagagtgggtaccggatggccaagcctgaccacgctaccagtgaagtctacgagatcatggtgaaatgctggaacagtgagccggagaagagaccctccttttaccacctgagtgagattgtggagaatctgctgcctggacaatataaaaagagttatgaaaaaattcacctggacttcctgaagagtgaccatcctgctgtggcacgcatgcgtgtggactcagacaatgcatacattggtgtcacctacaaaaacgaggaagacaagctgaaggactgggagggtggtctggatgagcagagactgagcgctgacagtggctacatcattcctctgcctgacattgaccctgtccctgaggaggaggacctgggcaagaggaacagacacagctcgcagacctctgaagagagtgccattgagacgggttccagcagttccaccttcatcaagagagaggacgagaccattgaagacatcgacatgatggacgacatcggcatagactcttcagacctggtggaagacagcttcctgtaactggcggattcgaggggttccttccacttctggggccacctctggatcccgttcagaaaaccactttattgcaatgcggaggttgagaggaggacttggttgatgtttaaagagaagttcccagccaagggcctcggggagcgttctaaatatgaatgaatgggatattttgaaatgaactttgtcagtgttgcctcttgcaatgcctcagtagcatctcagtggtgtgtgaagtttggagatagatggataagggaataataggccacagaaggtgaactttgtgcttcaaggacattggtgagagtccaacagacacaatttatactgcgacagaacttcagcattgtaattatgtaaataactctaaccaaggctgtgtttagattgtattaactatcttctttggacttctgaagagaccactcaatccatccatgtacttccctcttgaaacctgatgtcagctgctgttgaactttttaaagaagtgcatgaaaaaccatttttgaaccttaaaaggtactggtactatagcattttgctatcttttttagtgttaaagagataaagaataataattaaccaaccttgtttaatagatttgggtcatttagaagcctgacaactcattttcatattgtaatctatgtttataatactactactgttatcagtaatgctaaatgtgtaataatgtaacatgatttccctccagagaaagcacaatttaaaacaatccttactaagtaggtgatgagtttgacagtttttgacatttatattaaataacatgtttctctataaagtatggtaatagctttagtgaattaaatttagttgagcatagagaacaaagtaaaagtagtgttgtccaggaagtcagaatttttaactgtactgaataggttccccaatccatcgtattaaaaaacaattaactgccctctgaaataatgggattagaaacaaacaaaactcttaagtcctaaaagttctcaatgtagaggcataaacctgtgctgaacataacttctcatgtatattacccaatggaaaatataatgatcagcaaaaagactggatttgcagaagtttttttttttttcttcatgcctgatgaaagctttggcgaccccaatatatgtattttttgaatctatgaacctgaaaagggtcagaaggatgcccagacatcagcctccttctttcaccccttaccccaaagagaaagagtttgaaactcgagaccataaagatattctttagtggaggctggatgtgcattagcctggatcctcagttctcaaatgtgtgtggcagccaggatgactagatcctgggtttccatccttgagattctgaagtatgaagtctgagggaaaccagagtctgtatttttctaaactccctggctgttctgatcggccagttttcggaaacactgacttaggtttcaggaagttgccatgggaaacaaataatttgaactttggaacagggttggaattcaaccacgcaggaagcctactatttaaatccttggcttcaggttagtgacatttaatgccatctagctagcaattgcgaccttaatttaactttccagtcttagctgaggctgagaaagctaaagtttggttttgacaggttttccaaaagtaaagatgctacttcccactgtatgggggagattgaactttccccgtctcccgtcttctgcctcccactccataccccgccaaggaaaggcatgtacaaaaattatgcaattcagtgttccaagtctctgtgtaaccagctcagtgttttggtggaaaaaacattttaagttttactgataatttgaggttagatgggaggatgaattgtcacatctatccacactgtcaaacaggttggtgtgggttcattggcattctttgcaatactgcttaattgctgataccatatgaatgaaacatgggctgtgattactgcaatcactgtgctatcggcagatgatgctttggaagatgcagaagcaataataaagtacttgactacctactggtgtaatctcaatgcaagccccaactttcttatccaactttttcatagtaagtgcgaagactgagccagattggccaattaaaaacgaaaacctgactaggttctgtagagccaattagacttgaaatacgtttgtgtttctagaatcacagctcaagcattctgtttatcgctcactctcccttgtacagccttattttgttggtgctttgcattttgatattgctgtgagccttgcatgacatcatgaggccggatgaaacttctcagtccagcagtttccagtcctaacaaatgctcccacctgaatttgtatatgactgcatttgtgggtgtgtgtgtgttttcagcaaattccagatttgtttccttttggcctcctgcaaagtctccagaagaaaatttgccaatctttcctactttctatttttatgatgacaatcaaagccggcctgagaaacactatttgtgactttttaaacgattagtgatgtccttaaaatgtggtctgccaatctgtacaaaatggtcctatttttgtgaagagggacataagataaaatgatgttatacatcaatatgtatatatgtatttctatatagacttggagaatactgccaaaacatttatgacaagctgtatcactgccttcgtttatatttttttaactgtgataatccccacaggcacattaactgttgcacttttgaatgtccaaaatttatattttagaaataataaaaagaaagatacttacatgttcccaaaacaatggtgtggtgaatgtgtgagaaaaactaacttgatagggtctaccaatacaaaatgtattacgaatgcccctgttcatgtttttgttttaaaacgtgtaaatgaagatctttatatttcaataaatgatatataatttaaagttaaaaaaaaaaaaattccgaggggctcgatgtgtaatgaaaccnn

SEQ ID NO: 21715 - DNA, 1494 bp, Homo sapiens
  misc_feature 1491, 1493, 1494: n = A,T,C or G
agggagtcgacccacgcgtccgtttagatttaaagttctttgatgtattttattccaaatcataaccataaagatttagaaaatcaaatagtccgtgattttctaaatctttatggttatgatttggaataaaatgtgcctaatcctgtgttacattctgttcttaaatctgaatgccttctcatttaattctgaggaaatatcacacaagtgtcttcattgaccttgaagaaatgtatatacagttgccttataaaacaacataaatttagaccataacttttatagagaaagggttttgtcaaatgttttctgaaaatctgagtaattcaaagcatgcctctgcccctttaatatttttaataacctgcattgttgctgtctgccaaatattaaattgaaatcttcatttcaattttattatctggaaagggcactggattgctctgcaaccaaagaaagcaatatggaatgaaaaaactcattcacttttgtcttattttcttttaaggtgtattggcatgtaatttgcatagagaaggtcctctggttagtctctcaaattgaggctgtttagggaaatccttattcagttggtggcagtggttggtttaaagtagaaggaaataagatcgccttaataccagaaatgattagaagtgctgatttagattcaacaaataccatatgtccttatcattttttgtaagaagaaattggttaagtcctaactttcaatgtgtacccaaatacttgtatttatgcttttgataaaatgtattttcagcattaatacacatccgattatgccttatttatatatgaagaataaagttaccatgttatactgttatgtcctaaaattcaaatcactatttgagaaaccctcaaattggtgctttcattatataatgatacatttagacaaaaccccaaactaagccatttgaaacaagattctctccattgcagtttgtagcaatgttatttctgtgtatgtcatgagaaggctaaatatcagtgttaatttcttgtttgaatccgtgaaatcatgcctgtaaagcccaaacatttgtaacaaactccctaataaatttagagaaagtcactctgttaccatttcatttattttagttttatttgagaaattaagaccagaagttttgctcatgtctttttcacttggaaatctgacttagtacctagttaatttgtctctctcccatcattttaaggcgttcgcttctgttaatcacagatgatctgtccttgtgttgtgctgcttgactaaaagcactgttttgttttgttttgttttgttttttaatgataggatacagggtggcttttcagtctagtaaacatgaggaggggagagatgtgggtgggtgtggggtgtgttccgcatgtccccaatacagcacatgccccatttgttttatgggtacgagggcaggggcttattaataaatgtatactaggtcttgaagngnn

SEQ ID NO: 21716 - DNA, 2137 bp, Homo sapiens
cgacccacgcgtccgcggatacccaaggagacgaagctgaagcaggagaaggaggggaaaattaaccggccttccaacttttgtctgcctcattctaaaatttacacagtagaccatttgtcatccatgctgtcccacaaatagttttttgtttacgatttatgacaggtttatgttacttctatttgaatttctatatttcccatgtggtttttatgtttaatattaggggagtagagccagttaacatttagggagttatctgttttcatcttgaggtggccaatatggggatgtggaatttttatacaagttataagtgtttggcatagtacttttggtacattgtggcttcaaaagggccagtgtaaaactgcttccatgtctaagcaaagaaaactgcctacatactggtttgtcctggcggggaataaaagggatcattggttccagtcacaggtgtagtaattgtgggtactttaaggtttggagcacttacaaggctgtggtagaatcataccccatggataccacatattaaaccatgtatatctgtggaatactcaatgtgtacacctttgactacagctgcagaagtgttcctttagacaaagttgtgacccattttactctggataagggcagaaacggttcacattccattatttgtaaagttacctgctgttagctttcattatttttgctacactcattttatttgtatttaaatgttttaggcaacctaagaacaaatgtaaaagtaaagatgcaggaaaaatgaattgcttggtattcattacttcatgtatatcaagcacagcagtaaaacaaaaacccatgtatttaacttttttttaggatttttgcttttgtgatttttttttttttgatacttgcctaacatgcatgtgctgtaaaaatagttaacagggaaataacttgagatgatggctagctttgtttaatgtcttatgaaattttcatgaacaatccaagcataattgttaagaacacgtgtattaaattcatgtaagtggaataaaagttttatgaatggacttttcaactactttctctacagcttttcatgtaaattagctcctggttctgaaacttctctaaaggaaattgtacatcttttgaaaatttattccttattccctcttggcagctaatggggctcttaccaagtttaaacacaaaatttatcataacaaaaatactactaatataactactttctctacagcttttcatgtaaattagtcttggttctgaaacttctctaaaggaaattgtacattttttgaaatttattccttattccctcttggcagctaatgggctcttaccaagtttaaacacaaaatttatcataacaaaaatactactaatataactactgtttccatgtcccatgatcccctctcttcctccccaccctgaaaaaaatgagttcctattttttctgggagagggggggattgattagaaaaaaatgtagtgtgttccatttaaaattttggcatatggcattttctaacttaggaagccacaatgttcttggcccatcatgacattgggtagcattaactgtaagttttgtgcttccaaatcactttttggtttttaagaatttcttgatactcttatagcctgccttcaattttgatcctttattctttctatttgtcaggtgcacaagattaccttcctgttttagccttctgtcttgtcaccaaccattcttacttggtggccatgtacttggaaaaaggccgcatgatctttctggctccactcagtgtctaaggcaccctgcttcctttgcttgcttcccacagaccatttccctcatcctatttactgcagcaaatctctccttagttgatgagactgtgtttatctccctttaaaacctactatctgaaggctggcatggctgccttaaacctctctttcaccttatcttaaaaggtgggtcagtttcccaactccttacaaattccctacttgcgaaccacacatgcgttataggggttttttaagaaccccgaagaacagttgtgttttgcgcacagaggcacaatagtggggcgtggaagacccacgggttcacaaagggactatataaaaa

SEQ ID NO: 21717 - DNA, 517 bp, Homo sapiens
  misc_feature 271, 272, 273, 274, 275, 276, 277, 278, 279, 280, 281, 282,283, 284, 285, 286, 287, 288, 289, 290, 291, 292, 293, 294,295, 296, 297, 298, 299, 300, 301, 302, 303, 304, 305, 306,307, 308, 309, 310, 311, 312, 313, 509, 510, 511, 512: n = A,T,C or G
  misc_feature 513, 514, 515, 516, 517: n = A,T,C or G
actgaaaggaagttgttcatggatcagaaatgtgggaggcccttccttgcccaaggcaagtcgctgtagatggttaaactgataccaaggataggtaagggaaattccaaattccattggaagatggccttttactgacactgcagacatgtagataacaatagtttaatgtcctctgaaaaggtaaaaattccataaatccttgcaaacaatttttagcaatattgtttattgctaccacagccaagaatgggtatttcaaagccagggnnnnnnnnnnnnnnnnnnnnnnnnnnnnnnnnnnnnnnnnnnngcgctacacttttttgggggggaccttttaatttgggaagaaaatgctgagtatacttttctttcacaaccattgcaaacccaggtagccctggagttttctttttttctcatcatcattggtttgtttttttatggttcaagacttttgcaatacatgaattaaaaataagcagttctttaaagcatagcgctcnnnnnnnnn

SEQ ID NO: 21718 - DNA, 436 bp, Homo sapiens
  misc_feature 1, 431, 432, 433, 434, 435, 436: n = A,T,C or G
nacatttggctacctgatggaccatttaacatttataaagggatttcattcaattgtcattgtcaatgcatgttggtctgtttgtattataagctttcccatgcaagagggctgatgttacaacagtagattattgcgcaacagtgtatttgcacctagtaaaaaaatcttttcatggttcactaaggacaatcccttcatgacctagagcctgaaggtaggatcttctgagaacatcagagaaagactatctctaccatccacactgcagcgagactttggagccttgcaccttgggctcataatctcacaatggagaagggtccctccacactcctagaactgtgcgactattgtatgctattataggtcttttgcctttatacataaactgtagcatcggattattgattatctaccagatagacacnnnnnn

SEQ ID NO: 21719 - DNA, 1194 bp, Homo sapiens
  misc_feature 1191, 1192, 1193, 1194: n = A,T,C or G
acgcggggccacctgggatcggcggcgagcggacggctgcatttacggggtctcccggagggccagagtcgtggcttacagaagagacgaaatgtggtctgagggacgatatgaatatgaaagaattccgagagaacgagcacctcctcgaagtcatcccagtgatgaatctggttatagatggacaagagacgatcattctgcaagcaggcaacctgaatacagggacatgagagatggctttagaagaaaaagtttctactcttcccattatgcgagagagcggtctccttataaaagggacaatacttttttcagagaatcacctgttggccgaaaggattctccacacagcagatctggttccagtgtcagtagcagaagctactctccagaaaggagcaaatcatactctttccatcagtctcaacatagaaagtccgtgcgtcctggtgcctcctacaaacggcagaatgaaggaaatcctgaaagagataaagagaggcctgtccagtctttgaaaacatcaagagatacttcaccctcaagtggttcagcagtttcttcatcaaaggtgttagacaaacccagtaggctaactgaaaaggaacttgctgaggctgcaagcaagtgggctgctgaaaagctagagaaatcagatgaaagtaacttgcctgaaatttctgagtatgaggcgggatccacagcaccattgtttactgaccagccagaggaacctgagtcaaacacaacacatgggatagaattatttgaagatagtcagctaaccactcgctctaaagcaatagcatcaaaaaccaaagagattgaacaggtttaccgacaagactgtgaaactttcgggatggtggtgaaaatgctgattgaaaaagatccttcattagaaaagtctatacagtttgcattgaggcagaatttacatgaaataggtgagcggtgtgttgaagaactcaagcatttcattgcagagtatgatacttccactcaagattttggagagcctttttagatttttctgctcaggctaaaaaaaaaaaaaaacagtttttaaaaattttttttcccggattgggttaaccttaaaatatgggattttggggggggaaaaatttttggggtgggggaccttggtttaataactttaattctggtaagggtggcaccttgggnnnn

SEQ ID NO: 21720 - DNA, 471 bp, Homo sapiens
ggacgcgggtaaggagaaggatgttgacgactgttggttctattttacgtattcagtgaatgggagcaacgaggtcatggttcatgttgtggagaatccagagtgtcccactggtccagacatcattccaattgtagctggtgtggttgctggaattgttcttattggccttgcattactgctgatatggaagcttttaatgataattcatgacagaagggagtttgctaaatttgaaaaggagaaaatgaataccaaatgggacacgagatggtcacataacattgtgaatgtaattaatgccactgaaacaaagtggctttaattgcaaaaaagaaaatgaaaaggcaggacatagtggggaaaatattagcaaagcgtattgtctgataaaggacttttttctagaacacataaggatcacttagagtctcaagaataagaagacccccctagaagatttaaactgga

SEQ ID NO: 21721 - DNA, 935 bp, Homo sapiens
  misc_feature 927, 928, 929, 930, 931, 932, 933, 934, 935: n = A,T,C or G
acttcccaactaggggtgagtttgccacccttacccccatcccagtgaatatttgcaattcctaaagacgtgttttgattgtcacacctgggtggggaacatgctactggcatctaatgcatagagggcagtaatgctgctaaacatctttcaacgcacaggacagagccccacaaaagagaattatctagccccaaatgtccataacactgctgttgagaaaacctaccgcaggatcttactgggcttcataggtaagcttgcctttgttctggcttctgtagatatataaaataaagacactgcccagtccctccctcaacgtcccgagccagggctcaaggcaattccaataacagtagaatgaacactaaatattgatttcaaaatctcagcaactagaagaatgaccaaccatcctggttggcctgggactgtcctagttttagcattgaaagtttcaggttccaggaaagccctcaggcctgggctgctggtcaccctagcagctgagggactcttcaatacagaattagtctttgtgcactggagatgaatatactttaatttgtaacatgtgaaaacatctataaacatctactgaagcctgttctgtctgcaccgacattttcattgagtacggattcttcctaccagatacagctgctctacaactttcgagggctggtataaaactagcttttacctatttttaaaaattacatgaatagtaaaaacttggattaacccagtattcgggtattttcaatttccttgggagcttagaggacggacaaataaaaagattatttcaacatcaaatatatgctattgtttacatatgaagataaccacatatatgtataaattcaccgttactttttagcaatactataaaatccaacagaaaaaaatagcatttactannnnnnnnn

SEQ ID NO: 21722 - DNA, 635 bp, Homo sapiens
  misc_feature 1, 2, 22, 114, 152, 539, 540, 543, 635: n = A,T,C or G
nnattatattaagatataaagncataaagctgctagttattgtattaatttggaaatacctaggctattcttgggcaaccctgcaacgattttttctaacagggatattattgnctaatagcagaggatgtaatagtcaagtgagttgtatnggtaccacttccattgtaagtcccaaagtattatatatttgataataatgctaatcataattggaaagtaacattctatatgtaaatgtaaaatttatttgccaactgaatataggcaatgatagtgtgtcactatagggaacacagatttttgagatcttgtcctctggaagctggtaacaattaaaaacaatcttaaggcagggtgcagtggctcatgcctataatcccagcactttgggaagcccaggtgggctgatcactggaggccaggaattggggaccagcctggccaacacaacaaaaccccatctgttaaaaaaacaaaacaaaaccaaaaaaaacaagtaaccttggtggatgtctactcaagttttctgtactttnnttntttattttttttttttttgactctaaagggggtagaaggggtgctatagggtaaatacgggccctatttcaaagatttttaggggaattaan

SEQ ID NO: 21723 - DNA, 613 bp, Homo sapiens
  misc_feature 1, 2, 3, 4, 5, 6, 7, 8, 611, 612, 613: n = A,T,C or G
nnnnnnnnatactgtacataacctctcacggccaacttaaatccttgctcctcaacataaatttctgactatctgataacattatatttgaaccgaaagtgttaaaaaaaaataaacaaataattgaaggttgctgaaaaacagatgtgtgatcttataactatgtgtagttcaaataagttaataacttcaaccaatttttttaataaaaagatacccccaaaaggggcaaaaccgataaggaaacaggttttcaaagtgttctggctaacatggtatggtttaggtgtccaatggggcttaaatttactcatttcagaaaacgtttacaatgaaagtattttataatttgcttctaatgctttctaagcgtgccttgttgtttcattactgtctgcttttaaagaataaattctaacttaaacttatctgaaaacaatgttgttagctctctgctctaagctaatgcttcacatatagacatgagtcaaaagcggactggttttcctaagattacctcctagaaaaaaaaccccttacaaattcatgatttcccctctccttacgatgagttgtgtaaggtgacagcaactgtaaccactgtttgaacnnn

SEQ ID NO: 21724 - DNA, 1412 bp, Homo sapiens
agtcacccacgcgtccggtaaagcatgaacatttatatttaatttacattttgacaatttgcacataaataacattgtaaaccagtatgtaaacataagatagtttgttgttctagcaaagtaaaaagccagtaactttggtcagttttaactttgagtagaggaaaaaataaaaccactgttgattgtgggctcaacattcacatgtaagaggcagaaaagagaaggatggatggtgagagaagcaagaagtctttataaaaattctcactatgggaaagcacaaaaggagaaaaagaacaaacgagtagttgggaatcaaaagtatttggtctaatgtcaacgtgatgctttggtttaccttcagttaaggactgtgtttatcaaacactgatacataaaaagctgtcagtcttggaagttacagaagaccagtaaggctcttgggtttccctggattattcgaaatttgttctcttctacaggtgaacattagttgatgtgaacaaaatgtcaaatataattataaaatagattggagtaatgtatcagtatttagtaaggaggaaaacagaaaaattgcagcggtaaagtcagttttttatttctgtgacttgggtgtgaccacataatcataaagtggcaaaaaaaaaatagagctgtcttagatggtccttaatactaaaaaatgatgtatctcttcctccctggttgttttgtggtccccaccactgcaccaaggttttagggtctcttacagtaggcaagggtgcccaatcataccgacgtgattgtgaggtcaccaagtattaagcaaagtctcagaaaggagtgctccttttcttttttttttttttttttgcccttagaaaaagtagatcttttacatggcttggctcacaatttaagtggttataaatatatatacatatgatatagtggtataaatagatttataaatatacatcattttttgctacactttgaacaccaacatgtaatctttgggcttagcagaataaaagatagaataacacaaagtctatcttgctggagcacatttactcggtttctcctctagagaagcaaatcattagataagacatcatttcctgcactactggacacactcaatgaggtaactgttgttgaacaactttgcaatgccctttcatcttccattaaattaaccataaaatgtaaaaacacaaatactgaggaaaatctgagttttacagaaaaaatacaattgatgtgttggggataggaatgttcattacccgcttttaccccaagatgactagaatacccgttttttgttgtttgtgtgtttgtttttaaagtgtggcctgagcctatctacctcgaatccttcctggtagagcaccatgtttgtgcaattttgcggacgc

SEQ ID NO: 21725 - DNA, 1662 bp, Homo sapiens
  misc_feature 1, 2, 3, 4, 5, 6, 7, 1650, 1651, 1652, 1653, 1654, 1655,1656, 1657, 1658, 1659, 1660, 1661, 1662: n = A,T,C or G
nnnnnnnataccccgcgcataaaggtattcaagagaataatgtcccggacggccaattttttcatacggccagactaatgtcggcgcttcggagtagaaccaccaagaaagccggcttgaaaaggttgtgatattcgcccttgggtcgttattaaatattttccgtcaaggggtagttgttggtcgcccacgcgagtatgggcgccccccgccccgcaaggtgaaggggttgccctctcccaccacaagatgtgccccacggtagcggctgtgttccccgcccgcccgcgacgcggctgttttcaccgccggcgccctgcgccttttgctcgtttattaatatccggcctctcccctcattaggggcgcccccttggtaacaacagaaaagccgtggggatcacgaaaatgggcccccccagggaataattttttaccccccccccctttttttttttttttttttttttttttgcagttcaactttttattttaataaaatcagaatatgcacagcacatgcagtgctagcatctaaactaataccataagccattactaaagctacagtgacttgaggttccaatctttacattcagcacagtttaaatccttacatgatttttgaaaccttattaactgaaatattgcttgctgatataaacttgctcacaatgctattgctgaatgtacacagtcactgattatgcccataccaccaagataaccacatgtttgaggattgccatgtgccagacattcactgaaaaaaaaaaaaaggcgccgctcgcgatctaagaactagaacaaacatctgagaatctggacacttcacatcagtgttttgaagtgtttcattaatatcttaagacaagtgtatcaaaaccttggcacccgccatctggttagaagagtgggcataactcttaattaagaatttagcagaagacatttctagattttgaataactttcctctgcaatctacaaggttcttttacataaactaaatcaagtgaggattaaggcattcatttggataatttaagaattaactttcctccatttatcgttattctcagatgaaattccaaaatgttgagaaaatggtttaatcctccctttttctgggtaggcatgtttgtggaagtaatttattttctcaaatcaaatcactccgactttgattctctgtcgccctcaagtggtagaattcaaaacagacataattaagataatggagagttgatgtttaatgagttccgagcttcagtttgggaagatgaaaattctgaaggtagatattggtagtggttgcagaataacatgcattacttattgttacttaatgccacagaaacctatgcttcaaaatagttaaaacagtacattttatgtctattttatgacaacttttttaaagggaggcaaatcatacaatgggggtgaaagcagttaggcccttgtactaagttttggaacaatgtaactcaatgttctcacaccctttagagaggagctcagagacatgaagtaaccctatccgtccgggaacctacattttctttgcatcccagtgggggctccctctccctgaaagtcccatgtgttcacagtttgacaaagtttaactgagaaatggccactaggnnnnnnnnnnnnn

SEQ ID NO: 21726 - DNA, 628 bp, Homo sapiens
  misc_feature 1, 2, 3, 4, 5, 6, 7, 8, 9, 627, 628: n = A,T,C or G
nnnnnnnnncaagttttcttcgttcgtatgcatcttcttcatcttcttctcggtcccgttttttgtctttttctctttctcgctcccgttccctctctcgctctctctcgctcccgttctcgttctcgctctcgttctctctctctctctctttcccgctctcgttccctcccgagtacctccactttgtcaagggagctgttgcaaatgctgcctgcctcccggaactcatcctccacaacaagatgaagcgggagctgcaacgagtcgaagactcccaccagatcgtgagtcaaaccagccatgacttaaatgagtgcagctggtccctgaatatcttggccatcaacaagccccagaacaagtgtgacgatctggaccggtttgtgatggtggcaaagacggtgcccgatgacgccaagcagctcaccacaaccatcaacaccaacgcagaggccctcttcagacccggccctggcagcttgcatctgaagaatgggccggagagcatcatgtttttttttttagtacccaggcacgaccacgtcagttttattgtttttttttccaacacaaggaacaccgaaggcccagttctgccgtccttccacacagaaacagctatann

SEQ ID NO: 21727 - DNA, 1139 bp, Homo sapiens
  misc_feature 116: n = A,T,C or G
acaaggcattttgctcaaaactgagcttatatttggacattgtatcttcatcataatcctgtggtaatgctatatcgtaagtaacaggtaagaaacctgaagaggagggatagcanatcatgtatttggacatatttccattttttttttttgggttttgtgatgctagaagaatgaccagaatgagtcataggaagagtatacattcctgtagtattttccaggacagaggtgtgacctcctagagtactgggaccaaaattcccaagtgtctgcaaccttgctttaacagtatgggagatcacctctatcacctggaattcccctggaactctggaatatacaagagaagtatgagacttgggtcttcccttggctgtgtttaattcactcttctatggaataccaatgattctcactaagactggccttttcataagcacaatgtgcattttatggagaagattttacactttgctctatttagaaagaataaatatgagcagtggtttaggttttatgccctggacttaatatgtttctgattcctgttttgagattaaattctcatgtaaatagaaaaatacttattatttctcataaggccaagtttgttattagtttgagtttttgaagatgaagcacaaacttttgattttatctttgtctgtctctgtcagcgccactcgttgtctctcagtatgacctggacttgcccctgcacttacccttgtcctgctgaaccatctccatgcactgtccaattccatcagtgattcgggctccttccaaggctccccatgactgctgaagtttgaattcttagcagtacgattcgttttcttgtaaggtgagcagcttaggaaagattggccatcttcctgtgcaaaaagaggcaaacttaatttctactcaaagcatgcttgaatttggaatcagggcttccactcttccgaagttggagtgtcactgcgacaggcatgtgtcccgaagggctcgtgtctctgctatactcaaagttcaaatggagtccagcaagccagatctcctttacttctaggttcactcaacagtttctcctctgctttagagactgccttgaaaatcttcttgtcctgctgttgtgttttggctttgga

SEQ ID NO: 21728 - DNA, 1096 bp, Homo sapiens
  misc_feature 1, 2, 3, 4, 5, 6, 7, 1095, 1096: n = A,T,C or G
nnnnnnnaattcgcgtatggttcttctcagtatgctcgggctgctctgctatgttcctcactaagtgcttactggcacacatcaaaagagccgttaggccccatcggatcactgcgcaggccaggcttgtggatcgcttaacgtatgtagtgctgtcccgttagtcgtatagggctagtcagactctgcttcactggtaagttggttccaatagtcccgtattcggctggctgccagttgtccaaggcgataagaaattctgatagaataatttcgtcagcggggtcgtctgtccgggccagaccgtccaagcttgactgggttttaattagtgaagattgtcgtaaaccgcttggtaccgtaagaattcgttgaagcatttagatgggggttcgatatccgcatgacccatcttgtgcctaagtgtggttctatagtattgtatgattctttcaggggccattcattattttctaatcacctatggctatgcttcatgtgtcacgggaagcatagactaggaagcctagaagttcacctgtttttattggcagtaagaagaaagatggcttaatggtgccaattacacagctacctgtccaattacacagctacctgtccactgatcaggcagcttagcataaggtcagttgaagtccttactgtacaagtccaaattttaaggaaaattattcccgcgatgagtttcctcatgcttcggccatgcgtgaaccagtcagcttccgggtgtgaccggaacaaggcttgtcgtcttcttcagagtcactttgcaagggttggcaaagctgctcccatccacgtacagctcccagtctactgatgtttaagggtggtctcggtggttgggccaagttgtagatgtccggactccaagtgccagttccttcctggtgttcagccactgtgttaatcttccgtgggggcctgctacacgctgctctggcgaggcgttccattggggcaattgcctacccgggagcgctctttggatcacgtcactcaggctggccggagttcccctcacggatgctccacagggcaggcctaagccgcctaaggggctgcctcggccann

SEQ ID NO: 21729 - DNA, 1016 bp, Homo sapiens
  misc_feature 1, 2, 4, 43, 76, 82, 991, 1015, 1016: n = A,T,C or G
nncnaaatgaacagttgtgaaagatggcacaggaaccaggcanaggcccaatgttacccacagcagaaagagggcnaggaanaggaagctcccagaggtgtgaaatggaggcatcaggccatagagaccccctactgaggctataggtagattgtgattagctggtgaggagaaggaataggaaatccctaggtgctgcggcagcaagaagagagggcgtttgctggtggtagtggtggtgagccatgactcaattcagttaaagggacctgaggacctacttctacctcggcaccatggaggctgccgggactatggcaaggaaggaggtgagactcccaaggcacattgaagggaattctggaaagctggcttggagagagcatggtcttctcactatatgaatcccttctgtatccctcccttcttttttttctctcctgtagtccagagaggttgaaatgtctgataacatagcaggtttgcgacatgaaagagatgagaacctagctggtctcctagtatccaatacaatattctttcccttacatattctttttaaatataagatatttttattgaaatgggtgattatgacaaaggccttaggagagctcggtccaggggagcaatagagaagaactcagagaaaaagacaggctttgttttcccaaacattttccttatatccctggcttgctctttcccctgtgagcaccctggagctccagccctccgtcaccttctttctcccattttgcctgtgacttaggaatgaacgtgatggttaagctaccttcattaagcagcatgaccgcttcctgagctcctgctgccgcatttaggccctgtcagctgtgaggccactggtgctgagtcagagggaaaagctcagaacagccttgagcagcgaagaataaagcgtgactcatctcgtcctgcccacccctcacactggactataaataccctccctgggtctgtgtgctgntattccaaacgatgcgatgaatann

SEQ ID NO: 21730 - DNA, 1805 bp, Homo sapiens
  misc_feature 1, 2, 3, 1805: n = A,T,C or G
nnnatactctcagtggcttgcgcgtgtctgcctctcacactagtgttgtgactagctgatgtgttctcgctcactctctgtctggggccggtggcccccgcgtattgtgagccccctcttgttggctcctctccccgtttcccttctggcgcgcccttttttttggacccatccggtatcgcgttctttgtaaagccgtggtaaccgtcataatttatggcgccttttaaactccgaagatttataaatttctgacttgttaggactataaatactaccccctcttcccccatgaaaaaagcaattgttacaaaaatataaaatatactagcttctacgatttaaccttttcaccagaaacctcacgaccctgggactaatcctggtttatataccacacagcaagcacaagtgcaattttctccattttttaaggaagaaaaagttttagaacattcccttttgttatttgagattgtggctactttcttcataggggctgtgatgtcggtgggtaaggacagttgggagtttctgtttcctctgcacggacccggtgtggaaatcaagcatagaggctgctgcctcactcctcggcctcttctgctttctctccagcttctccaatcccattttgggacatgcggggtcccaggctcctgagcttccctaacttcccactggggaaggcagggaggatggggaagctcccagtgagggaggcgagggctaagcccgtagcaccgcagcctcgagtgtggtcggcccgcccagggctgctaatggcagagaagccgcatgctgggggatggcaccctcctgtactgggagaagcctgatgccacaggtcagagtctgcagcctgggaggggagccggaagctaacatgaaggcaaaacactctgcatgaaagcacggcaatgaacctccaaccacgactgactcctccacggcagccaagctgccaggcacttttaccacctaaaagctaggaaaccgaccagattcagctcgccaccattcaagaaaggacagggccttggctgctcggcaggtcccggggattgcccttgtggggaggatattttcagccctcatttccccgctgtcgccagcagggggcgatgtgctcacaggctcggtcaggggagaacaggcaccggtcacccgcgggatgggtccacaccattccagcggctctctccacggaagtgggacactgccgggctgcactatgtgtcactgaaattcagggagacctctcagacggggttccagcctacgcatgttcaagggaacccctcattcccaaagcccgccgggcgcacagaattctcaggcctggctgcgttgctgggaagcggaggcccagttcctcctgcagcctggctcacacccacgcctcacagtggggccctctgaccgtggccgcagcccccagcatctaccccaagctagtgcaacatcctgcccagtccacgtgctactgcgctcccggcgcctgcctccaggccaccgggcggaccctttctcagccccaggggccttccaggcccttctgttcaaaggaccggatgcttcacaccgctaagggctttatttcacagatcatggtggtgagtttggatttccagccctcaccacggttaagtcacacatttcccgacacctgctcatttctccagatctgaaacatctcacccaacacatcctagttgttgtaaaccccaaatgaactttccagaagcaaaaacaataacagattcagagaaccccggtcacacctgctgagcaggtcggacgcn

SEQ ID NO: 21731 - DNA, 512 bp, Homo sapiens
  misc_feature 1, 2, 3, 4, 5, 6, 7: n = A,T,C or G
nnnnnnncacaaattaaaactgatatttagactatttctcggtccactaaatttctctcatcctaaactcctgctaaccacatgtacactgtctgtctttcaatggcgatattattttgatcaatccatgaagattttgtcttattaccatatggttactgtttttttccctttgtatttaagcaatcttgggatacactttaagaccataaaaatatcctactgactgaagtctctccccttagatcaaatatccattgacggtgcttgcctggactaatgtttactgtgatggttgcaaaatttgtattttttttattctagttcattttccacattgatcagtcagcacttgacatcctactctaagcaagactcatacttttttgatgggagtgtaaattcttaacgacttcagaaaagagcaatgtggtgatatctatcataatctaaaatgcacgtcttgactcagcagtttcacttctagcactctatcctacaaatgtatttgt

SEQ ID NO: 21732 - DNA, 2170 bp, Homo sapiens
tatagggagtcgacccacgcgtccgtggaaattgaagttcaatctccaagggtactttgaagaggttgtttgtaggttattcggtaccccctgattcttaaagaaagtggaggagagggggaggcgacagaggaatggagggaaagggggaggcaagagagagaaacaggagaggatccctggttttccacaggtattttatcaaaaatgtatgacttcataactacagcactctaactttgctcagtctaactgctgaggtctcttcaaagtacccttggaaattgaagttcaatcttaagttttttgctgtctttaatttactagaattgcctaatttttagttgatttctctacagagcttagcttgtgtagttatttctcttttactgttgctttggtgtgtcttgaagtttgattgattatttttggtcattgagttcttagtgtagtttgctagatgattattaagattcttttgtgtctgacacttgtggtgagttgcttttgaaatctgttgagatttccatgtgagaactgataatcaggctcttgatctgcttccctaaattacttttttagagcccaaaccccaggtttagggtgagggtttgtaatacaaagaaacacttccatcacttctgcccttaacccttgcctctattacctaagcttagtaagtagttttcttaatattgtccaatgtttggtgttatctgcattgttttttgtttttttaattgtggttgttctgacgtgtgaaatttaaggaaagagccattttttaaaaatgccgagcagggcaatgcaagtacagccaaatattagacttgatgtgcaatcttcggtcctttttaatctggggtattataggcagtactttaaattgcaaagtcttccgggcctattttcctctacatttttgtaattaactctgggggcttacttgttttggcagtactgaaatcaaaggagctggttcttcttttctcccaattattttcatatgaaagcacctacaattagcctgttagtcctattcagatacatcaaatatcagtgaatgctttactattcgcacatttaagcatctttgttttacataaaattagagtatgaaaaccagtgttcaattttttatcttgttgagcttgtaaaatgccagcaatttaaaactaggacttttccccccataagccaaggaggtagaattactaatacaagggttaaagaaggtagattttgttttcaatatttgggtaatattagaaagattcttcccacagggaagaactagcaagtgtcccaattttttccaaacgttggggaggggaaaattcactgtatcatgaaaccctaagggtttgttgcacttcctgctttttaggcctggataacagtatcaccatccttatttacagaagggtaaaactgactcttaatgagaaaagctttataagttcaagggctgtaaaatatgaactacttagggtcgtttgccttccatgggaacttggctagacttagaaaaagctgtttgttgtgctaatgtaaaagtgtcatacaatttagaagatttttgaagatggtaaacttagaagaattctatgttctgaaatgcacacttttagaatgtttttctttgaaaacaggctaatagttctttctttttttgacaaagtttcagctcctctttaaagttattgtgtcatttttctggtttaaatttcccttatatttccacctgtaatgtcagtggcaacaacatcatacttcacttacttgttaatttactttttacccttattctaagagcaagttgagttgaactgaatcttccttgtcttagtaacaatgtataaatagtggcttttctgtacaaaaggttgtaatgcctcctgatggatataattttgtgattgtatttaaaagttgaataaatcacaccagcttcctgaaaatgttcataatgcatcttttggaaaacaaatacatgcctactttgtgcatatttgcattaacatggcaaagattgtatgaaatacctgtttttcagaaaataaaggttcagtctcaaaagataaaaaaaaaaaaaacaaaaaaaaaaatgaaaaaaaaaacaaagatgaaaaaaaaaaagagggggggggcaaaaatcccgggaggggca

SEQ ID NO: 21733 - DNA, 2143 bp, Homo sapiens
  misc_feature 1, 2143: n = A,T,C or G
ncggagctgaacttcctaaaagacaaagtgtttatctttcaagattcattctccctgaatcttaccaacaaaacactcctgaggagaaagaaagagagggagggagagaaaaagagagagagagaaacaaaaaaccaaagagagagaaaaaatgaattcatctaaatcatctgaaacacaatgcacagagagaggatgcttctcttcccaaatgttcttatggactgttgctgggatccccatcctatttctcagtgcctgtttcatcaccagatgtgttgtgacatttcgcatctttcaaacctgtgatgagaaaaagtttcagctacctgagaatttcacagagctctcctgctacaattatggatcaggttcagtcaagaattgttgtccattgaactgggaatattttcaatccagctgctacttcttttctactgacaccatttcctgggcgttaagtttaaagaactgctcagccatgggggctcacctggtggttatcaactcacaggaggagcaggaattcctttcctacaagaaacctaaaatgagagagttttttattggactgtcagaccaggttgtcgagggtcagtggcaatgggtggacggcacacctttgacaaagtctctgagcttctgggatgtaggggagcccaacaacatagctaccctggaggactgtgccaccatgagagactcttcaaacccaaggcaaaattggaatgatgtaacctgtttcctcaattattttcggatttgtgaaatggtaggaataaatcctttgaacaaaggaaaatctctttaagaacagaaggcacaactcaaatgtgtaaagaaggaagagcaagaacatggccacacccaccgccccacacgagaaatttgtgcgctgaacttcaaaggacttcataagtatttgttactctgatataaataaaaataagtagttttaaatgttataattcatgttactggctgaagtgcattttctctctacgttagtctcaggtcctcttcccagaatttacaaagcaattcataccttttgctacatttgcctcattttttagtgttcgtatgaaagtacagggacacggagccaagacagagtctagcaaagaaggggattttggaaggtgccttccaaaaatctcctgaatccgggctctgtagcaggtcctcttctttctagcttctgacaagtctgtcttctcttcttggtttcataccgttcttatctcctgcccaagcatatatcgtctctttactcccctgtataatgagtaagaagcttcttcaagtcatgaaacttattcctgctcagaataccggtgtggcctttctggctacaggcctccactgcaccttcttagggaagggcatgccagccatcagctccaaacaggctgtaaccaagtccacccatccctggggcttcctttgctctgccttattttcaattgactgaatggatctcaccagattttgtatctattgctcagctaggacccgagtccaatagtcaatttattctaagcgaacattcatctccacactttcctgtctcaagcccatccattatttcttaacttttattttagctttcgggggtacatgttaaaggctttttatataggtaaactcatgtcgtggaggtttgttgtacagattatttcatcacccaggtattaagcccagtgcctaatattgtttttttcggctcctctccctcctcctaccttccgccctcaagtagactccagtgtctgttattcccttctttgtgtttatgaattctcatcatttagctcccacttataagtgaggacatgcagtatttggttttctgttcccatgtttgctaaggataatggtttccagttctaccgatgttcccacaaaagacataattttcttttttaaggctgcttagtattccatggtatctatgtatcacattttctctatccaatctattgttgactcacatttagattgattccatgtttttgctattgtgaatagtgctgcaatgaacattcgtgtgcatgtgtctttatggtagaaagatttatatttctctgagtatgtatccagtaatagcccattcatttattgcataaaattctaccaatan

SEQ ID NO: 21734 - DNA, 3171 bp, Homo sapiens
  misc_feature 1, 3170, 3171: n = A,T,C or G
ncgtccggagacggcggatctcacccacgcctgccagcagctcctcggagaactgtgttcctgggtcagccctggcccagaggagcgccggggacccgcagagtgctgctgaagtcaaggctacaactcacctgggatctggggcgccagccctccggtgggcagggcgttctcctcccccaccccctccccgcacgatgacatcaagtgtttggcgttgagttgctccataaaagctgcccggggaagccaggagagcgaagggcggacgtactcgccacggcacccaggctgcgcgcacgcggtcccggtgtgcagctggagagcgagcggccaccgggagcccccggcacagcccgcgcccgccccgcaggagcccgcgaagatgccccggcgcagcctgcacgcggcggccgtgctcctgctggtgatcttaaaggaacagccttccagcccggccccagtgaacggttccaagtggacttattttggtcctgatggggagaatagctggtccaagaagtacccgtcgtgtgggggcctgctgcagtcccccatagacctgcacagtgacatcctccagtatgacgccagcctcacgcccctcgagttccaaggctacaatctgtctgccaacaagcagtttctcctgaccaacaatggccattcagtgaagctgaacctgccctcggacatgcacatccagggcctccagtctcgctacagtgccacgcagctgcacctgcactgggggaacccgaatgacccgcacggctctgagcacaccgtcagcggacagcacttcgccgccgagctgcacattgtccattataactcagacctttatcctgacgccagcactgccagcaacaagtcagaaggcctcgctgtcctggctgttctcattgagatgggctccttcaatccgtcctatgacaagatcttcagtcaccttcaacatgtaaagtacaaaggccaggaagcattcgtcccgggattcaacattgaagagctgcttccggagaggaccgctgaatattaccgctaccgggggtccctgaccacacccccttgcaaccccactgtgctctggacagttttccgaaaccccgtgcaaatttcccaggagcagctgctggctttggagacagccctgtactgcacacacatggacgacccttcccccagagaaatgatcaacaacttccggcaggtccagaagttcgatgagaggctggtatacacctccttctcccaagtgcaagtctgtactgcggcaggactgagtctgggcatcatcctctcactggccctggctggcattcttggcatctgtattgtggtggtggtgtccatttggcttttcagaaggaagagtatcaaaaaaggtgataacaagggagtcatttacaagccagccaccaagatggagactgaggcccacgcttgaggtccccggagctcccgggcacatccaggaaggaccttgctttggaccctacacacttcggctctctggacacttgcgacacctcaaggtgttctctgtagctcaatctgcaaacatgccaggcctcagggatcctctgctgggtgcctccttgccttgggaccatggccaccccagagccatccgatcgatggatgggatgcactctcagaccaagcagcaggaattcaaagctgcttgctgtaactgtgtgagattgtgaagtggtctgaattctggaatcacaaaccaagccatgctggtgggccattaatggttggaaaacactttcatccggggctttgccagagcgtgctttcaagtgtcctggaaagtctgctgcttctccaagctttcagacaagaatgtgcactctctgcttaggttttgcttgggaaactcaacttctttcctctggagacggggcatctccctctgatttccttctgctatgacaaaacctttaatctgcaccttacaactcggggacaaatggggacaggaaggatcaagttgtagagagaaaaagaaaacaagagatatacattgtgatatattagggacactttcacagtcctgtcctctggatcacagacactgcacagaccttagggaatggcaggttcaagttccacttcttggtggggatgagaagggagagagagctagagggacaaagagaatgagaagacatggatgatctgggagagtctcactttggaatcagaattggaatcacattctgtttatcaagccataatgtaaggacagaataatacaatattaagtccaaatccaacctcctgtcagtggagcagttatgttttatactctacagattttacaaataatgaggctgttccttgaaaatgtgttgttgctgtgtcctggaggagacatgagttccgagatgacccaatctgcctttgaatctggaggaaataggcagaaacaaaatgactgtagaacttattctctgtaggccaaatttcatttcagccacttctgcaggatccctactgccaacctggaatggagacttttatctacttctctctctctgaagatgtcaaatcgtggtttagatcaaatatatttcaagctataaaagcaggaggttatctgtgcagggggctggcatcatgtatttaggggcaagtaataatggaatgctactaagatactccatattcttccccgaatcacacagacagtttctgacaggcgcaactcctccattttcctcccgcaggtgagaaccctgtggagatgagtcagtgccatgactgagaaggaaccgacccctagttgagagcaccttgcagttccccgagaactttctgattcacagtctcattttgacagcatgaaatgtcctcttgaagcatagctttttaaatatctttttccttctactcctccctctgactctaagaattctctcttctggaatcgcttgaacccaggaggcggaggttgcagtaagccaaggtcatgccactgcactctagcctgggtgacagagcgagactccatctcaaaaaaaaaaaaaaaaaatttttggtcccccacattttccaagggagggagcttatttttggagcccgtttgggggcgaacgtcacacggccactggggcccagggggggcccccgcgttgggggttgccaacacacaaacnn

SEQ ID NO: 21735 - DNA, 1100 bp, Homo sapiens
tagggagtcgacccacgcgtccgcgtcaacagcagcaccatggctcaacagaagaaccttgaaggctatgtgggatttgccaatctcccaaatcaagtatacagaaaatcggtgaagagaggttttgaattcacgcttatggtagtgggtgaatctggattgggaaagtcgacattaatcaactcattattcctcacagatttgtattctccagagtatccaggtccttctcatagaattaaaaagactgtacaggtggaacaatccaaagttttaatcaaagaaggtggtgttcagttgctgctcacaatagttgataccccaggatttggagatgcagtggataatagtaattgctggcagcctgttatcgactacattgatagtaaatttgaggactacctaaatgcagaatcacgagtgaacagacgtcagatgcctgataacagggtgcagtgttgtttatacttcattgctccttcaggacatgggtcagtaccttgatacttctgattcctttttgttgttgttgcttactgttacctttatgtgcatactttagtaatctttaagtttgtgaagtacacacaactatagccattatgaagtactaaatttcatgtagaaatgtcttagttgaaaagccattttaagtcctatataagctaacagtgattttactccttagttcttcactcataaggattttccctgcttcatgaaataaacagtgttgccaccatggtttgaggtctcaatgtggcaaatttagctttcatgttgaccactctgctactaatagaaataccaaataaagagaagcagccataccagttagacatattcaaaataaatccaaagatgctatttattataagtttcatagaaatgattatcaaaaacacttgcatgccaatgttttcttgtgccatttctttctacaataaatctatttggcttctgtttcaccttagctgtcatagacgtgttgttcaggtatcatattgtcagtactaatcttttgtttattaggacttaagacctaagaatctagacattaatctaatctgattgttctgtttgttatagttagcctgtac

SEQ ID NO: 21736 - DNA, 2364 bp, Homo sapiens
  misc_feature 1, 2, 2359, 2360, 2361, 2362, 2363, 2364: n = A,T,C or G
nncgacccacgcgtccgcccacgcgtccggcagcggccaggaacgccagccgttcacgcgttcggtcctccttggctgactcaccgccctcgccgccgcaccatggacgcccccaggcaggtggtcaactttgggcctggtcccgccaagctgccgcactcagtgttgttagagatacaaaaggaattattagactacaaaggagttggcattagtgttcttgaaatgagtcacaggtcatcagattttgccaagattattaacaatacagagaatcttgtgcgggaattgctagctgttccagacaactataaggtgatttttctgcaaggaggtgggtgcggccagttcagtgctgtccccttaaacctcattggcttgaaagcaggaaggtgtgcggactatgtggtgacaggagcttggtcagctaaggccgcagaagaagccaagaagtttgggactataaatatcgttcaccctaaacttgggagttatacaaaaattccagatccaagcacctggaacctcaacccagatgcctcctacgtgtattattgcgcaaatgagacggtgcatggtgtggagtttgactttatacccgatgtcaagggagcagtactggtttgtgacatgtcctcaaacttcctgtccaagccagtggatgtttccaagtttggtgtgatttttgctggtgcccagaagaatgttggctctgctggggtcaccgtggtgattgtccgtgatgacctgctggggtttgccctccgagagtgcccctcggtcctggaatacaaggtgcaggctggaaacagctccttgtacaacacgcctccatgtttcagcatctacgtcatgggcttggttctggagtggattaaaaacaatggaggtgccgcggccatggagaagcttagctccatcaaatctcaaacaatttatgagattattgataattctcaaggattctacgtttgtccagtggagccccaaaatagaagcaagatgaatattccattccgcattggcaatgccaaaggagatgatgctttagaaaaaagatttcttgataaagctcttgaactcaatatgttgtccttgaaagggcataggtctgtgggaggcatccgggcctctctgtataatgctgtcacaattgaagacgttcagaagctggccgccttcatgaaaaaatttttggagatgcatcagctatgaacacatcctaaccaggatatactctgttcttgaacaacatacaaagtttaaagtaacttggggatggctacaaaaagttaacacagtatttttctcaaatgaacatgtttattgcagattcttcttttttgaaagaacaacagcaaaacatccacaactctgtaaagctggtgggacctaatgtcaccttaattctgacttgaactggaagcattttaagaaatcttgttgcttttctaacaaattcccgcgtattttgcctttgctgctactttttctagttagatttcaaacttgcctgtggacttaataatgcaagttgcgattaattatttctggagtcatgggaacacacagcacagagggtaggggggccctctaggtgctgaatctacacatctgtggggtctcctgggttcagcggctgttgattcaaggtcaacattgaccattggaggagtggtttaagagtgccaggcgaagggcaaactgtagatcgatctttatgctgttattacaggagaagtgacatactttatatatgtttatattagcaaggtctgtttttaataccatatactttatatttctatacatttatatttctaataatacagttatcactgatatatgtagacacttttagaatttattaaatccttgaccttgtgcattatagcattccattagcaagagttgtaccccctccccagtcttcgccttcctctttttaagctgttttatgaaaaagacctagaagttcttgattcatttttaccattctttccataggtagaagagaaagttgattggttggttgtttttcaattatgccattaaactaaacatttctgttaaattaccctatcctttgttctctactgttttctttgtaatgtatgactacgagagtgatactttgctgaaaagtctttcccctattgtttatctattgtcagtattttatgttgaatatgtaaagaacattaaagtcctaaaacatctaaaaaaaaaaaaaaaaaagggggggcggcgaagttaacatgtgggggccaagagagaaggatagggaagaaaggaaagggtcaaaaacggaggtgaacgggtgtgatagaagacagggggagaagtattcgtcaaaacnnnnnn

SEQ ID NO: 21737 - DNA, 1886 bp, Homo sapiens
  misc_feature 1886: n = A,T,C or G
ccacgcgtccgcccgagccccctcccccgggccgcccccgagcacgaagttggcgggagcctataaaagctggtgccggcgcgacccgcggacacacagtgcaggcgcccaagccgccgccgccagatcggtgccgattcctgccctgccccgaccgccagcgcgaccatgtcccatcactgggggtacggcaaacacaacggacctgagcactggcataaggacttccccattgccaagggagagcgccagtcccctgttgacatcgacactcatacagccaagtatgacccttccctgaagcccctgtctgtttcctatgatcaagcaacttccctgaggatcctcaacaatggtcatgctttcaacgtggagtttgatgactctcaggacaaagcagtgctcaagggaggacccctggatggcacttacagattgattcagtttcactttcactggggttcacttgatggacaaggttcagagcatactgtggataaaaagaaatatgctgcagaacttcacttggttcactggaacaccaaatatggggattttgggaaagctgtgcagcaacctgatggactggccgttctaggtatttttttgaaggttggcagcgctaaaccgggccttcagaaagttgttgatgtgctggattccattaaaacaaagggcaagagtgctgacttcactaacttcgatcctcgtggcctccttcctgaatccctggattactggacctacccaggctcactgaccacccctcctcttctggaatgtgtgacctggattgtgctcaaggaacccatcagcgtcagcagcgagcaggtgttgaaattccgtaaacttaacttcaatggggagggtgaacccgaagaactgatggtggacaactggcgcccagctcagccactgaagaacaggcaaatcaaagcttccttcaaataagatggtcccatagtctgtatccaaataatgaatcttcgggtgtttccctttagctaagcacagatctaccttggtgatttggaccctggttgctttgtgtctagttttctagacccttcatctcttacttgatagacttactaataaaatgtgaagactagaccaattgtcatgcttgacacaactgctgtggctggttggtgctttgtttatggtagtagtttttctgtaacacagaatataggataagaaataagaataaagtaccttgactttgttcacagcatgtagggtgatgagcactcacaattgttgactaaaatgctgcttttaaaacataggaaagtagaatggttgagtgcaaatccatagcacaagataaattgagctagttaaggcaaatcaggtaaaatagtcatgattctatgtaatgtaaaccagaaaaaataaatgttcatgatttcaagatgttatattaaagaaaaactttaaaaattattatatatttatagcaaagttatcttaaatatgaattctgttgtaatttaatgacttttgaattacagagatataaatgaagtattatctgtaaaaattgttataattagagttgtgatacagagtatatttccattcagacaatatatcataacttaataaatattgtattttagatatattctctaataaaattcagaattctaaaaaaaaaaagcaaactataacaagcaaaaaggcagacactgaagctcacaaactccaactaacatatgccttcttagttggcagacatgcttgcaaaactcctgatggctttgatatttaaaaaaaaccctagagaggggtttgtttacctccggtcaaattttgcacgtcacagacaccggattttggcacatggctaccccccgggggaccggcaacatgttgtagan

SEQ ID NO: 21738 - DNA, 438 bp, Homo sapiens
accctgacgccaaaaccagaaaaagacacaacaaaaaaggaaaactatgtgccagaacttaaagataactttaaaaaaaagacgtaaatgcaataaacagatatcaatagaaacaacaaaaaattagaaagtttggggtgatggagttaaagtttataaattgtatgagttatttattagttgggtttttttgcaatcagaattaaattgtcatcagtttaatatgatcatttataaaatgtcgtttacaagcctcatggtaacctcaaatcaaaagacctacagtagacatacaaaaaataaaaagcatgaaattaaaacacaccataagagaaaaatcacctttatacaaatgaagataaaggaagaaagaagggcgataacaccaaaaaagtcagaaaacaaataacaaaatgtcagtaaagtcctcacatatca

SEQ ID NO: 21739 - DNA, 536 bp, Homo sapiens
  misc_feature 1, 2, 3, 4, 5, 6, 7, 8, 9, 509, 510, 511, 512, 513, 514,515, 516, 517, 518, 519, 520, 521, 522, 523, 524, 525, 526,527, 528, 529, 530, 531, 532, 533, 534, 535, 536: n = A,T,C or G
nnnnnnnnngattctttctgatttcagtactaaacatccctcattatcattctcagggaaaagatgaatgtagaatctctgctgagctagtatttcctgacaccctgtttatgtgccttgtgaattgtgggcattgccatgtgggttatttcatttcatcttcacaatcaccctccaaaagtaaaaaaacaaagactgcctcactcaaatgtccactgccatcagtgccccatgagtatatatacggtgccaagctctgccatgatctctccagagaagaggagtaaaaccaaagaagtgaagacgtgtctgactggaagggaacatctgtgacaccttcttttccaaatgtttttaaagtttaagcagattattgtaaaggaaatatgaaaaagttagtacttaaaaaaaaacctccttgtatcaaaatgtcccattcccagcctctattcaatttcaatcttttaaatgtttgttttcatatttacaatcatggtgctatgtaatannnnnnnnnnnnnnnnnnnnnnnnnnnn

SEQ ID NO: 21740 - DNA, 736 bp, Homo sapiens
  misc_feature 1, 2, 718, 719, 720, 721, 722, 723, 724, 725, 726, 727, 728,729, 730, 731, 732, 733, 734, 735, 736: n = A,T,C or G
nnccacgcgtccgcttctctctggattttatgagtctatgctatctttttcccagaagcattaagtttgaagactcaatcaccaagtgcaatcaaagctacctttcctccccccaaaattaaatagacatttttaaacacacatacacatttcaagatcaacagagttcccttttgagcatggaaatatagccattgctaaattacgttactggactgaactccaggtattagttacagtggaaagtaagagattgtaggagactcttttcttagaaccaggacatggattatggcctggatttaattaactgttgctcatggcaccatgcaggctgacatttaattatattcagtttagccctttattatatatcctctcgttattctccaaatgttctaaatatcctggtcttgttttatctagctctgttgtaagctctttgaaatcagagctaatgtcacacagtacatactcaataaacacattataaatgaatttatgagcaaagaactaaatgaatgtggctacaaattcgagatgctactgttcacaatacaagatgcgaccttaacaattcaagaaaagtgaacaactgaaggtgagggggtttccctgttgttccctgaaaggcatccaaattctcctgaagctcccatgaataagatggaggtttaatttttctctctttggtcctctgctcttttaatctctccannnnnnnnnnnnnnnnnnn

SEQ ID NO: 21741 - DNA, 874 bp, Homo sapiens
  misc_feature 1, 2, 3, 742, 872, 873, 874: n = A,T,C or G
nnnagaaaaagaatcaaaggggaagaaccaccctttttaaattttaaattttaaggcgacaaaatttgggatattttttaaaccccaaaaaaatttgagggctttaaaaaggggggaaaaaaaagttggggataaataaaaaattggggcccttttaaaaataaaaatttttccccggggaaaaaatcccaaagggaaaaaattttttaattcccccccgggtttcccaaaaaattgttttttccccaaattttttaaaaaaggggaactgtgttttttttttaaaaaaaaaacccccagtatggaaaaaaaaaaaaaaaaaccccggggtttttttttttttttttttttttttttttttttttttttttttgtttttttttttttttttttattttttttttttttttttttttttttttttttttttttttttttttttttttttttttttttttttttttttgtgattttagcttattttattaatagcttatttccttacaaatatttccccacacgtttatttagtcgcaggcttcatgcatacaaaatgcacactgctatgatcatcgtaaccatcagcaagcaggcattgtcatcagcgcttctttatttctgtggtttctcagtctcttttattttctttctttaaaaaagaaaaaaaacttttttttcctggtcaacagggcctgggcaacatggcaagactgtctctttaaaaaaggaagaaaaaaattanccaggtgtggtggtgcgtgcctgtgcttccagctacttgagaggttgagataggaggatcgcttcagcatgggaggtcaaagccacagtgagtcgtgtaaaataaaaacattcagatgctcttagtgacnnn

SEQ ID NO: 21742 - DNA, 395 bp, Homo sapiens
  misc_feature 201, 202, 203, 204, 205, 206, 207, 208, 209, 210, 211, 212,213, 214, 215, 216, 217, 218, 219, 220, 221, 222, 223, 224,392, 393, 394, 395: n = A,T,C or G
acacccggagcccgaggcttgcggcgaccacgagcagcaatggactcttgtggctgacttcactcaccatgctcacactgcctccttgtcagcagtagctgtaaatagtcgttttgtggtcactgggagcaaagatgaaacaattcacatttatgacatgaaaaagaagattgagcatggggctctagtgcatcacagtgnnnnnnnnnnnnnnnnnnnnnnnngtagagctagggtttcaccatgttgcccaggcttgtgattttgatgtctatgattatagactaataggaataattatttctaaacatctgatttacacatacagagaggattagtattttttttaaaaagtatatcttaaaacacatatgctcattaatagttatgannnn

SEQ ID NO: 21743 - DNA, 747 bp, Homo sapiens
  misc_feature 724, 725, 726, 727, 728, 729, 730, 731, 732, 733, 734, 735,736, 737, 738, 739, 740, 741, 742, 743, 744, 745, 746, 747: n = A,T,C or G
actctaggaatttaaaaagacacaaaattatttttttccagactagtgtgccatggatttctgataagaattaacattcttgaacaaaggtatcagaaagggtaactcgagttgaaggtttgtgaatagaaggggaaatgtgatagaagattattcagaacaaaataagtagacaaaataacaaaagacaggaaaataagtctctttgtatccttattaatcatttgaaattatgctataatattttttaaaactcacctgtttggttctgggtgaagcagttcctgaaggagtgttttgtcagaatatattgttaggagaatagagggttctgtggccaagtaagtttgggaaatagtgggttagacaaagttgagttactgttggcctttcagacctttgatacgctaatgtgcattttaaatctccaagaagcacctctattttatacatcatttccctaatttattttaatatggatttcttgtttttgttttcttgagacggagtcttggtcttgtcacccaggctggagtgcagtggcacgatctcggctcactacaacctccgcctcccaggttcaagcgattctcctgcctcagcctcccaatttactgggattacaggcacctgccaccacgcccagctaatttttgtatttttagtagagatggggtttcaccatgttgaccaggctgattttgaactcctgacctcaagtgannnnnnnnnnnnnnnnnnnnnnnn

SEQ ID NO: 21744 - DNA, 2160 bp, Homo sapiens
  misc_feature 1, 2, 3, 4, 5, 6, 7, 2159, 2160: n = A,T,C or G
nnnnnnnccaggcgggcgtagaggccggaccgacgcgtggcggcagagggtatccaaggccggactggcgcgcaggcgctgacccgacctggcagtgagctggccgcggcttggctgagaggccttaaccccgccgggcggccgcgccctgcatgcgagttgggccgcgggcggggttggagcctactcggggcgactgcgatggacgccttagaaggagagagctttgcgctgtctttctcctccgcctctgatgcagaatttgatgctgtggttggatatttagaggacattatcatggatgacgagttccagttattacagagaaatttcatggacaagtactacctggagtttgaagacacagaagagaataaactcatctacacacctatttttaatgaatacatttctttggtagaaaaatacattgaagaacagctgctgcagcggattcctgagttcaacatggcagccttcaccacaacattacagcaccataaggatgaagtggctggtgacatattcgacatgctgctcaccttcacagattttctggcttttaaagaaatgtttttggactacagagcagaaaaagaaggccgaggactggacttaagcagtggcttagtggtgacttcattgtgcaaatcatcttctctgccagcttcccagaacaatctgcggcactaggtcctacctccagccaatgaatgggatcattctggatgtcaccagcccaataggctcagctcatgatgacagaacacatcttggaaagactgactctgttatgtaactcttcatttatgttaagtattaataggtcaaaaccaaaatgacctaaccctcctggacctatttatcctgaaacaccttcttgtattcattaaccatagtactcctccccacctcaagtagacacctctctcaggagcttctgagtcagacgcctctggagcgagccctatgtcaggcactccacctggggggcccttccccagcatacctgctggtgtgtaagtgtggactaacccgccgccaccaccctctgttccagcaggctctgcatgaatctttgtgcacttgcacctctttttcacatgggccacagtttcagtacttcagcctcagtggggttcctgatgtttatctagggtgttactcaagcccagtttgagattttggagtctcctgtgatcacatcttgtctcggctgtaggaatcaacagaaggagacgtcctctacataaaagctccatgtgaaaagctactcctagtcttaacatttgcagtccttgtgtcactgtcttctggtcctgatgtagtcccactgtttctagaagtctcttttaagcattatttttgaaaaaaaaaatatttttatagatgaatactcaggctaacctagtggatgtgatcttggaacttccatgattatccacttaaagatcaaagtattatatgctgtgtgctttttaggtgtttgttagtactgtgaaggcaaaaatgctttctacattgacattcattcctattttactgggcacctatgaatgtatgctgtgtgctagaaatagactaaaacatattcctatagcatgttagtgtgtttgcatgtttgctgaaaatcctttgtgtataaaccagtttgtaaggttctctgggttaggtagggactctgcagtttcttcctgtcaaaatctctcctaccaagatggtgttccactgtccagcccagcatgagtagcaggtagagcacagctttactggctgtttgtatgctttggtttagtgcaatgtgtggtagattacttatcagaaaacatatatgtcatctctagaacgaagaaaaagcatagtagttcaattcccagtgtgtccctttgattttttttttttaatagtaaaaataagaatctgtactgacttttcacttggccattctggttttaaaggacaagctacaagctctgtgtttctgtactgatgtgtcacttattaaatacttttgtaccatgagtaaaacttcaggtgtttcgcaagaaccaccattcgggtctttctgcgcggaaaggaaaagggcagtataggtccgacctttaagggaacggcccaagggtattagataacaaaaaaattattaaacaagtcatgann

SEQ ID NO: 21745 - DNA, 601 bp, Homo sapiens
  misc_feature 1, 2, 3, 4, 5, 6, 510, 584, 601: n = A,T,C or G
nnnnnnaaacaaaatatgtatatactgttatgcataaagaaccttaggtgttcattcgtttgcttctattgatactacattaaatttacttataatcataggttaatagtttaatgaaagcataaaaatttagtatgcctatgtttttctctttctttccagacggattccatttctaggtatgttttatttattttttaactgacatttttttcttatttttatctttgttaaaaatgtgttgctaggaatttatggattttgtaagtttatagaattatttgataataaaaaacaaattttgatggccttatcattgttactagctttctttgttaaaggctttacttcaagatcactagtcagagcaagtaagatttttccccaaatctctacaacaaaggtattccaaagtttcttaagttagttcaactatctcattattaaccatcagggactgataaaacccacacttggccagaaatgtatttgattaagtatcagatctcnctggagccctgcttagacaaaagagaccagtgaagcactttaaaagtgtcactaggtcaccctaatccagcctngggggctagccagggan

SEQ ID NO: 21746 - DNA, 939 bp, Homo sapiens
  misc_feature 1, 2, 8, 915, 916, 917, 918, 919, 920, 921, 922, 923, 924,925, 926, 927, 928, 929, 930, 931, 932, 933, 934, 935, 936,937, 938, 939: n = A,T,C or G
nncggcanaggttttttaaattggctttgccgcttcagtagtcacaggtagctacctgaccgagaagccgacttgggaattactgttactcgtgggtgatactgtcataaaggggttgaaagtacttgttagctgtatatgtcagaattgattaaagagaaccaactattcttgtgcaagggatggtattgtagttaattatgacatttggagaaactaatttctgtctgtcgacactatctctgttccatttagacttagagacttacatgggcaatgcttgactttttgcattcagcacagaaagttaagtaatccactgtggtaaaatattaactaaatttatatgacttcttgactgctgtaagtagagaatatttatcatataagcaccattttcctggattttttgttactacatattttatcttactgtcactattgtgtaaaatctttgaaaggaaaatgaatactgtgtaatagttaaacccattcataggttgcaatagagtgtcagccaaatgtgtcatacatcaaatcttcagcagcttttgcataatccaggagaattgaataatagttgaagttaattttgccagtgaaatgtagggaaagaaaaatgtttgaaatttaaattattcagatagctaaattcttaatcctaaaatttaaaccccttaattctgtctgtagtgttatatcaagactttttgatagtcatgaaactgagtaaaactttattcagattacttaaaaacagcttttcctgtggttaataacacctttattttgaacagagtactcttaagcaacttatattgtgctgattaaagatttaatctgtgcatattttttaccctgttgtttatttagttttgataactgtgaaataaaccataattaaatcaaaaaagnnnnnnnnnnnnnnnnnnnnnnnnn

SEQ ID NO: 21747 - DNA, 1932 bp, Homo sapiens
gcgtccgaggacatcgacaagaacggggatgggtttgtggatcaggatgagtatattgacaaggaaacttcaggctcagtcactgaactaagtcaaaagccgggatttatcttttggcttctaaactcagttctttctactccaccacatggccttcatcatgaataaattactgcatcattatccccaagaaactgcctaccagctgtttgagttaggtctctggattggttgtcgcctttcctaaagctcaggagcggatatgttttcccatgaggagaatggccctgagccagactgggttttatcagaacgggagcagtttaacgaattccgggatctgaacaaggacgggaagttagacaaagatgagattcgccactggatcctccctcaagattatgatcacgcacaggctgaggccaggcatctggtatatgaatcagacaaaaacaaggatgagaagctaactaaagaggaaatattggagaactggaacatgtttgttggaagccaagctaccaattacggggaagatctcacaaaaaatcatgatgagctttgatagacactcaccagaatatggcagactgtcataggcattctgttattgtcttggattgttgctacaattgtctaatttacagcagttgtgatcccacaaaaagcaagtttatacctcagattggggtataaaaattgtttttcgctcagtatttactggaaaatggacatcactagtctttcagtaagatttctctcaaaacacgtgaaaaccttggtaaattgcaattctttctggggatatattggtacaacatgacttaaaactttttttttctattaaaacttaaaggggaacaaaactaaaaaaaccctgttcttcagaaggtgagtgggttgagggaggcagtaatatgaagtgactgctgtgtattttaactaccagattttttatatttgccactgttaaatagttggaaaggggaaattctgattaagcgaaagtggtatcatcctaggtaagcttatttcagaacaagtctaatatttcagattctttcttttcgactttatactctgagttattacttactgtaagtggtgtatatgaaacctccatgcattttccagtatggatctgctaatatgcacagtaaatccatgtctttgtttgtttttctattaaaaagcaatcaagaaagataatgtgaaaaagaaaggaatttagaggtagggaaaagatgaatgtcagacatttgaagaactatagtaaaatgataaacactaaatatacttgagaaaactttcttaatatgccaatgaggtaggcctgatctttgaaatagtgaataggaatacaatgcatttcctcagtgatcactgattagaatgagttggtgggatccttgggaagccaaacggagcggagttctggatcatgtcccatccagtccagtgaatccacgacccgcagacctgtccccccgcaacagcttataccatggaatgaggacaaggtgatactctgagctgtggactgaactggcagacacaacctgtacagattgaaatttcaccttgtaaggaggaagtgaatgaaataaaggatcccctaaggaaaaaaaaaaaatgtatacaccagatcatatatattcctatgcatgaaataaactatagactacaacgaaatgactatacctacatgatctaatgaaataacaaaaagcgggcgccttatactacttcgtcgagcctatcaaccactctttataaggcgccatatagattaacgaggcgcgcgttacatcgaatgaaacggtgatactaccaccttctgtgtctgacccacaattccgtaatttgttgtccctgtgtgggttgttaataacaaatttacttacttgtcataatcatcgagcactactctca

SEQ ID NO: 21748 - DNA, 1022 bp, Homo sapiens
  misc_feature 1, 2, 1018, 1019, 1020, 1021, 1022: n = A,T,C or G
nncctggtggcgaattcggccgaaggcggagctgggtgcgagcgccctaccgctttcgctttcccttcgcggtgcccactccactccttgtgcggcgctaggccccccgtcccggtcatggccatgctcagggtccagcccgaggcccaagccaaggtggatgtgtttcgtgaagacctctgtaccaagacagagaacctgctcgggagctatttccccaagaagatttctgagctggatgcatttttaaaggagccagctctcaatgaagccaacttgagcaatctgaaggccccattggacatcccagtgcctgatccagtcaaggagaaagagaaagaggagcggaagaaacagcaggagaaggaagacaaggatgaaaagaagaagggggaggatgaagacaaaggtcctccctgtggcccagtgaactgcaatgaaaagatcgtggtccttctgcagcgcttgaagcctgagatcaaggatgtcattgagcagctcaacctggtcaccacctggttgcagctgcagatacctcggattgaggatggtaacaattttggagtggctgtccaggagaaggtgtttgagctgatgaccagcctccacaccaagctagaaggcttccacactcaaatctctaagtatttctctgagcgtggtgatgcagtgactaaagcagccaagcagccccatgtgggtgattatcggcagctggtgcacgagctggatgaggcagagtaccgggacatccggctgatggtcatggagatccgcaatgcttatgctgtgttatatgacatcatcctgaagaacttcgagaagctcaagaagcccaggggagaaacaaagggaatgatctattgagagccctctctcccattctgtgatgagtacagcagagattctccgttcttctctggttatgggcccattcccatgttgtggtttcctccgcctcgcaaatttttccctaaaaaaccggttttgggggaaagcgcttccctaagagcccagnnnnn

SEQ ID NO: 21749 - DNA, 1177 bp, Homo sapiens
  misc_feature 1177: n = A,T,C or G
tatagggagtcgacccacataccccaagcaatacctgcaactgaggattcttcccggggagaccgcagcccatcggcatggctcaagagtttgtgaactgcaaaatccagcctgggaaggtggttgtgttcatcaagcccacctgcccgtactgcaggagggcccaagagatcctcagtcaattgcccatcaaacaagggcttctggaatttgtcgatatcacagccaccaaccacactaacgagattcaagattatttgcaacagctcacgggagcaagaacggtgcctcgagtctttatcggtaaagattgtataggcggatgcagtgatctagtctctttgcaacagagtggggaactgctgacgcggctaaagcagattggagctctgcagtaaccacagatctcataggaaatgttcaacaattctgtgaaaggtcacaggacccaattggagaaatcatatgaaaagcatagttggtcttggtgtcatatggatcagaggcacaagtgcagaggctgtggtcatgcggaacactctgttatttaagatggctatccagataatcctgaacactgtgtatttattttatttagactaccagcaaagattaaagcatgaaatgtaaaacatctgataaaacttacagccccctacaccaagagtgtatctgtgaaagagctcctacacatttggaaacactttagacatcgcttaatcatggcacagtttcgccctgttctacgacagttggtcgacatggtgttactgttcctgtcgaatctcctggatggccaccaagtttcaagttgctctttgtctatttcaagaacaacccgtatttgcaacaagtaacgaacagaacactagacaacagaccaacacaaagtttggtgtgcgagccgcctcacgctaccgagaacgcaattcgtcaacaccattgtgtggagcccggacccagatgatatagtaacacgtgccagaggtactcagaagacactcggtccactaagcggttgcgtcctaccaaaacacgcgcggagacagggctgtcaccaaccagggatggtgtatgctcctcaatcgcgacaacgacatcaccacagcactatgatgaataggcgcaacacagcagcagactgatagctcaaagcagcgagacgagagacgagacn

SEQ ID NO: 21750 - DNA, 1373 bp, Homo sapiens
  misc_feature 1, 1367, 1368, 1369, 1370, 1371, 1372, 1373: n = A,T,C or G
nacgcgtccgtttatcatgttggccaggctggcctcgaactcctgacttaaagtgatctgcccgcctcagcctcccaaagtgctgggattacaggcgtgagccaccacacagagcagaagttttccaaaatgatttttcttgcctgtggtagttcgatatctcaatgcctatactggaatagtgctacttcgatgcagaaaagaattctatcagcttgtgtggtcagctcttcccttcatcacatacttggagaacaaaggacaccgttacccatgctttttcaacacattacatgtgggaggtaggagtgaggtggtatggctactgattttcaattggtgacacgttcacagttcagtctaaactggtgggtgggtcttgctgctgtcccgctaacaagaccttccccctacctctgaaagtctgtaaggtcgagacctttcacaagctgttgaccacagtaactcatatgccaggtacaataagaacatgtcagaagttcctaattcagtacaacaggagacagctgttgatcttgttgcagaactgcactgatgaaggtaagcaacactagcccagtgcccactgagcagtgactgaccttaagctgaagaaatcactcccaaagatatctttcatccctgttatctgccttctccaggagagcgggaagctatccagaagtctgtgacaagaagctgcttattagaggaggaggaggagtcaggtgaggaggctgcagaagcaatggagtgaacctctgctccccacacagctggctacactgctcaggcttcaggcccacttgttgaacagaacaatctgggtagcaacagcatcttccacagttttccaaactggatagctgccaaccagcagacattacccacttgaaatggagtactcagttaaactgaagttgcctttacctagcattccctggtgaagtgttgcaggttgtgaactctgtagacatctttattgcttggctaagagtagatttaataaatgtatctggtttccgtggcatttagcatacttatattacagaaagggcttatggagtccatgcttggccaagtctctgttctctctctatccctagcctggtgggaagactgactcctatgtggtactagttaaacttttttttttgagacagtcctcagtctatcaccaggctggagtgtagtggccacgtatcggtccctggcaacctcgctcctggttccagcaattcttccacttagctttccagtactgggctccgacgtgcccccccgttcggctatttgatctccgccacacggcttgcgttgcccggggtgcgacccggcaatgctgtctgcctcgcgcgttcgctcannnnnnn

SEQ ID NO: 21751 - DNA, 3858 bp, Homo sapiens
  misc_feature 1, 3712, 3713, 3714, 3715, 3716, 3717, 3718, 3719, 3720,3721, 3722, 3723, 3724, 3725, 3784, 3785, 3786, 3787, 3788,3789, 3845, 3846, 3847, 3848, 3849, 3850, 3851, 3852, 3853,3854, 3855, 3856, 3857, 3858: n = A,T,C or G
nagtcgacccacgcgtccgatttcatcctgttgcccctccgaaatctattgctttagattcagagcccaagcctctcattgatgtgagtgtcatcacaagatttaatgagtacagtaaagtcttacagttcaagtattttatggtcctcattcaggaaatggccttaaaaattgatcaagggtttctaggagctattattgcactgtttaccccaacaacagaccctgaagctgaaagaagacggacaaagttaatccaacaagatattgatgctctaaatgcagaattaatggagacttcaatgactgatatgtcaattcttagtttctttgaacatttccatatttctcctgtgaagttgcatttgagtttgtctttgggttccggaggtgaagaatcagacaaagaaaaacaggaaatgtttgcagttcattctgtcaacttgctgttgaaaagcataggtgctactctgactgatgtggatgaccttatattcaaacttgcttattatgaaattcgatatcagttctacaagagagatcagcttatatggagtgttgttaggcattacagtgaacagttcttgaaacagatgtatgtccttgtattggggttagatgtacttggaaacccatttggattaattagaggtctgtctgaaggagttgaagctttattctatgaacccttccagggtgctgttcaaggccctgaagaatttgcagaggggttagtgattggagtgagaagcctctttggacacacagtaggtggtgcagcaggagttgtatctcgaatcaccggttctgttgggaaaggtttggcagcaattacaatggacaaggaatatcagcaaaaaagaagagaagagttgagtcgacagcccagagattttggagacagcctggccagaggaggaaagggctttctgcgaggagttgttggtggagtgactggaataataacaaaacctgtggaaggtgccaaaaaggaaggagctgctggattctttaaaggaattggaaaagggcttgtgggtgctgtggcccgtccaactggtggaatcgtagatatggccagtagtaccttccaaggcattcagagggcagcagaatcaactgaggaagtatctagcctccgtccccctcgcctgatccatgaagatggcatcattcgtccttatgacagacaggaatctgagggctctgacttacttgagaatcatatcaaaaagttggaaggagagacttaccgataccactgtgctattcctggaagcaagaagacaatccttatggttacaaataggcgagtgttgtgtataaaggaagttgaaatcctgggccttatgtgtgtagactggcaatgtccatttgaagattttgtatttcctcctagtgtcagtgaaaatgtgctaaaaatttcagttaaggaacagggtctgttccacaaaaaagacagtgccaatcaaggctgtgttcgaaaagtttacctgaaggacaccgccacagcagagagagcatgtaatgccattgaggatgcacagtcaacgagacagcagcaaaaattgatgaagcagtcatcagtgagacttctcagaccccaattgccatcttaatcacagacctcaggggctccaacagggagaaaaaacaatcactggtcttgtctataagtcactctgctttatcttgctaaagacaatttttcaagcaatcctttagttttagttttctggaatagctagtattgggttttctagttttttcaccttttagtttttactctaattttgtaaccatgtatatgctagcagtccacttctacgccaccacccaaatgggtcagacccttgaagaaacgtcacttcaaactcagaatgaaattttcattaatattaaaattgtgaagcaaaggtcaataggcttatatttaattaaagccttactgaagaataagaaatgagcttagaatgactagtgttctttgaaaggtttttttatttttgtttttttggggtttttttttttttttttgagaccgagtcttgctctgtcgcccaggctggaatgcagtggtgcgatcttggctcactgcaatctctgcctctcgggttcaagcggttctactgcctcagcctcctgagtagctaggattacaggtgtgtgccaccacgcctgggtaattttttttttttttgtatttttagtagagatgagtttcaccatgttggtcagtctagtctcgaactcctgaccttgtgatccgcatgcctcagcctcccaaagtgctgggattacaggcatgagccaccacggcccgccaaaaggctttaacccatgaacaaatgttggatcctgacattttgtttaagagtgatttgttcaataattgaactgagttaacattcttggtaaaccaggtaattgaatgaagaaaggtcactaaagggagaaatgacatgttttctattttcttttcatgaaaacactgtttttccccctaataaagcatattttactttggtgcttatttttcctccttgcagtctaataaaaaaatctggacaatcaaaccttaaaatagctacactctgccctctgtaatgtagcattcataaaaatttggaagtatttacatcctctttcaagatgagcttatatgacacaattattatttgctgatacatgaaaatactgcactttaagtttctcaagactctgaaatatgtaaaattcaatatttttatattcccagaaattgtttcttacaggttgaaagtcttttaagggcatcacaaattaacatttactcctaatgcacgcctagaatgtattttaaatacttactaagaagaatgaaaattctttggttgttttatatataaataaggcatatataatgacactgtgttctgtgagggagcaggccctgtgagaatcaattcaggacagtatttttttttgtcctttctccatccttgatcagagataaactattaaaactttaaaaaatactcaaaaatatgtaagttttttggttgaacctttagatttgctcataatgtttaacataacaacatttatttcaaatcactgaattcatggagatgtggacacgcttggtttgctctatttttgtttatgtgtgatagtggttctgtcatcatcattcatgttttttaaggcctggtcataaaactttaaattttactagtgttacttaatgtatattctaaaaagagaatgcagtaactaatgccctaaatgtttgatctctgtttgtcattactttttcaaaattatttttttctgtaaagtataatatataaaacttcttgcttaaattgaatttctatattagtggttaattgcagtttattaaagggatcattatcagtaatttcatagcaactgttctagtgttttgtgtttttaaaacagaattaggaatttgagatatctgattatatttttcatatgaatcacagctgttgacaatgtcccatatatttaagaaattatatcatactgatactatttgtaacattttgatttgatttaatctccagggacagaaataattcattggtaaagtgtaataatgcgttttttaaaaatgctttgagaggtaattacttgcatatgagagaaataaaacatttggcacattgtttacaggtgtgaacacccaattggaccaatcattcannnnnnnnnnnnnntccccccatcaccaacaattcaaaacggcccaccccggcccccccttaaactaatatannnnnngggggggcccttaaatttttttaaaaaaaaaacctcccacacctcccctgtgcccnnnnnnnnnnnnnn

SEQ ID NO: 21752 - DNA, 513 bp, Homo sapiens
  misc_feature 511, 512, 513: n = A,T,C or G
acttcctatggaaacctaaaaactgtttatttagttttccccatacctgtgaaatggccctcagaccataagagttccatagtagaacaaaagcatattaatgatcctgaaagtttcccagaatacctagttagaaagtaactttcaatgccttcctagtgcaacactaaaaactgcagtatattaatgcattgttgctcctatttgtattctcaaaaagaaattttaataaaaagacaaaattcaaatcttatgttgaagattgcatttcaaaagacatttaaaaagttcaatcatcagagaagttgatctcatcagatatcatcttctgctaaatgcaatataaagcttttcaaatgagatttgtgatcttctaaaagaacatacttcagaacagggatctctggggaaaaaagaaaaccactaaaaaggattcatggtgattagttttaattggcaaaatgggatgaaagcatctttatgtaataaacttaaacacaactacttaccnnn

SEQ ID NO: 21753 - DNA, 1405 bp, Homo sapiens
  misc_feature 1, 2, 3, 4, 5, 6, 7, 8, 1404, 1405: n = A,T,C or G
nnnnnnnngacccacgcgcccgggatatagaagatactaaaaactataaaaattagatagcagtgcttgcttctttatagatacattagaaatagtgttccaaataacatacttgaatatcatctttgaagtaaacaccatgttagactccctggtgataccactcttgaattggttaatatgtaagaacattgttttttattaccagttgatctctcaaatgaagtgatgactttttccatattctgtgtacccttgagcatgttgtgtctttttaaaaaacaaaaaaaagaacaaaaattattttttaaaatgtaaatatttattaccatcagacttggaaaatggaaagtattttattgtcatgattgaatttagattgttacctgtattttgttcaggtttgagacatataaaagaccccacctgtaatagaaaggaatatagacccttgcctcacctgtattgctgtggatgtgttttgtgggtttttcattcgattttacaaaatagggaaaggcacttccagttgtatttagtaggcagttgttgtgaatcatttttttctcttataggaggagattcctctctagccatgtttctgttaaagtttcattaattgaagcccaagtttactttttactgtacatacttattttctaattggatttgaaatcagcatgattttgtttgacaaagcaaagtttaagattgaggtcagaaatactttaatggagcaaagacacataccaactttacatgacggtgtgagaaatagtcctataaactggtctcttcatcatttatgctctcactttagatatccaaatattaaaaggcaggctgacctgtatcacacagaattaaggcagtaattttctgcttcagtagatcaagggtagggctaaggcatcctgtggtaattctgattcacagctagatttgggaaacacaaagttagggaatggctatatgtgatttgctagttggagcagtcaaagtcttagctatcaagagttgtgaatttgaatcatggcactaggtcaggggtgctatggattgaaatgaccttaggtagatcccaagcgccggatctgcgcccccgcaatgggccaacggcacggcattggacgagccattaaacgaagacaccgaaggggtggctcgtaaaagagccccaacatcacatcgaaacaagtgggtacaaacagacgcagagaacggcacacaatcgacagactcgtctgatagaaggcaccacacagaagagatgatcaaccatcgcagtgtcgaacgacgagtacaacaaccatcagtcgcctcacagtaattaggcaccgaacgaagacagacagcacaagcgacgggcagccacaacattatgtaaggcgcgacacgaacgann

SEQ ID NO: 21754 - DNA, 4256 bp, Homo sapiens
  misc_feature 1: n = A,T,C or G
ngcgctctgtttttcgctttttctgtgtgtcactcgtctccgtcacgtgtttttccttctgtggggtccccactgtgtggtgttgttggacacccctcgtgggtcctcgtttatgtcgtgccaccgctcttacacggtccggtttccttatatttcgttggcctccaagcttgtgtgacccaattcctggtattgcttgcttggtgagcttctttgaatgttgttaaggacttatccacatcgttccttctgatccttaatttcttgctcaatgctgaaatgcagtaattccttctcatcttttgcagatatttccttctttttggcatgcaaaacttcctcacatacttcctcatactttctattcagattggccaatttttcatttaagctagaaatctgtgtctccaaatcactttttgttgctttatatttagacaagtcaactacctctctagtctctaatttttttaatgcttgtttagtattctgaacctccgactgaagtttggagacttcttccattttgttttggctttcttcttccttttctctcaagctggcttttatgattccaacttctttctcaaatgcttctttaatctgcaaatgctctgccaggggtacagaagagttcttttgattctccaacaattgatgcagtttggtcactgtctgctgctctttctcgtaacacctttgcatactcttcagttcttcctttagattttcaattgtgccattaagagattttttcagagcctcaacctgttccaatggaacatgttgtttttgcaaaagattttgcactgcaagtatctcagaagtctgtttggcattttcttctactagcttctctttcacattctttacttccgtgtatttctgtgacaagtcttttaactgtttgtttagctcgtctgtttttctgcttaatgctctttccatttcatgagacttctcaatgagaactgtcttatctctcaaatctttctgaagggtaaaaatctccttctttaacttgtcattctcttgcttgtttttcttgacttcttcttcactgacactatacttttgtgtctgctctgataactggtcttttagttctttctctgttgctttaaattttctctcgcactcctcaaagctgacaattggggcatattttaccttaatgcattcttgtattgtgtcgagctccttcttctgggctttaatttcggcatgcagtgtcacaatctcttcttggccttttctgtagttggccaagatttcagcattactatcctgcacctttctcatgctctgacttagcgagctcatctttgcctcgtgctctgccaggctgatgtactcagcttttatttggttctgagtgttttccaggtttctttttaatatttcattcttatcttttatttttacaaattcctgatttatatcttcaaattttttcttcacatctaataattctctgttagttttggctaacgtgtcattcagtgtcattttaacctcttcatgggttttaactggcacatactgattactcatcatcttcttcaagttagtgttttcagatgtgagagcgtgtattttctcctggtcttcaccacattttttcttaagttcagacagctgtttcttaagttcaacaatattggatttcagagctattatctctttttcatgtttctcaggaggtacaaacacagtttctaggcggcttacatccttacttaagctgtcattttccagtagcaatttctccatttccaacttcttttctgtatatttttgtgttacatctaaaagctttctattaagatcatcaataattgcatcatgtgactttttcatgtcttcacttacttttaaaggaacataatgatttttcatttcaattgttaagttatgtgcttgctccttgaggagcttattatccaaataaactttttcaatttccttttgtagtgtctgatttttcaatgttaactcagtgatcttcttcccaagttctcctgatttctgttctaatctgctcttaacctgttcatgttcctctggtttgacgtgctgagcaagcttggccttaacattctcaagttctctctttaactgtctaatttcactaagtgatttttcatgttctctttccatttctactaatttttttgctttctcattcacttcatttgataatgagctcttcatgttttcaaatttttcagctggaatggaaagggccaacttcgctgacaattcttttgcctggccttccatctctgtgacctttcttcctttcttctctcgctccatttcacacatactaagttccttctgtaatcgcttattttcttctatcagcttgccttcatccctcttaaactcttctactatcatctcattttgtttgatttggtttcttaatttccccacttctgctgaagcaccttcatattttactttcaagtctttcaactgatccttcagttcctcggttagtctgtgattccctgaggctgcttcacttgttaagtgttctttaagggcaagaaaatgggtctgcatttgtttaactttaccttctgactcatacatcctcttctgcacatcttttaatgcatcttctaattgctttatctgttcatctgaatcctccttgaccctttcacattctaatgctaaagctttgcattctgccactttgtgtgccagttcattttggagcttcagtcggtcttgttttgctgactcacagaaagttcgcattgcttctaactctttctttaaaatttcattttcagagtatgacgtttgactgggtaaagatagttccagaggtcttaacatagatctgctttgcatatgggctggtatacctggggaagtacactgtgagtctgccatatacatctgaccttgtttaagaagcatatcttcttttcggttactgaaatgacttcctgatcctaaatgatcactctcaaaatatttaaatctatttttcagagcctcaatagtccttaagctttcttcatgttgcttttctttagctgccaaaagggacttcagcttttctctctcgctttccagatcatcagcaaccataacttcctcattcagctgtaactgtaaaccattgactttatccaaaagtattctttgttcttgctgaatttttctcaacctctctttcaaatcttcattttcaatctccaaatcctgaatattttgatgctccctctgatgtgacttcacatttacttcatcttgcatgtgtgtcaaatttcgctgttgcaaagatggccctttcttccaaagttctctccctttgttggtattttccgatgcagtcttcaacaaggttagaatgtccagattgtcaccaattcttgcatagtaagaactatcatggccaagcgcatccagcaagcttatatcagcaccatttttaattaagacttctactgcatctctgcaaccatattcgcaacctagcatgagggcagttctgttttgtttgtctctggaattaacatccgctcctctatctatcagcagttgacatattgttggcctactcatctgagtagccagaacaagtggtgtccgcccgtctacatctttggcattcacagaggccccatggtcacaaagcagctgtatgctagaaggacaatctgccattgcggcatcgtgaagtgcagttcttccctgcaggtctgcatgctcagtgggacaattgtactgtagaagtttttgtaggcacaatgcatgtccatacttagcagccaggtgaagagcatttctccctgcagtgtcactggttgtaatatcaactccatgtataaggatggcattcaaacactcaagattcccctttgaggtcacaacatggaagacagatctgccttccacatctagtttgcctggattgaccccctttttagcaaggattgacgtcactttttctacatcccccctttctgctgctttcatcaatcggtcatcatatttattccaatctgctgcatgcgcgctggcggcggcggcgccagacgacgcggggccgggcacgtcctgcctcctcaggcgggacttgaggctcttcatggctaactcttgcctggcccccgcgcgaaccttaaaggctgcggagtgccagcgcgcaaggagtagacggcagcggctgcagcagaggcggcgcgggctgtaccagccccacctgcctgccactgcgggccggacgcgtg

SEQ ID NO: 21755 - DNA, 408 bp, Homo sapiens
  misc_feature 407, 408: n = A,T,C or G
actaattttgcaaattttctgtttgaagttatttcaagtaaaatgttattcaaagtgatcatgctgggcataagaaagaaaaaggaaaactgattgatgttaataagttatgcggtcatgccatctatactagcttttctggttttctgaccttagcctcttttttgaattattagtgcttataaagagctcaagactttttttttctttttctttacattttacttctaactgcattgatggtcttttctatggattattgtttcaaaattaaatgtctttttttctatgaataaagttaaaagttcccaggcctcatttcagatcagagcattttatgggcattgttataattgttaactctccttgctttctatcttgttctgaagaaaactcttgggcattann

SEQ ID NO: 21756 - DNA, 909 bp, Homo sapiens
  misc_feature 1, 909: n = A,T,C or G
nctgacaatactccttatcaagttgaagaagcagtggcagattatatgatgaatgtattaggctaagacctgagtctgctctggcacaagcacagaaatgttttgcattgtaccgccagggcatatacgggaaacaactcttcacaaatccaagcagctatgaaaggttttgaagaggtcataaagaaatttccaaggtgtgccgaaggctatgcactatacgcccaggtaaatgttttttcaggttttttaaaaataactgcatacatatgccaaatctcagtatggaaatcagaaaacagtgctatcatggttgcagcttctttggaagcaggtggctttgttcctgattgattctcatggcccctggttggtcccgaatcacctcagaagaggctcctttgttacacaatttggaaatcatggccctaaactcaatatggggaagcttaaggcgagaatttccctcctgtcttcatttggattggttttgcaaaaagtaattaccttaggaaaatttaccgtatgcaattggtggagaaaatatccacggaaaggcttctctttctatctggtcactgcctttttatatggctaggttgttgtaacggtttattttaatttatctttgctttatctaaaattcctgaaactctcttggtttaggattgaagctatggaaagcaggatttaaatctgaatttttttattgtagtctgaaattcttgaaaacttcttagttttaaatcatccatttaaatgaaaatgattagcttcttgtagtgacggtcatacattttcccctcaaataaaagatctctgaatgactcagttttctttcttaaagctgaaaattggttttggtgtctacataaactagccatctcaatactctatatcaggggtacn

SEQ ID NO: 21757 - DNA, 1879 bp, Homo sapiens
  misc_feature 1, 955, 956, 1873, 1874, 1875, 1876, 1877, 1878, 1879: n = A,T,C or G
nagctccaccgccgggtggccgccgcggcgcgcagtggcctgcgggggcccatattagcagcggttattcggtgagcggtggtggtttattcttccgtggagttaagggctccgtggacatctcaggtcttcagggtcttccatctggaactatataaagttcagaaaacatgtctcgaagatatgactccaggaccactatattttctccagaaggtcgcttataccaagttgaatatgccatggaagctattggacatgcaggcacctgttgggaattttagcaaatgatggtgtttgcttgcagcagagagacgcaacatccacaagcttcttgatgaagtctttttttctgaaaaaatttataaactcaatgaggacatggcttgcagtgtggcaggcataacttctgatgctaatgttctgactaatgaactaaggctcattgctcaaaggtatttattacagtatcaggagccaataccttgtgagcagttggttacagcgctgtgtgatatcaaacaagcttatacacaatttggaggaaaacgtccctttggtgtttcattgctgtacattggctgggataagcactatggctttcagctctatcagagtgaccctagtggaaattacgggggatggaaggccacatgcattggaaataatagcgctgcagctgtgtcaatgttgaaaccagactataaagaagggaaatgacttgaagtcaggcactgcttagctatcaagtactaataagaccctggtgttgtaactctctgctgaaagtggattgcgcctacacgagagatggaggagcgcatccgcgtccccaacaggggacgggtgtcacaacacgggaaaccggcgtggagaaacaacagacagtagtctacccatgggcgggggcaaccaagaggggcgcgatttgtgttgtgcccatctttactctctnngagccggcaggtagacaagtagagcgcgccaccaacagcagaactcagaccgactacaccgacgacctcacgacccacagcagccaacacacacacagcagtcacgaccatcgtacacgacaactccgagcgacacgaagatacgacgatgcagtacagctcagatacatacgagcatcagagacagcaaggctagacagacaagccacagcgacaagtagtcgacgacagcagatagcacttagtcagatagtcagacagacgaacgcgtacacagaactcgcaaacgtaggtgagagagcagacaggaaggtgacgagagatgagggaggagaacagccacgacagggcaagggggaacggaacgacacggcgacagagagcaagacagcacaaaagagagcagtatgcaagcaggcagcacgacgaacgagtagcagaggatggaccaggaacgcgaagcgcaacgaggacgagaggcgtgggagagcgcgagacacacggccgacacacgacgtacgacgcacaagctaagaaggacgagggacggggagacgaaggggcgcagacgtgcgaacatgtaccgagcgcgagacgacagcgacagacaggacagcgtggcggggagaggggagagtaggagttaagagagcagcaggcgggcgagggagggaggggagagggcgggggggaggagggagcaggagagggagcagcgagaggggaggagctaaggagcatagcacgaggcagcaaaatgagaaggcgcagagccagagggaggggagcagaaggagagggggggtgcgtatgaagaggtggagagtcgagcaagagagagccagggacacgacgacgcgcagacaggcaacacaccacaagacaagaccacagagcacaagaacacaccaccacannnnnnn

SEQ ID NO: 21758 - DNA, 375 bp, Homo sapiens
  misc_feature 372, 373, 374, 375: n = A,T,C or G
agggagtcgacccacgcgtccgctcagcttattaatgatatctttaaattatattacttttattctgttttccctctttgctgctcatgtgaaataaatatgaatcttatgtttgcacttatgctataaaagaaattatccttggggttaattattaagggatggggaaattaagagctaagagacaggaaaatgagttgtgaggaattggggtcaccagatttcattaaaaatttgaaaatatcactgtttctctaaactttaatttttatttgttgtatttttagcggttaagaagattgtctacccaatatagaacagaaaagatatatcccacagccactgaaaaaaataactatataaaaaaatggnnnn

SEQ ID NO: 21759 - DNA, 1015 bp, Homo sapiens
  misc_feature 1, 1014, 1015: n = A,T,C or G
naggcacctgccaccacgcccagctaattttttgtatttttagtagagatggggtttcaccgtgttagccaggatggtctcgatctcctgacctcatgatccgcccacctcggcctcccaaagtgctgggattacaggcgtgagccaccgcgcccggccaacttatatattttcaagattcacctcctctcaccaaatatttaactacctgctgaatacgcctctgtactaggcacataatggaactaaaaaatgctcatgtccagtttttgtgttgagtgaacaatgctgcagaccctaataagattgggtacagatcggcatgcgcctgtagtcccagctactcaggagaattgcttgaacctgggaggtggaggttgcagtgagccgagatcgtgccactgcactccagtctgggcaacagagcgagactccatctcagaaaaaaagaaaaaaagactgggtacagatgtgatattggaagaaaaagatcaagctgatgaggttaggatacccaggccctttggacttaaagatcactagtgtctaaattccatcgatggcatttcagtctataggtaaacttcctggaagctggatttggagacagtttatcatctgattattgggctttcgtataggtccttagggagcagcttacctgaaatgcatttagtgtacaccagtctgtaaacttcaacctgtaatgaaagtgtaataaatgtacattgagttgatgtgataatgtgatataataagaaatatatatttgatcttcctatctagttcctggtgcagagctcctaaaagcctggtaaattcacaagtgatggagtacatctttgtctagtattggtctttgaccccagttcctgaacaaagctcctaaatttctttaaattcccaggataggagaattgcatgcctatgaggtcatcttgatggcactggatactcagatgggggtgttcacaagacacatcgattggagttcaacgtagttccactacgaann

SEQ ID NO: 21760 - DNA, 559 bp, Homo sapiens
  misc_feature 515, 559: n = A,T,C or G
acttggatatcactgctggttattcaggtcccaaagacacttcaattagcatgtaatgaaggccttcaaggcagggggttaccttctggcctagaatgtgtctagaaatgttgtctaagagctagatcctggaatggggacctcgtgactacgactggtgccctattctactgtggctgatctggtatctaggaagcaagacaaagccttcccctctcttccttctcctcttctcaagtaaaaggaaagggtgtcttttggagtcatgagctgtgaagcctgtagttaagggaggggtgacactagcactcccttggctgtcccagctggtgtctcaatatgtcgtctgctccccctagttcactgtctctgggcctagttcagctctaggattcacctaagagttacagtccttatggcctagactgcctttcaagtttacttagagaccaagagcactttgactctcagtggcaaggtctgcaagcactcaatcttggaccactaagatctancggttcccctctgactagggttggtttaagtgctccctaagtgn

SEQ ID NO: 21761 - DNA, 3561 bp, Homo sapiens
gggctccgccctaaccgcccccccctcacccgctccctcccgcctccccgcccgccccacttctcattcacttggctcgcacggcgcagacagaccgcgcagggagcacacaccgccagtctgtgcgctgagtcggagccagaggccgcggggacaccgggccatgcacgcccccaactgaagctgcatctcaaagccgaagattccagcagcccaggggatttcaaagagctcagactcagaggaacatctgcggagagacccccgaagccctctccagggcagtcctcatccagacgctccgctagtgcagacaggagcgcgcagtggccccggctcgccgcgccatggagcggatccccagcgcgcaaccaccccccgcctgcctgcccaaagcaccgggactggagcacggagacctaccagggatgtaccctgcccacatgtaccaagtgtacaagtcaagacggggaataaagcggagcgaggacagcaaggagacctacaaattgccgcaccggctcatcgagaaaaagagacgtgaccggattaacgagtgcatcgcccagctgaaggatctcctacccgaacatctcaaacttacaactttgggtcacttggaaaaagcagtggttcttgaacttaccttgaagcatgtgaaagcactaacaaacctaattgatcagcagcagcagaaaatcattgccctgcagagtggtttacaagctggtgagctgtcagggagaaatgtcgaaacaggtcaagagatgttctgctcaggtttccagacatgtgcccgggaggtgcttcagtatctggccaagcacgagaacactcgggacctgaagtcttcgcagcttgtcacccacctccaccgggtggtctcggagctgctgcagggtggtacctccaggaagccatcagacccagctcccaaagtgatggacttcaaggaaaaacccagctctccggccaaaggttcggaaggtcctgggaaaaactgcgtgccagtcatccagcggactttcgctcactcgagtggggagcagagcggcagcgacacggacacagacagtggctatggaggagaatcggagaagggcgacttgcgcagtgagcagccgtgcttcaaaagtgaccacggacgcaggttcacgatgggagaaaggatcggcgcaattaagcaagagtccgaagaaccccccacaaaaaagaaccggatgcagctttcggatgatgaaggccatttcactagcagtgacctgatcagctccccgttcctgggcccacacccacaccagcctcctttctgcctgcccttctacctgatcccaccttcagcgactgcctacctgcccatgctggagaagtgctggtatcccacctcagtgccagtgctataccctatacccaggcctcaacgcctctgctatacccaggcctcaacgcctctgccgcagccctctctagcttcatgaacccagacaagatctcggctcccttgctcatgccccagagactcccttctcccttgccagctcatccgtccgtcgactcttctgtcttgctccaagctctgaagccaatcccccctttaaacttagaaaccaaagactaaactctctaggggatcctgctgctttgctttccttcctcgctacttcctaaaaagcaacaaaaaagtttttgtgaatgctgcaagattgttgcattgtgtatactgagataatctgaggcatggagagcagattcagggtgtgtgtgtgtgtgtgtgtgtgtgtgtgtgtatgtgcgtgtgcgtgcacatgtgtgcctgcgtgttggtataggactttaaagctccttttggcatagggaagtcacgaaggattgcttgacatcaggagacttgggggggattgtagcagacgtctgggcttttccccacccagagaatagcccccttcgatacacatcagctggattttcaaaagcttcaaagtcttggtctgtgagtcactcttcagtttgggagctgggtctgtggctttgatcagaaggtactttcaaaagagggctttccagggctcagctcccaaccagctgttaggaccccacccttttgcctttattgtcgacgtgactcaccagacgtcggggagagagagcagtcagaccgagctttctgctaacatggggaggtagcaggcactggcatagcacggtagtggtttggggaggtttccgcaggtctgctccccacccctgcctcggaagaataaagagaatgtagttccctactcaggctttcgtagtgattagcttactaaggaactgaaaatgggccccttgtacaagctgagctgccccggagggagggaggagttccctgggcttctggcacctgtttctaggcctaaccattagtacttactgtgcagggaaccaaaccaaggtctgagaaatgcggacaccccgagcgagcaccccaaagtgcacaaagctgagtaaaaagctgcccccttcaaacagaactagactcagttttcaattccatcctaaaactccttttaaccaagcttagcttctcaaaggcctaaccaagccttggcaccgccagatcctttctgtaggctaattcctcttgcccaacggcatatggagtgtccttattgctaaaaaggattccgtctccttcaaagaagttttatttttggtccagagtacttgttttcccgatgtgtccagccagctccgcagcagcttttcaaaatgcactatgcctgattgctgatcgtgttttaactttttcttttcctgtttttattttggtattaagtcgttgcctttatttgtaaagctgttataaatatatattatataaatatattaaaaaggaaaatgtttcagatgtttatttgtataattacttgattcacacagtgagagaaaatgaatgtattcctgtttttgaagagaagaataattttttttttctctagggagaggtacagtgtttatattttggagccttcctgaaggtgtaaaattgtaaatatttttatctatgagtaaatgttaagtagttgttttaaaatacttaataaaataattcttttcctgtggaagaaaaaaaaaaaaaaaaaaaaaaaaaaaaaaaaaaaaaaaaaaacaaaaatgaaaaaaaaaaaaaaaaaaaaaaaaagaaaaaaaaaaaaagaaaaaaaaacagaaaagaaagcctccaaggatcaacgcaacactacaccaagaccacaagaaaggcgaaacaacagcgaaagccggaccacatacaggcccgacccgcccgagcggaccagtcacagcaacagccaacaggcgaactggcggagggagcgacagaacgcccgcaagaacaagagaaatagaacaagacgccacacacagacacggcaaatagagatcagaaaccgcggcggaaccagaacaaacgagcgggacacagacggcaagaaggcccgaacacaaagccagcaaaccaacaaggaggagacaggaagagacaaacaacagagaaccagagcaaacaaccgcagcaaa

SEQ ID NO: 21762 - DNA, 1692 bp, Homo sapiens
  misc_feature 1, 1692: n = A,T,C or G
ncgttcgcggaacgacgcctacagtgtgaccgggatggcgcattttcttgcaccaactaatgcggtgtcgctggcggctgaggagggcggagagttctgtggtgaaatagtgggaaggattcatgtaggcatcgggaagagcctaagtccacattataaaataggaagttgatgcggggtacagttactcccggaccggcggcgtgaaagtcgtgatatcatcgttgaactattagctttgaagtttaaatccaatggagaagactcaagaaacagtccaaagaattcttctagaaccctataaatacttacttcagttaccaggtaaacaagtgagaaccaaactttcacaggcatttaatcattggctgaaagttccagaggacaagctacagattattattgaagtgacagaaatgttgcataatgccagtttactcatcgatgatattgaagacaactcaaaactccgacgtggctttccagtggcccacagcatctatggaatcccatctgtcatcaattctgccaattacgtgtatttccttggcttggagaaagtcttaacccttgatcacccagatgcagtgaagctttttacccgccagcttttggaactccatcagggacaaggcctagatatttactggagggataattacacttgtcccactgaagaagaatataaagctatggtgctgcagaaaacaggtggactgtttggattagcagtaggtctcatgcagttgttctctgattacaaagaagatttaaaaccgctacttaatacacttgggctctttttccaaattagggatgattatgctaatctacactccaaagaatatagtgaaaacaaaagtttttgtgaagatctgacagagggaaagttctcatttcctactattcatgctatttggtcaaggcctgaaagcacccaggtgcagaatatcttgcgccagagaacagaaaacatagatataaaaaaatactgtgtacattatcttgaggatgtaggttcttttgaatacactcgtaatacccttaaagagcttgaagctaaagcctataaacagattgatgcacgtggtgggaaccctgagctagtagccttagtaaaacacttaagtaagatgttcaaagaagaaaatgaataatgttaagccattcttgattggacctcatagcttattttagttaatcttttttttgtcttttagccttaccaccttttaaaaaatttgttattctccagaaacagtaaataggtgagtaggggtggtgcaagtgaattcgttttcatttagaagcccctctgtacagataatcaaaattcaaagttgaaagaatcaaaagcagccacagttatgtaggtctgatttgaatgtcataattgcagtgacaggacattgccaccaactctatcctactaccatcaatgttgtgtttattccgtcaataaaaaagacttgcttccaggaaaaaaaaacaacaggacgaccaacatcacacaaacaagagggggggcgcaaaaaattccccggggggccattacgcccgtttttgtaaagggcccaaaggggcaaaaacacaagggggcggtaaccccggggggaacagcgccggcttggaggaccctcctgggcacgccccagagacccgaaaactggggtggaccttgcgatgcaatan

SEQ ID NO: 21763 - DNA, 775 bp, Homo sapiens
  misc_feature 1, 2, 3, 4, 5, 6, 7, 8, 727, 736, 771, 772, 773, 774, 775: n = A,T,C or G
nnnnnnnnacaactaccttgctgatgctgtacatatggctcacttgtgcccagagagagaataaagccatgtcgaaactatctacgattccttgagtgtttttccagctacctgccacttgcccacccactcccctcagatctcagttagaacatgacaattgggctcatgaacaggatcctgagtggttgcaggtgaacaagcagttggcacaagggcaaagtgatcacatcctgattgagtggctatggacagccatacagactgtgtggaacaacgctggtgaaatacccaaaccgtccagaagcagtaatgcctcacttgcctgggactgggatggtgtggctgagactgccttactggcagccaggtgcgctattcagcagccacaagccctacaagtaattaaccaggggcacctgtttgagctggaggtgcatgtggccacagacggttttggttgaggcttgtggcaatgcacagagcgcctaagaatgccagtaggcttttggtcccaactatggaaaggagctgaactccggtattcattgatagagaaacagctagcagctgtatatgctggccttcgggctcatgagagcatgacaggacaggctgcagtcatcatatggacaacttacccaataacaggatggatgcgtctatgtgtaatgaccacctggagtgggatagcacagatgtccactttggcaaaatggggcgactncttgcacantggagtaagctgagtacaagtcccatacagcagannnnn

SEQ ID NO: 21764 - DNA, 1466 bp, Homo sapiens
  misc_feature 1, 2, 3, 4, 5, 6, 7, 40, 1463, 1464, 1465, 1466: n = A,T,C or G
nnnnnnnaaaattgcaacacttttattcttaatgacaacnagtgaaaatctcccagcatataccctagaaaacaattataacttacaaaagattatccttgatgaaactcagaatttccacagtgggaatgaataagaaggcaaaactcattttctcaaaacaaaactccaggaattctctggatcttcttgagctactttcacactatttacttggaagggttgtggatttcctaactggtcagctagcacctttaaagaactcacaagaatggttactttatttttctacaagcagttctgaataaagaagcgtgagatgacaaaatatggaaaatcctctctaactaagatttgaaggaaagcagccaaggtataagtagaaactcttttagacaacgagagttttcatcaacaagaggaaggagcaccagggtctggcatttcccactcatctaagatgagctaagggaccaagatgaagctcagcagagtgggatacacccttggctgggtgttctgaattcatgcctaagaccttcagtgggatcttggaacagagaatagagcctaaattacccatcagggcctcagccttctccaccactgtgtccaatgccagaggaagtcgatcaatgcattcagtattctgagaaaagttttactaacacatattttgccaaacgagatgatgtttgactataaaggaaataggcagacattcttatcaaaggatatagggaacggaacgtagttctcttctaccttcttgaaaactatgttacaatgaaatccagccaatgaagagatgaatcaaaatgaagaacctaaaacgagagcatacttgcactcctggagtctctctccagccctgaactgtggccagcacagtgtgtcagcctgtaccagctgccggtatgggtgacctgggcacaggcaaggccatcatcatcacacactgtgtgcaccagaactcctcttggcatctccaagccagttcaccattgtgtgaactgtgcactgaaggagctccactgggactcagaggccttggcacaactgcagctgtggaacattgcgatgaggaaagattgggaaaatgacaagagcctgttatctggaacttacaggcgcatttattgtctccagtatcaccaggccagccccatttgaagcagagctaaagtggaaaaatgatttggactaaacgttaacacatggcagacccatttctatggttctgttggccaagaaatgtgaccatgggaggatgaacgcaggaacaatagcctccagatgggccagatctacatggaacatagttttgcagtaggaaaatataaactttggtgaaaccttcagatgcctgataaaatattatatgaaaatgtactcttgaagttttgatttatggaggtgactgagtgtccacacagatggactagcgccagttgcaataagannnn

SEQ ID NO: 21765 - DNA, 985 bp, Homo sapiens
  misc_feature 1: n = A,T,C or G
nccagcagcccacacccaaaagaagaaacaatgggcagaatttaccctcgaatttgatagaaagatactcacctaacgagcgccttaggcctcgctcctttatcctccgccatttcctcctgtactttacaaagcatatcttcaatgttcataaccacctcaatgaggtcagccgcgtctccttcaatctctaactctgtccttcctgggctgataatttctgtgatggagacacttgaagctttctgaagctgagacaaaatgtcatgttcctttctcccaaggtacagaatatgattattctcaatgatgtggtggttctggagactcaggattctttggatccatgcgtgggcctcacacatctcttccacgttgaatcccatcagattgacggcaggagatctagcttcaagcccattttctcttttctcctctctggttgactgggggacactgtaattgttcaaactcagcatcttggacctctttgccatttcagaactgaaagcctacaagaagcaaaacagagcagagagtcataaacagggctgatagccattgtcatcaaagtctccctctctgcacacacagcacttgacttcatccactctgtcagtcccattcctactaccacaaatctaaagcagcctttaggaaagtcccagagaagaggacctcagtctattagaacacggaaagaataagcataggaaaaatggagatgaaatcaaaatctggtataaataaagaagactatacattccgagacaaaatataaccgtgcattcattaaacagattttaatgccctgctggtgctaaactaaagctgtggatatgtcactgaagaagaaaactataggtaactaataaaacacaaattcatttaaaaatggtatacacaccaaacttggtctgtaaattgaataataaaataatctgttttatgtaagttaattcctatagagtgctaaaattgtcgg

SEQ ID NO: 21766 - DNA, 1076 bp, Homo sapiens
  misc_feature 1072, 1073, 1074, 1075, 1076: n = A,T,C or G
gcacgagccgcagtctggcagcgctgcctctgaatccagctttccccacacactccctctcccctctgagcctcagttttctcatctgcagagtggggacggtaacaccctttgtcgtacagtttggaggatgcaagttcgacgctttgaaagatgatgacagtggggaccatgatcagaatgaagaaaacagcacacagaaagatggtgagaaggaaaaaacggaacgagacaagaatcagagcagtagcaagagaaaggctgtgtccctggaccggcagagcatcccctgcagtacaactacactttttggtactccaggagaacccccggccgtcccacgagctcacagagctatgaacagaatatcaaacagattggcacctttgcctctgtggagcagttctggaggttttatagccacatggtacgtcctggggacctgacaggccacagtgacttccatctcttcaaagaaggaattaaacccatgtgggaggatgatgcaaataaaaatggtggcaagtggattattcggctgcggaagggcttggcctcccgttgctgggagaatctcattttggccatgctgggggaacagttcatggttggggaggagatctgtggggctgtggtgtctgtccgctttcaggaagacattatttcaatatggaataagactgcagtgaccaagcaacacagccgaatccgggacacacttcggcgagtgcttaactacctcccaaaccattatggaatacaaaactcacacgaagatcaaatgcaggaggtggccccaaggtctttttcaaaactctggaagcgggtgatgtgcatgacctctcctctctggatggacataattgagtgggtcatcggagctctgtctggggggtactggaaacttctgctgggcagggatggggaccttagttagaacgtggcggcagttcaaacagggatccttaatgggtaaaacaaaaaaaaccgggtcttggggaagagaagaggtgtcccccttaaggtcgcttgtagtcctacaactcaccccaggtagaaatatctttctcannnnn

SEQ ID NO: 21767 - DNA, 1279 bp, Homo sapiens
cggagtacttctagaattaattaacgcggggggggaagcggcggcaggcgccatgtccggccgcgaaggtggcaagaagaagccactgaaacagcccaagaagcaggccaaggagatggacgaggaagataaggctttcaagcagaaacaaaaagaggagcagaagaaactcgaggagctaaaagcgaaggccgcggggaagggggcccttggccacaggtggaattaagaaatctggcaaaaagtaagctgttccttgtgcctgaggagatggtgaccctttatttcatctgtatttaaacctctctattccctgccataacatcttttgccacgtatagctggaattaagtgttgtcttggagctgttgtacatttaagaataaacttttgtaaaaaaagaaaaatcttacagtggctcatcatctctttagttgttttcactaagtcgttcctaccataactgtgaatttaaagtaaaaccagctcagaatcttgccagagtctgttctttggtccttgttctaccctaaactttgtatcacctgaaattaaaccaactcatttgaacaaacaaaaacaaaaacaacacaaaaaaaaaacaaaaacaaacaaaacaaaacagggggtgggcgcccacaaaaaatacacccagagaaagggcccacaattatagcgagctacccgagatatgttgtgaacaaggaggtggccccatatagggagggcgcgaatataaaacgaatgccgcagcggcgagagaggtacaacaagagcgaggatgagcggggaaacaacacgtacagaaggggaaacctctgggaggagagcaaacccccaccacgccgcgcgggggcacacacaattgagggagaccaccacacctcagacaaggcaacataacagcgcccgcacgagcacaaatacacaccgcagcgcgcaactagtgagggatcaaccacagcgaatcatatacgcaggacgagaacagactggaccatgagggtggaataaaacatcaggcgcacgagagagaaggaaacagcagcacacgtacagatgacaaggaccaggagcggacgcgagccaccagcgcagcaaggcgcgcgatgaccacatgtggtaaccccgcgaagcacagaccaacaacgcagataccagaaagcaggaaggcaccaaccgagccagctcacaccacgcccgacgccgcgacacagcagggcagaccagcgccgactacagccgctaacaccgacgccatcgaaccacacacgcgcag

SEQ ID NO: 21768 - DNA, 852 bp, Homo sapiens
  misc_feature 1, 852: n = A,T,C or G
nccgctttgatatgaattattatgcaaagaatgacagacatagagactgcaaaggccaaagggacatatgtctgtcattctttgcataataattcatatcaaaggggagaaacagctattttttgtccctagaagttctgctcttaaggttgaaaagaaagtttgaaaaatcatatcatttaggttagaagtactttgtgttgttggtatccaaaattaggactctgagattcttgtgtattcagagaatttttagtaggaaacaaggacaaatttgcatatgaaatgaaaatagttattacatgacaaaatatgtagatctgatttctagaaactgaattagtccaaaacaagtaagagtgggaaaagcagtaaaaagttcttcttgaatattgctgttgtcatccaaagtattcttatttcttttaggtgaaaaatttccattactcttttgtgatattctcaaaagaaagtttaggattttacagtgttctgaaatactgaatcttaattcagtatttcaatagagtattattgatttgcttccttatcagtagatttttaaattatttatttctaggctattgaaccttctaaaatttaatcccaagtaggtttaaaagccggatatctaggaccaaaggtttaaagactctttttctggggcatgctattatttaacagttttttcctaaattgggttttggttttgggaaacatgaaataattggttcttaaagcaatccttaaggtctattaggaagtttttctaggcccaaataaccctttaagaattttagggttaaattggcaagggaccccggtgaaaaaaaaaaaaaaaaaaaaacgagn

SEQ ID NO: 21769 - DNA, 824 bp, Homo sapiens
  misc_feature 1, 2, 14, 819, 820, 821, 822, 823, 824: n = A,T,C or G
nngagaggcatgantaaggcaaatttatgaacactgaagagctagttctccaagtgtgtttcatggtaccactttaagttatcataattatgtttctatgctgtttttattaattaacccatttatttattaagaagccatgttaaatttttcttggaacaaggtaggatatatatttttaaaataaatattcacatgtattctttgttaataataagaaaggtcccagggcaaaattctagagcagagtaagtgctagtaaataaaacaaaagcaatatattagtttatcagaaagttaataaccacaaatattaacagaagtaacagaagtggggcttttattagaatttcggattgtggaacaggtgcaagagagaaggttgaaattccaaagtaactaatgagatattatgtttctgacagcacaaaaagaggagtggactgggacatgaccttgggttctggtctattaaggaatatatatgcattccaacctccttcccaacattaagaggcaatatttgaaaaaattctttacacttatgagaattcttctttccacaattagatataagggcataaaatgcaaatgaattgtttaaaaatgatcatgtgaatgatttttaattgaagcatagtctataaacaaagaatcagattggttatcaaactctgctgtctttaaaatgactggatcttggccgggtgcggtgattcacacctgtaataccagcactttgggaggccgaggcaggcagatcacgaagtcaggagttcgagaccagcctggccaacatggtgaaaccctgtctctacnnnnnn

SEQ ID NO: 21770 - DNA, 4253 bp, Homo sapiens
  misc_feature 1, 2, 3, 4, 5, 6, 4253: n = A,T,C or G
nnnnnncgtaacatatactaaacactattaatgcctgcccccttttaatattcccctttcgggcccacctcccctccataccgctttatactttgcctgtggaagtggagacccccggctttttttttcccagaacccccataatggtaatacttaaaagaaatacataagatagaacattttaactgctatcattgaggttaacctgcttttatttaagtgaattatacaggaaattaacagtacaggcagtattttggccaacttctgcttatgtcagctgaacattgtccataaacaaaagcaaaagaaaataatgctaatcatacatggaccttttgtacttggtacaagttctgcaccgtgctttgatttcatggttggagaagatatgcatgtgttaaaaactgaggttatgtaaagttattcactaaagcctgagtgtgtctttggtaggctaatactttttcagcattattaatcacattcatgtttatctatttcctgtatttttatatataatccaaggtgaccagagaagacatggaaaacaacacagcaaaatcctcaaataactaggccattaaaacccagtcgatcccaaaggcaccaagaatcaatggggtacaaacttccccttagagaaaggtggattttttgtaatacttataacctaatgggactttattttgtagttttatgtatcttatttgttgctgtcatatgcttaattacttacctttacattttttcctctaagatggcatcaacaataaacaagatagagtaccaggtatttctatttcaaagttgtgcaaaaactgccacaatcttgctcaaagtgtctaagtatccaaatggtagcaaatgagctgcattaagctttatataaccacattgcatatgaagaaaaaaaatgaaatttatgccgatataaatagaaatgttacagagtatcatatactgagagtaacctatgcagttcttttaaacttatctctttagtggtttcaataaaatatcactaaccacttatccctaaagcctcaagttttcttcatttgaatgctgtagaattgcattagtattttatattgattatataaattaagaccaatttctatctaagtatgtgcttcaagcaatgttttgtggcaaacacacaaaacatgctttgctcttcaaatttattatccttaaaataatgcacttttaaagccttcacttcatagtttggtaactaagatccacatgacacacaatgccttgctgaacacagaaaatgtatctgcattatgataatgaaacccggcttttgctggtaacctgaaacttaagtagtcacatgtagttcaaccagctccaaacacggttgtacagtggtaattattctgcagcatttatgggcctaaatttcagtctgaattgcaacttttaattccattgtctgatgtgagtggttgttatttgtttcttttagtgcatcgccaaaatataaatcaacattaggttttattccattgttaccatgttcttcagcaatatgattcaactgtgaaacttctgaacaggaagcagtttgggtaaccacagaaatgctacactgatgtggggaattttccagacggtcattttctacctcaggaagaatgttaacagtagcaaagcgggtgtgataatcactggaaccatgactacaagaagttttcatgctttctaggtcagaacaactaaattcagaaaaatgactagagtgagaatctgctacagaaggcatactgtcactgagggatggagcctcaaattcacttgagttcgtgctttgttgttctaacaactgtgcatccatgtcctctctcgtctcatttatcttcatgttaccctttttcctcagtttaccactttttgattttttccctgctgttgcttctttggaccacttggtggcactagatttaccttcaggcaagccactggatgaaccgccagcatgacttcgggtggcactgccatcatccacactactgcttccactgttgtgcctgaatttggatggctttgactcaatatctacttgcacctccatactgttgccttctttgtccaatgggatgtaggaattcagaatggatcctgccattgctttggtgctggcattatcactaactgttcccaagctgactgtgccagattctccacttagactgtaccgttctttctgtacatctgcttgtacttccaacctgttaaaacagtttaccatggcacttcctgacagactccccgttatactggctccagctagtgccatggtgctggccgtttcactcaggttgtctcggatggctcctattcgatccatgtggcttccacttgcactcaaactgccagtcagcccaccaacacttccctcccctatgcttgggttgtgtcttgcttctgctactgatgttgtgtctacagctgtgttagttccaccaacatttatatcattttcatcatcaaattcaatcctaactccttttccattgcctgctgagactccacaacctccgcttcgacaaagagaaattggaactacgccatagacataagctaacataataggaacaccgatacctacagtcactgcagctactactggagacacgattacagacaacgttacaccacctgctatggccaaattccgtttgtgctttgaaacatccttgccttcatagcgattgtgaatcttgcggcccacatacacaggaatgccaataatcattgcaggaatagcaatgccagctattaaagcgattccgacaggagcaccaaccagtgttcccagttgccacaatattttcttctttcggctccagggtttcttcccccaaaaagtacatcctgatggacttagataatgcaaatctgagatttctttcatacacaaccaacaaaactcacaaccacaaacagcacatgtcatgtgattgcagctcccatcattcatctttattatataagcagcacatcgtggacatggctttatatcatcagctgctgctccagactcttgactataactaatggatgaagaacgtatagttctcaaacgtaagctctgggctctctcttgtcgagcagcatcacaggtctggttggggtgccaaatctgtttacagtggtagcaaaactctgttccacagccctctcgcccacaagttaattttggacagctggcacatccaaatgctatcacagcatatccacagtctggagctggacaccacctacaatcaggatctgcaacaagccaccgtctaagcataaattcttcgtatttttccatcaagacatcatcacttaatatcaagcgaatatcatggggattaaaccgttcagtacattctgggcaactaatattaactctgctttcagagatttctatccttaaatattgtcgtaagcaatccacacaagatctgtgatgacaagtcattatatcaggaaatctgtctttagaatgccgcaaaaggcacaaagggcactctatgaagtctccaatttgtttgctgatggaagttaatccattgtcagaagaggtatttgtagagaaaatggagttcttatcagtacacatttcagaatgtatactttcaatacttgcaattccatccaccccgccatttagctcccttgatttacgtttgttatcttttttcctccgaaacagggagcctattgaaattcttctttttttgggtgcctttttgactgaaggcaagctcacagatgaagcagaggactgaagatctcgatctgaacccatttgccgatgtaaactcatgtctaaaatgcttgttagaattgagacagggtcagtgtttacacacagcccttcattatatttagagataaaacctatttcttgttcttgcattcacattaagtcatgatgtaagaatatcctacttggttccttcagagaattcttgaaaagttcgatttacagaagactgctatcatggatgttctttaactcctcagagcggcggcagcgcagggtggcgggcgagtaggcccatctcccagcagcggcgacagcagcctgaggaagcgcgggggagggtccctccgatgcgccgaggcgcctctcaaccggggcggagacgacggaggggaggagtcccgacggccgctttcccgaactcctcctccgcagttgtggctcgacggctgctcccgggaaccagcgccgcaactccgcn

SEQ ID NO: 21771 - DNA, 904 bp, Homo sapiens
  misc_feature 1, 2, 3, 4, 5, 6, 7, 8, 9, 904: n = A,T,C or G
nnnnnnnnnccgaggtacttgttatactttggcagcttcttcacgtcggtcctctccgcgcgcgggtaggaaccgtccacggccttaaagaagcctcctcaccagccatacttcccattgcctccagctgttgcacggaggtttcacatcatatttccagaaggctcctggaaagagtgaatatgtgtcgcatccagagagctgatggggattgtgacttggctgctgtcatccttcatgtcaagcgcagaagaatctgtgtcagcccgcacaaccatactgttaagcagtggatgaaagtgcaagctgccaagaaaaatggtaaaggaaatgtttgccacaggaagaaacaccatggcaagaggaacagtaacagggcacatcaggggaaacacgaaacatacggccataaaactccttattagagagtctacagataaatctacagagacaattcctcaagtggacttggccatgatttggttgtaagttttatcatctgaattctccttatggagacaacagaacaaaacaaaatattggtttttaaacaacatgaaccaattgtgccggtatgcaaatgttgccaaataatttactccaatggaaaatgcaatgagcagatataccggtgtgtaaggtggttcacaccttttcccagcactccggaggtgaggccgaggtcacttgcgaccagatttgaaccaggctggcacatagcagactcttttcaacaaaaaatggccggttgagtctgtgcttaatccagccatggggttggtagggcgccctgtcggaattggtgcaaccgggaaagactctcaaaaaaagcggtcttcatcgggagtattcctagggccaaacgggcttcctgagtgaggcggttattaaccctcttaacgan

SEQ ID NO: 21772 - DNA, 475 bp, Homo sapiens
  misc_feature 1, 2, 3, 4, 5, 6: n = A,T,C or G
nnnnnnctgatttctttattggcaaagttagaaaaggagttcatgctttattaagtcataagaaagactattacacagtttgtggcaaggctcttgtaaccagttggaatctaagttatttgctttatttttataatcagtattttcttttttgaaattttatttttaggtaggcgtttgatttgtaatatctgctgttctaaagacttaaatgtcacccagataggataaaatagaacagtaaggattatgatatttcctgacagttgagtaggatgtatgaatcccccacacactaatcttatttctgattttttgtttttatctctttagagttatagatagtagtatgaaaaacttcaaagcattttttcggtggctttatgtgggtaagttaattgagtgaagtatttttattttaacactttaaaaaaattataggagtattatcttagactgtttcaataaatctagt

SEQ ID NO: 21773 - DNA, 302 bp, Homo sapiens
  misc_feature 1, 2, 3, 4, 5, 6, 7, 8, 9, 10, 235, 237, 276, 279, 301, 302: n = A,T,C or G
nnnnnnnnnngacttatgactctcctccccataatgacattatgacaccagttgatctgggggtagcccagcccaacagccgggttatgggccagaacgtcatgatgggccctaattcggtcatgtcaacatatggcagccaggcatctcataacaaaatgatgaatcccagctcccatacccaccctggacatgctcagcagacatctgcagttaacgggcgtcccccgccccncncgagaaatacaaatagaaaatattttttttgtatgaacngcntcatctttttgaccacacctgnn

SEQ ID NO: 21774 - DNA, 1293 bp, Homo sapiens
  misc_feature 1, 2, 3, 4, 5, 6, 7, 8, 9, 10, 11, 12, 13, 14, 15: n = A,T,C or G
nnnnnnnnnnnnnnncgacccacgcgtgccgggtggtttccgcccggcagcccgcagcccgctgcgccccgggccgcgtctcccggcggtgggagggggcggcccccactcggttcctggcccctcgcggccccgtcagcctcccgctcggggtgcgccgcccttcgtctgggtctccgcccccaggacccgcggccgagagctccggagcgcggcttccccggccggctgcgcgatgggctgcgggaactccaccgccaccagcgcgggcgcgggccaaggccctgcaggagcagccaaagatgtaacagaagaatccgtaacagaagatgacaagaggagaaactatggaggagtatatgttggcctaccatctgaagctgtcaatatggtgtccagtcaaacaaagacggttcggaaaaattagaagaaaataacatcatgactcaagaatcaagagcttgctcatcagtttggaaggaatttggctccgtgggacgttgtaatgtgcacagacatttccaaggaaattctaaacagtcacccttcccttttgcattcccccaaatcttaagtgtatacataaaaccctgggtacatattgttgtggtaatagaagggaattggttaaacagtacacttgtttatggaactttctgtggccacctacgaaagacaagttaacaaactgtcatggaggctgttgttgcccagccagggccgctgcattttgacaacatttccaccctggccactcagcacatttcatggaggtcatgtcttttcactgatacttttttgatagtttttatataacaaaatccttattctatttataacttaagatgataaggcactataaattaatgacctaaaataatatatttgtctgttatcttttgctatttctacttcactttaatttttagctgtaaaattggtaaatggattcttacaactatctctttccatttcttactatttggttttcaaatttcatttaaatgtcagaatttccttttttaggaacaatgtgtatttcattgcactatttaaaaataaactcaaatttgcatgccatatgcacattttgattacatttttattttctttcgtgaaaggcatgtgcgcaaaataccatggggacagtgctcaccctcactcattacggccccagagagtaataaaaagcgcgcatccacatgaacagacacgttagacaaccacggattagagccacaccaaacaatatataggtagttgataatatatcagtgccaacccgagtaacca

SEQ ID NO: 21775 - DNA, 1901 bp, Homo sapiens
  misc_feature 1, 2, 3, 4, 673, 1898, 1899, 1900, 1901: n = A,T,C or G
nnnngccgcgccgcctcctgggaagagaggaagcgggagaggagcccacgtcgcctgtcacccaatatctccagccgcgcagtcccgaagagtatccgagctggatccagagttgcatacagaccaatttctgcatcagtgttatctcgaccagaggctagtaggactggagagggctctacgggctatttaatggggcccagaatggtgtgtctcagctaatccaaagggagtttcagaccagtgcaatcagcagagacattgatactgctgccaaatttattggtgcaggtgctgcaacagtaggagtggctggttctggtgctggtattggaacagtctttggcagccttatcattggttatgccagaaacccttcgctgaagcagcagctgttctcatatgctatcctgggatttgccttgtctgaagctatgggtctcttttgtttgatggttgctttcttgattttgtttgccatgtaacaaattactgcttgacatgttggcattcatattaattacggatgtaattctgtgtatcttactgtgactccgaaaactgtagtattggtgtcatgggaatgtacgttatttccaaagtcatttcattaaagatgaaaactgtaatttcttctgtgatttgtacttacactaagtttagattatcacanagaagaacgtgcattcaggcagatgctgtcccattcagaggaagctacagcagttgctccactgatgaaaaatattccaatgtaatttttatgggaaatcttgtatatagtcgtctgcatattgtaattcataaggcttttgcttattcatataaaggataaatatttgggtgttttgagcttctataaaatatgattaattaaaggtagttaatactcaagatggtcttgagtttttaaggtctaacatcagttagaatacttcaaatcagaatcaccttccaagactgacttgacaggtggttctaaaaataaatcacgtcagctttttaggaaatgaagccttaagctagggggtaatgtgacttttgtttttcagtaagtctcacattaagcaattgtgtgcctctaatgaatcttccatgtcttttcagaacagaaactagcagctagtttcttacttgaacaagactattaaaaaccaaatatcaaaaaactgaattggctagatttttacagccaaaaattgctgtaaggcagtgtgtatcactgttgctaacatgtttatagtgggagtcttggggatgatagctggttcaacagtattttgctgctaatactttatgttgcttcttggtcaaacttttcccattcaaaggaagaagatggtgctactatagacagtttttcccctagcaaatatattgtaccataatatctatcatccaagtttcagggttttttgaaagttgataattaggaaagtgacattttacttttcttagtgccctttgcctgtttgatttccattgagaaagagcagtcaccaaagttcctcaagtgtcggaagaccaccaccatcagaatcagtgcttgtttaaaaaataaaaatccctaggttccagacctactgaattggactctttggacatgagactcagcaatctacatctttaaaaaggcttcccaggtggtttttgtgcatactgtttgagagtcactaagttatatatatatcctaccttctgtaaagtgaaatgaggccccaaaaagctaaagaggtagagctgctacctcgtttttagttgattcatcatctagtctatatcacccaaaagaattggaaataggtattcaaacaaaaacctgtatacaagtattcatagaagcactacttacaatagccgaaaggtagaaacaaccaaatgtctatcagctgatgaannnn

SEQ ID NO: 21776 - DNA, 8063 bp, Homo sapiens
  misc_feature 1, 7841, 7842, 7843, 7844, 7845, 7846, 7847, 7848, 7849,7850, 7851, 7852, 7853, 7902, 7903, 7904, 7905, 7906, 7907,7908, 7909, 7910, 7911, 7912, 7913, 7914, 7915, 7916, 7917,7918, 7919, 7920, 7921, 7922, 7923, 7924, 7925, 7926: n = A,T,C or G
  misc_feature 7927, 8036, 8037, 8038, 8039, 8040, 8041, 8042, 8043, 8044,8045, 8046, 8047, 8048, 8049, 8050, 8051, 8052, 8053, 8054,8055, 8056, 8057, 8058, 8059, 8060, 8061, 8062, 8063: n = A,T,C or G
nccacgcgtgcgggccagaaggcacactgtgttggtggttatattaaaacaacgaaggtaccatggccgttgtcgtcgccgccgcggctcccggggctggatggggggccgaggccagccagtggcacccggaagaaagagacgcggcggcggcgacgccgacaccctcaggacgagtgtccggacttgcccacagcctcaaggaggagacggcgaggcccggcccccgctgtccctggtgtaaagaagtcgccgtagccgtcgcggccgggactccccgggctctcgcccttcaggtttcgttgacactcaggaccgtacgtacgctgcgccatgttcaagaaactgaagcaaaagatcagcgaggagcagcagcagctccagcaggcgctggctcctgctcaggcgtcctccaattcttcaacaccaacaagaatgaggagcaggacatcttcatttacagagcaacttgatgaaggtacacccaatagagagtcaggtgacacacagtcttttgcacagaagctccagctccgggtgccctccgtggagtctttgtttcgaagtccgataaaggaatctctattccggtcttcttctaaagagtctttggtacgaacatcttccagagaatccctgaatcgacttgacctggacagttctactgccagttttgatccaccctctgatatggatagcgaggctgaagacttggtagggaattcagacagtctcaacaaagaacagttgattcagcggttgcgaagaatggaacgaagcttaagtagctacaggggaaaatattctgagcttgttacagcttatcagatgcttcagagagagaagaaaaagctacaaggtatattaagtcagagtcaggataaatcacttcggagaatagcagaattaagagaggagctccaaatggaccagcaggcaaagaaacatctgcaagaggagtttgatgcatctttagaggagaaagatcagtatatcagtgttctccaaactcaggtttctctactgaaacaacgattacgaaatggcccgatgaatgttgatgtactgaaaccacttcctcagctggaaccacaggctgaagtcttcactaaagaagagaatccagaaagtgatggagagccagtagtggaagatggaacttctgtaaaaacactggaaacactccagcaaagagtgaagcgtcaagagaacctacttaagcgttgtaaggaaacaattcagtcacataaggaacaatgtacactattaactagtgaaaaagaagctctgcaagaacaactggatgaaagacttcaagaactagaaaagataaaggaccttcatatggccgagaagactaaacttatcactcagttgcgtgatgcaaagaacttaattgaacagcttgaacaagataagggaatggtaatcgcagagacaaaacgtcagatgcatgaaaccctggaaatgaaagaagaagaaattgctcaactccgtagtcgcatcaaacagatgactacccagggagaggaattacgggaacagaaagaaaagtccgaaagagctgcttttgaggaacttgaaaaagctttgagtacagcccaaaaaacagaggaagcacggagaaaactgaaggcagaaatggatgaacaaataaaaactatcgaaaaaacaagtgaggaggaacgcatcagtcttcaacaggaattaagtcgggtgaaacaggaggttgttgatgtaatgaaaaaatcctcagaagaacaaattgctaagctacagaagcttcatgaaaaggagctggccagaaaagagcaggaactgaccaagaagcttcagacccgagaaagggaatttcaggaacaaatgaaagtagctcttgaaaagagtcaatcagaatatttgaagatcagccaagaaaaagaacagcaagaatctttggccctagaagagttagagttgcagaaaaaagcaatcctcacagaaagtgaaaataaacttcgggaccttcagcaagaagcagagacttacagaactagaattcttgaattggaaagttctttggaaaaaagcttacaagaaaacaaaaatcagtcaaaagatttggctgttcatctggaagctgaaaaaaataagcacaataaggagattacagtcatggttgaaaaacacaagacagaattggaaagccttaagcatcagcaggatgccctttggactgaaaaactccaagtcttaaagcaacaatatcagactgaaatggaaaaacttagggaaaagtgtgaacaagaaaaagaaacattgttgaaagacaaagagattatcttccaggcccacatagaagaaatgaatgaaaagactttagaaaagcttgatgtgaagcaaacagaactagaatcattatcttctgaactgtcagaagtattaaaagcccgtcacaaactagaagaggaactttctgttctgaaagatcaaacagataaaatgaagcaggaattagaggccaagatggatgaacagaaaaatcatcaccagcagcaagttgacagtatcattaaagaacacgaggtatctatccagaggactgagaaggcattaaaagatcaaattaatcaacttgagcttctcttgaaggaaagggacaagcatttgaaagagcatcaggctcatgtagaaaatttagaggcagatattaaaaggtctgaaggggaactccagcaggcatctgctaagctggacgtttttcagtcttaccagagtgccacacatgagcagacaaaagcatatgaggaacagttggcccaattgcagcagaagttgttggatttggaaacagaaagaattcttcttaccaaacaggttgctgaagttgaagcacaaaagaaagatgtttgtactgagttagatgctcacaaaatccaggtgcaggacttaatgcagcaacttgaaaaacaaaatagtgaaatggagcaaaaagtaaaatctttaacccaagtctatgagtccaaacttgaagatggtaacaaagaacaggaacagacaaagcaaatcttggtggaaaaggaaaatatgattttacaaatgagagaaggacagaagaaagaaattgagatactcacacagaaattgtcagccaaggaggacagtattcatattttgaatgaggaatatgaaaccaaatttaaaaaccaagaaaaaaagatggaaaaagttaagcagaaagcaaaggagatgcaagaaacgttaaagaaaaaattactggatcaggaagccaaacttaagaaagagcttgaaaatactgctctagagcttagtcagaaagaaaaacagtttaatgccaaaatgctggaaatggcacaggctaactcagctggaatcagtgatgcagtgtcaagactggaaacaaaccaaaaagaacaaatagaaagtcttactgaggttcatcgacgagaactcaatgatgtcatatcaatctgggaaaagaaacttaatcagcaagctgaagaacttcaggaaatacatgaaatccaattacaggaaaaagaacaagaggtagcagaactgaaacaaaagatcctcctatttgggtgtgaaaaagaagagatgaacaaggaaataacatggctgaaggaagaaggtgttaagcaggatacaacattaaatgaattacaggaacagttaaagcagaagtctgcccatgtgaattctcttgcacaagatgaaactaaactgaaagctcatcttgaaaagctagaggttgacttgaataagtctctgaaggaaaatacttttcttcaagagcagctagttgaactgaagatgctggcagaagaagataagcggaaggtttctgagttgactagcaagttgaaaaccacagatgaagaattccagagtttgaaatcttcacatgaaaaaagtaacaaaagcctagaggacaagagcttggaatttaaaaaactgtctgaggaactagcgattcagctagatatttgctgtaagaaaaccgaagccttattagaagctaaaacaaatgagctaatcaacattagtagtagtaaaactaatgccattctttctaggatttctcattgtcagcaccgtacaactaaagttaaggaggcactgttaattaaaacttgcacagtttctgaattagaagcacaacttagacagttgacagaggagcaaaatacactaaatatttcttttcaacaggctactcatcagttagaagaaaaagaaaatcaaattaagagcatgaaggctgatattgaaagtcttgtaacagaaaaagaagccttacagaaggaaggaggcaatcagcaacaggctgcttctgaaaaggagtcttgtataacacagttgaagaaagagttatctgaaaacatcaatgctgtcacattgatgaaagaagagcttaaagaaaaaaaagttgagattagcagtcttagtaaacaactaactgatttgaatgttcagcttcaaaatagcatcagcctatccgaaaaagaagcagccatttcatcactaagaaagcagtatgatgaagaaaaatgtgaattgctggatcaggtgcaagatttatcttttaaagttgacactctgagtaaagagaaaatttctgctcttgagcaggtagatgactggtccaataaattctcagaatggaagaagaaagcacagtcaagatttacacagcatcaaaacactgttaaagaattgcagatccagcttgagttaaaatcaaaggaagcttatgaaaaggatgagcagataaatttattgaaggaagagcttgatcagcaaaataaaagatttgattgtttaaagggtgaaatggaagacgacaagagcaagatggagaaaaaggagtctaatttagaaacagagttaaagtctcaaacagcaagaattatggaattagaggaccatattacccagaaaactattgaaatagagtccttaaatgaagttcttaaaaattacaatcaacaaaaggatattgaacacaaagaattggttcagaaacttcaacattttcaagagttaggagaagaaaaggacaacagggttaaagaagctgaagaaaaaatcttaacacttgaaaaccaagtttattccatgaaagctgaacttgaaactaagaagaaagaattagaacatgtgaatttaagtgtgaaaagcaaagaggaggagttaaaggcattggaagataggcttgagtcagaaagtgctgcaaaattagcagagttgaagagaaaagctgaacaaaaaattgctgccattaagaagcagttgttatctcaaatggaagagaaagaagaacagtataaaaaaggtacagaaagccatttgagtgagctaaatacaaaattgcaggaaagagaaagggaagttcacatcttggaagaaaaacttaagtcagtggaaagttcacagtcagaaacattaattgtacccagatcagcaaaaaatgtggcagcatatactgaacaagaagaagcagattcccaaggctgtgtgcagaagacatatgaagaaaaaatcagtgttttacaaagaaacttaactgaaaaagaaaagctattgcagagggtagggcaggaaaaagaagagacagtttcttctcattttgaaatgcgatgccaataccaggagcgcttaataaagctagaacatgctgaggcaaagcaacatgaagatcaaagtatgataggtcatcttcaagaggagcttgaagaaaaaaacaagaaatattccttgatagtagcccagcatgtggaaaaagaaggaggtaaaaataacatacaggcaaagcaaaacttggaaaatgtgtttgacgacgtccagaaaaccctccaggagaaggaactaacctgtcagattttggagcaaaagataaaagagctggattcctgcttagtaagacagaaagaagtacatagagttgaaatggaagagttgacctcaaaatatgaaaaattacaggctttacaacagatggatggaagaaataaacccacagaacttttggaagaaaacactgaagaaaagtccaaatcacatttggtccaacccaaattgcttagtaacatggaagcccagcacaatgatctggagtttaaattagccggggcagaacgggagaaacagaaactgggcaaggagattgttagattgcagaaagaccttcgaatgttgagaaaggagcatcagcaagaattggaaatactaaagaaagaatatgatcaagaaagggaagagaaaatcaaacaggagcaggaagatcttgaactgaagcacaattccacattaaaacagctgatgagggagtttaatacacagctggcacaaaaggaacaagagctggaaatgaccataaaagaaactatcaataaggcccaggaggtggaggctgaacttttagaaagccatcaagaagagacaaatcagttacttaaaaaaattgctgagaaagatgatgatctaaaacgaacagccaaaagatatgaagaaatccttgatgctcgtgaagaagaaatgactgcaaaagtaagggacctgcagactcaacttgaggagctgcagaagaaataccagcaaaagctagagcaggaggagaaccctggcaatgataatgtaacaattatggagctacagacacagctagcacagaagacgactttaatcagtgattcgaaattgaaagagcaagagttcagagaacagattcacaatttagaagaccgtttgaagaaatatgaaaagaatgtatatgcaacaactgtggggacaccttacaaaggtggcaatttgtaccatacggatgtctcactctttggagaacctaccgaatttgagtatttgcgaaaagtgctttttgagtatatgatgggtcgtgagactaagaccatggcaaaagttataaccaccgtactgaagttccctgatgatcagactcagaaaattttggaaagagaagatgctcggctgatgtttacttcacctcgcagtggtatcttctgagtaaaccatcagtctgtgcttagttaacatgtgtcatggctccgatcttcatcttgaagaagagtgacattgggtgactgctgcttggaaaactgtccacacttgctactctttgagaatgaagttgtcattcagggcccctcatgtagccaaaagaccaagaaaaatctggcccacagataagttgcagactgcctttaaaatagattttatcagtggagaaatggtgatagttttttcttcagttttctcttgggaagagttttatgttgtttaaaagatattttgataacttaacctgctttatgggcttacataatattcctttcatccattctttttaaagaacggcttacctttcctatttatttttagggtgattttttaaaaagacttgtgcaatacattttgaggtgaaacttagtggattttttctgataaattagagcatttaattgactattttattcaggttgatctgttgaatatttgctaaagaccagttctttaagctaagacatgtaaaaaatcccaaatggcagtacctcattgtttacttagcttttgtacttatatttttcagaggaaaaaacactactgtaaattgtgaatagccaatacataactgtattgtatgcaaatctgtgattgttggcagtgtcatctctgagaaacagataaataaagtttatttactattccaaaaaaaaaaaaaaaaggctgtttcgcgcccgcgccccgaaaatttttcacacactgtgggggcgccgcccccgggttggcacgcgccccgccccgagacccgcaaccgtggnnnnnnnnnnnnncctccccccccccccccctttaaaaaattttgagagacgcccttttttnnnnnnnnnnnnnnnnnnnnnnnnnnccccccccctttttaaaaggggggggcacacctgggagaggttttttaaaaaaaacacttcccccccttttttttttttaaaaaaagggggaccgggggaaaaaaagannnnnnnnnnnnnnnnnnnnnnnnnnnn

SEQ ID NO: 21777 - DNA, 409 bp, Homo sapiens
  misc_feature 408, 409: n = A,T,C or G
acttccatttacaaaacatagtcatccttgattgccgaaaatgacaaatcctagaaaacgtagcattcctatgcaagatgttaacatggttcttagttgttggccaaagatccatttgatgaatttaatttttctgaaatagacaattctgatgattcagatgattctgatgttagttctgtttagaaataactccaagaatagtttttatattttattttcacattgaaaatcaatcagggccaggtgcagtggttcacgcctgcaatcccagcactttgggaagctgaggtgggtggatcacttgaggtcaggagttcaagaccagcctgacaagcatggcataaccctgtttctactaaaaatacaaaattatctgggcatggtggtgggtgcctgtagtcccann

SEQ ID NO: 21778 - DNA, 246 bp, Homo sapiens
  misc_feature 1, 2, 3, 4, 5, 6, 7, 245, 246: n = A,T,C or G
nnnnnnncctattgtatccatgggctgtgtgcactttttgtgctttaaaattctctttgacaataaaacatgttatccccatgatcattcatttatttgagaaatatttattgagcctatgtgaagggacaggtaccagttatgtcctctcaacaattaaggatgcctatgctttctttcaggttgtgtcctgcaaatcattgccctccaggtgtctaaaggcaactagactccagcttcttcann

SEQ ID NO: 21779 - DNA, 1558 bp, Homo sapiens
  misc_feature 1, 2, 3, 4, 5, 6, 7, 8, 9, 10, 1555, 1556, 1557, 1558: n = A,T,C or G
nnnnnnnnnnccttggatattccgcgtgtgttttgggaaaggtgcaacgagctccaggacatagaggagattttggctccggtttgaagggggggagccgagaaaaagaaccgaggaccaaagccttcaacacagaaacgtaaaatggatggcgcacctgatggtcgaggaagaaaaaagaagctgaaactatgaatatgtttttgtttcataatcactaactttaaaccagtagttctttaatttacgggtcttcataagatgtactgtacaatgctcaattgttatgtcatttaaagacatcaggttcatctgtttactgagctagaaacatagtatgtagtttcacttttttaaatgcaacagctgtgctgaaatttttttatcattaacacttgaagtaataaaataggcttcatttattactaagtgtttcatttgatttatttttctattgtagttccatttgtgaagattgtgactttttgtttattagctataatttctacacttgtaaggcttaaaaacaagttaaaaagaaaattgcaaataacatttgtccctttcagtcttcacctagttgtgtaattattttaattcactttgcctttgcagaaatttgggtattttctttgtagtgctattgagtctcatctggaaagattatataaattgcattctccttgcttatgtgggtagaatgggaaaagaaggcaagacaaagtatacttaaattctatgcatatttctgttatgctttctgttttttttagttgattctgaaatgaatatgccctattcttttgaaagaatggccttttagttgtatagccaaagacatttagtattttccggttccttaaggtattactgtaccattttgtaaaaggaatattattattattatttttaattatttggtaaatattttgtcatatgaccttctgaagcagccacaacttagataatgtcagaactaaggtgatttttttttttttaattttgaaagcccagccaaaatgaggtgtgaatttgtcatactgttacattgaaattggtaacaaaatatatcccctcccatttggacttttagggtaaatgaaaattttattgtattttaaagtagtttctaagtgttagcaagactgactataattccagtttctgttttctatggacagacctgataaactggagaccctaaagcaggaatacccaaattatagtgtcaggattttagctgtaccagaggcctttatgtgctacacataatttgtataaaattttatatgtgcagattgggtacataaacagttctccatttttctaagggaatgcaataaatgtagcatcgtgaataaatataacttttataatccggattggaaacacaaaacaaaaaaaaaaaattgggcgggcgacgggacacagaaagtttaaaaacctgggggcgggcccagaatgacacgtgccccgggccaaaaccggccgaggcgggctcccaaaaccgggcccgcgaaccaggggtggctgggcacagagcaacacagggccnnnn

SEQ ID NO: 21780 - DNA, 659 bp, Homo sapiens
acgcgtccgctcctcatggcgcaggatcaaggtgaaaaggagaaccccatgcgggaacttcgcatccgcaaactctgtctcaacatctgtgttggggagagtggagacagactgacgcgagcagccaaggtgttggagcagctcacagggcagacccctgtgttttccaaagctagatacactgtcagatcctttggcatccggagaaatgaaaagattgctgtccactgcacagttcgaggggccaaggcagaagaaatcttggagaagggtctaaaggtgcgggagtatgagttaagaaaaaacaacttctcagatactggaaactttggttttgggatccaggaacacatcgatctgggtatcaaatatgacccaagcattggtatctacggcctggacttctatgtggtgctgggtaggccaggtttcagcatcgcagacaagaagcgcaggacaggctgcattggggccaaacacagaatcagcaaagaggaggccatgcgctggttccagcagaagtatgatgggatcatccttcctggcaaataaattcccgtttctatccaaaagagcaataaaaagttttcagtgaaaaaaaaaaaaaaaaaaaaaaaaaaaaaaaaaaaaaaaaaaaaaaaggaaaaaaaaaaaaaaaa

SEQ ID NO: 21781 - DNA, 1530 bp, Homo sapiens
  misc_feature 1, 2, 3, 4, 5, 6, 1529, 1530: n = A,T,C or G
nnnnnngtccgggctgcattaagagctcagtctcttcaccaggggctcccagtccttccatctgggaggccaaggcggcttcgcgttctgagaatagacagaacctctgttactctgtgaccggcaggcaccgggagatccgtagctcagacgccaggacatcccggaagctgggaaatggaggggactgttgacattcagggatgtggccatagaattctctcgggaggagtgggaacacctggactcagatcagaagcttttatatggggatgtgatgttagagaactacggaaacctggtctctctgggtctcgctgtctctaagccggacctgatcacctttttggagcaaaggaaagagccctggaatgtgaagagtgcagagacagtagccatccagccagatatcttttctcatgatactcaaggcctcttaagaaagaagcttatagaagcatcattccaaaaagtgatattggatggatatgggagctgtggccctcagaatttaaacttaaggaaagagtgggaaagtgaggagcaaaaatcaagcctacaataaatctgatacaacattaagccaaggcataagccccagaagacatcagaaaactcattttctacataaccattgcaaacgtaaaaaatgtgagaaagcctttcatgaatgcaccaaccatgtccatcagagtatctttattcaagagaagtctgccaaatgtaataagtgtatagaaacttttatccagtcatcaaaacatactcagcctcagagaatccatattggagaaaagtcacacagatgtaataatggtgagaaaatccttagtaaattgtcaagtctaagaaaacataagataatccataatgaagagaaaccttacaaatgtaaagaatgtgacaaagcctttaaccatcgttcacaccttactcaacatcaaataattcatactggagagaaaccatacaaatgtaaagaatgtggcaaagccttcaattctagttcatattttactagacatcagagaattcacactggagaaaaactttacaaatgtaaagcgtgtagcaaatgttttactcattcttcaaatcttcttgtgcatcagagaattcatactggagagaaaccttacaaatgtaaagaatgtggtaaatcatttaaagtgtcttcagcccttactcagcatgagagaattcatactggagagaaaccctataaatgtaaggaatgcagcaaagcctttaactgtaggtcgtacctaactaaacatcagagaattcataccggagaaaaactttacaaatgtaaatcatgtagcaaatctttttctcgttcctcaagtcttattgtccaccagagaattcatactggagaaaaaccctataaatgcaaagaatgtggcaaagcctttaattgtagttcacgccttactcaacatcaaagaattcataccggagagaaaccctacatatgtaaagaatgtggcaaagcctttaactgtagttcatcccttactaaacann

SEQ ID NO: 21782 - DNA, 1505 bp, Homo sapiens
ccacgcgtccgcttggttgtcagcagcagcaggaggaggcagagcacagcatcgtcgggaccagactcgtctcaggccagttgcagccttctcagccaaacgccgaccaaggaaaactcactaccatgagaattgcagtgatttgcttttgcctcctaggcatcacctgtgccataccagttaaacaggctgattctggaagttctgaggaaaagcagctttacaacaaatacccagatgctgtggccacatggctaaaccctgacccatctcagaagcagaatctcctagccccacagaatgctgtgtcctctgaagaaaccaatgactttaaacaagagacccttccaagtaagtccaacgaaagccatgaccacatggatgatatggatgatgaagatgatgatgaccatgtggacagccaggactccattgactcaaacgactctgatgatgtagatgacactgatgattctcaccagtctgatgagtctcaccattctgatgaatctgatgaactggtcactgattttcccacggacctgccagcaaccgaagttttcactccagttgtccccacagtagacacatatgatggccgaggtgatagtgtggtttatggactgaggtcaaaatctaagaagtttcgcagacctgacatccagtaccctgatgctacagacgaggacatcacctcacacatggaaagcgaggagttgaatggtgcatacaaggccatccccgttgcccgggacctgaacgcgccttctgattgggacagccgtgggaaggacagttatgaaacgagtcagctggatgaccagagtgctgaaacccacagccacaagcagtccagattatataagcggaaagccaatgatgagagcaatgagcattccgatgtgattgatagtcaggaactttccaaagtcagccgtgaattccacagccatgaatttcacagccatgaagatatgctggttgtagaccccaaaagtaaggaagaagataaacacctgaaatttcgtatttctcatgaattagatagtgcatcttctgaggtcaattaaaaggagaaaaaatacaatttctcactttgcatttagtcaaaagaaaaaatgctttatagcaaaatgaaagagaacatgaaatgcttctttctcagtttattggttgaatgtgtatctatttgagtctggaaataactaatgtgttgataattaggttaggttgggcctcatgggaactcccctgtaactaaaagcctccagggtaagtttaaggtcctttcatagaaaaaaagccaaccatccccggattttaaaatttggtattctctcatgaatagaaatttatgtagacgccaaccaaatacttttacccccttaaaaagagaatataaccttttatggccctataattcttttgttttttaagtaagggtatattttgttgggaatatccttttgggggggtgaataaatcttttatcttgaatgtaataa

SEQ ID NO: 21783 - DNA, 1917 bp, Homo sapiens
  misc_feature 1, 2, 3, 4, 5, 6, 7, 8, 9, 10, 11, 12, 13: n = A,T,C or G
nnnnnnnnnnnnngctcattatttatagactgttaacactcatttcttgtttttacctcaggatccaagtttctgaaaacatacattcttgtcttctccatcattgcaaacaaatcaggattatctttggcccacttcatatcccagacatctcttcgttccaattttaacaactctccaactacttgctgtcccgtactgtccgttactcgagcatccaagtcaaagaaagtcagaactcctgagatgtctatgatagcaagacggctagagttgcaattcaaggataactggtaggctcgacaattaagggaatatttttgaatcaaaccaacattaggtagactgtatctctgaatggtgccagattcacgacccacaatcaatatcttatctgatgcagttatggcacaaattggatcccttgtgccttgaatggttttactataatcaagcacaccatccattgatccagaaggggtatcatcaacatgataaatcctttctctcccttcttttcgagaccgtgtgatctgattaatttccaatgctgtgagcttctttgccacacgatattgccaggtataaaatgcttctttcgaggctgctatcacatgggttttggtcattgcaacaaacaatggtactgaggatgattttcatcagcttttgtagccaaaatgcagaaatctccacaggtagtaatagaaatgagacccttcacatatttaacatatttttcattgtttttcgtatcccagaagacaacacaatattctggacgatcaggtctggtatatgcataaactacagtgtttgagcaataaccccacttataattaggtcgaatgtttgcaaaatatataaaggaatcaacagctagtgcaattttcagtccacctccttcccaagatagtgcagatatttcctttccaggaactttcaaagtacccagatgctcaccaaacggagtgtaaaactgcacaatgttcacatctttgtcctgcatggctgccttctggaagcctgccacagctaacacgccgcccaatgtggttccactggatgccctactacgtacatgccagtgtcaatcaaaacgggattttggtcattctcatgtctcattatttggcatcttccattatcaaagcaaacagcaaggcaagggccatcaggctccgcgtagccttctgtgccatggtaccaatgaattccagcaatgctgatagctccagtgacattcaccaaacaactcagtttcatttttatcataaaatttccttgattatcgtaaatgtgtatttccccatttgccattccaaaaagtaagactttactgtccgcagaccatgttacatgggatagctgtatacccttcaggtcttttccccaaatacgattgccatccactgaaccaactatcacagccccatcttcatatacaatgcagatcttctgtccgtcagcattccagctcatactgcgaacaactgatttatttcgattgttgatcatctcctcaatccaagagcctttatataacatccacacaatgataagcccgttttcatcactggtagtcaacttctgatactgctcattccatgttacaacttgaacagaaccactatgaccttcaagagtctgattcatagaaaggttactgggggctgcaaggcccctcaattttgcatcatctgtctgcgtctctaatttcaaaactttcagtaatccatcttcaccaccgcatgctatgaacccttgttccttgttccaggatacacactgcagcttcacgttattgggaatggaaattttcttgctcaggtagaagaacatcgtgggatccccagagggtcacggcggccgctaaggccctcgacaagtaacggttctacgtctccaatcgggagt

SEQ ID NO: 21784 - DNA, 3354 bp, Homo sapiens
  misc_feature 1, 2, 3, 4, 3353, 3354: n = A,T,C or G
nnnnaagtcggtgagacatggctgaagataaaagcaagagagactccatcgagatgagtatgaagggatgccagacaaacaacgggtttgtccataatgaagacattctggagcagaccccggatccaggcagctcaacagacaacctgaagcacagcaccaggggcatccttggctcccaggagcccgacttcaagggcgtccagccctatgcggggatgcccaaggaggtgctgttccagttctctggccaggcccgctaccgcatacctcgggagatcctcttctggctcacagtggcttctgtgctggtgctcatcgcggccaccatagccatcattgccctctctccaaagtgcctagactggtggcaggaggggcccatgtaccagatctacccaaggtctttcaaggacagtaacaaggatgggaacggagatctgaaaggtattcaagataaactggactacatcacagctttaaatataaaaactgtttggattacttcattttataaatcgtcccttaaagatttcagatatggtgttgaagatttccgggaagttgatcccatttttggaacgatggaagattttgagaatctggttgcagccatacatgataaaggtttaaaattaatcatcgatttcataccaaaccacacgagtgataaacatatttggtttcaattgagtcggacacggacaggaaaatatactgattattatatctggcatgactgtacccatgaaaatggcaaaaccattccacccaacaactggttaagtgtgtatggaaactccagttggcactttgacgaagtgcgaaaccaatgttattttcatcagtttatgaaagagcaacctgatttaaatttccgcaatcctgatgttcaagaagaaataaaagaaattttacggttctggctcacaaagggtgttgatggttttagtttggatgctgttaaattcctcctagaagcaaagcacctgagagatgagatccaagtaaataagacccaaatcccggacacggtcacacaatactcggagctgtaccatgacttcaccaccacgcaggtgggaatgcacgacattgtccgcagcttccggcagaccatggaccaatacagcacggagcccggcagatacaggttcatggggactgaagcctatgcagagagtattgacaggaccgtgatgtactatggattgccatttatccaagaagctgattttcccttcaacaattacctcagcatgctagacactgtttctgggaacagcgtgtatgaggttatcacatcctggatggaaaacatgccagaaggaaaatggcctaactggatgattggtggaccagacagttcacggctgacttcgcgtttggggaatcagtatgtcaacgtgatgaacatgcttcttttcacactccctggaactcctataacttactatggagaagaaattggaatgggaaatattgtagccgcaaatctcaatgaaagctatgatattaatacccttcgctcaaagtcaccaatgcagtgggacaatagttcaaatgctggtttttctgaagctagtaacacctggttacctaccaattcagattaccacactgtgaatgttgatgtccaaaagactcagcccagatcggctttgaagttatatcaagatttaagtctacttcatgccaatgagctactcctcaacaggggctggttttgccatttgaggaatgacagccactatgttgtgtacacaagagagctggatggcatcgacagaatctttatcgtggttctgaattttggagaatcaacactgttaaatctacataatatgatttcgggccttcccgctaaaataagaataaggttaagtaccaattctgccgacaaaggcagtaaagttgatacaagtggcatttttctggacaagggagagggactcatctttgaacacaacacgaagaatctccttcatcgccaaacagctttcagagatagatgctttgtttccaatcgagcatgctattccagtgtactgaacatactgtatacctcgtgttaggcacctttatgaagagatgaagacactggcatttcagtgggattgtaagcatttgtaatagcttcatgtacagcatgctgcttggtgaacaatcattaattcttcgatatttctgtagcttgaatgtaaccgctttaagaaaggttctcaaatgttttgaaaaaaataaaatgtttaaaagtaaaaaaaaaaaaaaaaaattttttttttttttttttgtgtttcaagttaaaaaaaaattttttttttttttttttagaagagactggatttcaccacgttgctcgggctggtctcaaacccctgagctcaggaggtctgcccacctcggcctccaaagtgctaggattacacgcatgagccaccgcgcctggccagtatttacatgttaaatgtgaaactgggattgcggtggctcatgctgtaattcagcacttggggaggctttggttaggaggactttggttaggaggactgcttaagcccaagagttgaggctgcagtgagctgtaatagcaccactgttctccagtccgagcaacagagaacgtgtctctaataaaaacaaaaatgtgagatgatgcctaggttagaatcagcagaggagaagccagagagagcagaggcaaaggaagagaacgttcagcaagccaaatgaaaacagtgtttcaaggaggggcagtgatcccacagcatcaaatgctgaacaggactgagacctaacttaacaatgcatttggccacctagagatcactggtggcctttgacaagaagccatttttagtggaagtggtgaagaccaaagcctgactagaggctcaagggttcaagacttggaggagaaaaggcattagtgaggtagactcaaagcctttggctgcaaacccggaagcccgaggaggaggtaactggaggatagcgagggtgaaggaaggctgttttgttgttcttaagacgggcattttttggccggggggcgcgctcacgcctatactccccacactttgggaggccgaggcgggagtaatagcctcctgggcaaacgacgagctgttagtgtatcttgttaagaactaatatatatatacaaaatttttgtgcaaatcataaaataagtgctggagttcggggcccatcctctgtccgcatcttcgtgacccgggtccgagtaccccacctggaagctgcgtccgtgccgagcccagcgtgtcgctgtttcccaccctcgccggggatggaagcacgcaagcgcagacctcgagcggccgggggatccnn

SEQ ID NO: 21785 - DNA, 489 bp, Homo sapiens
  misc_feature 479, 480, 481, 482, 483, 484, 485, 486, 487, 488, 489: n = A,T,C or G
acttatgaagcccatctaagtaagatcatttcttctaattcaattttctaaaatcatttgtgttttagaaatctcatgattcccaggaaaaaaattttaaattgtgatacaggtttgacagccttttagtcaaataagttaaaacacacacgcaaactcatttactcactttgccattataattcaatcacaaagaaattttggccaggcgtggtggcttacgcctgtaatcccagcactttgggaggccgaggcaggtggatcacgaggtcaggggatcaagatcatcctggctaacatgtgaaaccccgtctctattaaaaataaaaaattagcctggtgtggtggcgggtgcctgtagtcccagctactcgggaggctgaggcagcagaatggcgtgaactcaggaggcggagctcgcagtgagccgagatcgcgccactgcactccagcctggatgacagagcgagactccgtcnnnnnnnnnnn

SEQ ID NO: 21786 - DNA, 1818 bp, Homo sapiens
  misc_feature 1, 2, 3, 7, 15, 17, 21, 24, 37, 42, 46, 75, 77, 79, 1818: n = A,T,C or G
nnnaccngcggtggngnctgntanggacattgtggtnccccngggntgcagggaattgggacgtgcagaaaacgntntnagcccactcacccagtgtacaacacttggaccagacaaggtgatccaggccactacatactttctacagaagccagtcccaggttttgaggagcttaaggatgagacatcggcagagcctgcaaccgactagaggacctgggtcccggcagctctttgctcacccatctccccagtcagacaaggtttatacgtttcaatacatactgcattctgtgctacacaagccttagcctcagtggagctgtggttctcttggtactttcttgtcaaacaaaaccaatggctctgggtttggagaacacagtggctggttttaaaaattctttccacacctgtcaaaccaaaaatctatcagcccacgtggtgtggttggtgaacagtgcatgccaggaggaagcagtccctcctcaccagctctccagccaggacgatcacacagagatgaatggcatctgagtattacggcatccagagccactgctgactcccacttgcacgccaccattcagtcaccagactgggtgccctccgatgggtggaataagtctgcttcatgccaaggctgggctttgggtcccaccaagatgagttctctgtaagactgtggtggagttgcaccaggaggtgcctctgcctctcgacttgcaccctggtcatttgtaagggaaaagagctggaggtggggagagaaagatctccttcagttgggagtccttccacttcaacactggagaactgagccttgcatctctccagggtccaaggccacgcttggtgcacaggcaagacttgcttcagccccaggtgtggtgacttagacctaggaaaccaattatgagtggaaagtgaccctctagttcaactgtgccagaggaaacagccctccagtgcccacctgcctcactcctccctatcatgtaccgtgaaaaccccctctgatggcctcaaggcagtgcctgcaggccgaggcccttctgggggtttctatctttcttccaccagactccaagcccactctcctccaagactgtgttgtcttttctcaccaagagtattaacactactaagtctttcaccttaacttatgactcaggatttattcacgtcctgcccactctaggctcacaggaataaaatcaagtgctagacacactggctgctactaaggcactagcctctgtagctggtggtggcagcgtggggtgccgcccagcgtgctgggtcctggcagtgcctctgctgtgctgcacattgagccctttctcagtcagtggagtatcaagttgggccatctgtctactgacctggccttcatgtaagcagctgtgggctgcgggcagacaggagctcagagatgcagcatgaggcgcttagaaaaacctggccatttgctgcctctaattcccttttgctttgccatattgggctatgtattacctccttgaaataataaaagaataacattgtctaaaaaacaacaaacacgtgtcacggcagagaatagaacttggttcgggcgccttcgggcctagaaaaagcttttctaaaccctgtcgtgtgggggcgcgggccgcgcggtatgttggaacgtgggccaatgccggttccaagaaaaccgggcaagagcatagggctgggttcccccccattaaaaaagccggcggccccgccgcgtggaaacaacccgagggcgtcggacgcctgcgcgctctccccggcgcagcgagccgataatcn

SEQ ID NO: 21787 - DNA, 3505 bp, Homo sapiens
  misc_feature 3503, 3504, 3505: n = A,T,C or G
tcgacccacgcgtccggcgcactgggcgctctcgcccgagaagccgcagtctcgagagcgtaacgaggtgtttcggtagtctctggccatcctttctgcgcacccggtgtcgctgggctgcaccccgggcggggacgtccgccgggcacgggagggggccaagatgccgatcaataaatcagagaagccagaaagctgcgataatgtgaaggttgttgttaggtgccggcccctcaatgagagagagaaatcaatgtgctacaaacaggctgtcagtgtggatgagatgaggggaactatcactgtacataagactgattcttccaatgaacctccaaagacatttacttttgatactgtttttggaccagagagtaaacaacttgatgtttataacttaactgcaagacctattattgattctgtacttgaaggctacaatgggactatttttgcatatggacaaaccggaacaggcaaaacttttaccatggaaggtgttcgagctattcctgaacttagaggaataattcccaattcatttgctcacatatttggtcatattgcaaaagcggagggtgatacaagatttttggttcgagtgtcttatttggaaatatataatgaagaagttcgtgaccttttgggcaaggatcagacacaaaggttagcggttaaagaaagacctgatgtgggagtttatatcaaagatttatcagcttatgtggtaaataatgctgatgatatggatagaattatgacgctaggccacaaaaatcgttctgttggtgcaactaatatgaacgaacatagttcccgttcccatgccatctttacaattactatagaatgcagtgaaaaaggcattgatggtaacatgcatgtcaggatggggaagctccatcttgtagatcttgctggttcagaaagacaggcaaaaactggagctactggacagcgcctaaaggaagctacaaaaatcaatctttcactttccacccttggtaatgtaatttctgccttggttgatggaaaaagcactcatgtgccttatcgtaactctaaactgactcgtcttcttcaggattccttaggaggaaattcaaaaaccatgatgtgtgcaaatattgggccagcagattacaattatgatgaaactatcagtacattacggtatgccaatcgtgctaagaatattaaaaataaagctagaattaatgaagatccaaaggatgctttgctgcgtcagttccagaaagaaatagaagaactgaaaaagaagcttgaagaaggtgaagaaatatcaggctctgatatcagtgggtcagaggaagatgatgatgaagagggtgaggttggagaagatggagagaaaaggaaaaaaagaaggattcaaataggaaaaaagaaagtctccccagacaagatgattgaaatgcaagcaaaaattgatgaggagagaaaagcacttgaaacaaagctcgacatggaagaagaagaaagaaacaaggctagagctgaattagagaaacgggaaaaagatcttcttaaagcccaacaagagcatcagtctttgctggaaaaattatctgccctggaaaagaaggtaattgttggtggggttgacttgttggccaaagctgaggaacaagagaaacttcttgaagaatctaacatggaactggaagaaaggaggaaaagagcagagcaacttcgcagagaacttgaggaaaaagagcaagaacgcttggatattgaagaaaaatataccagtttgcaagaggaagcacagggaaagaccaagaagttaaagaaagtttggactatgctgatggctgcaaagtcagagatggctgatctccaacaagaacatcagagggaaattgaaggcctactggagaacattcggcaacttagccgggagcttcgacttcagatgcttattattgataactttatacctcgggattatcaggaaatgattgaaaactatgtccattggaatgaagacataggagaatggcagctaaaatgtgttgcttatacaggaaataacatgaggaagcaaaccccagtacctgataaaaaggagaaagatccctttgaggtggacctttctcacgtgtatcttgcctatactgaggagagtctgcgtcagtctttgatgaaactagaaagaccacgaacttcaaaggggaaagcaaggccaaagacagggagaagaaagcgttctgcaaagcctgaaactgtaattgactctttactgcagtaaatgttacagacttaaagtcacaataaaaattagtgatattctcatgcctggacaaaatctttaattaaaacagtgaagacttctctataatttcaattaatggaagttgtagatcaatgaataagactggaaataataatttgcttaagaacttttagtctacatatattaatataacattaaaattgtacaactggtgattgttcaaattgttgtactactactcttcaattgtactgtgcagggaagttgggggaacagttcatactatagagagttacagtttagatgtatgtgtaaatcgattagctatttatccaactactgtatatttaggtaactagaatttaaaatagaaaaaaaaaaactgtgtcctgttttgcacatagaaagaagcagatcagattgtcctatgttgcgctgttatatatgaatgtttggactgtacatctaaagaatgattccgtcctaacacccacccagcctgtttgaacacattctaattgtctaacatttgttgcattttaagtatgagatgactgatcttatgaatgttttgtagaaaatgttataatttaacagtctttgcgagtatacatgttttttaacaagttgaaaatgtttcatctgaacctttcctaacttttttttgccagtttgagttcaaatcaaatacaccttaagttctggtttcatgttctcttgaaacattgaattgtacgtaaatataaaggatctactgttgcggaaaattaagaagctaaatactgctcagttatctttgcctgcgtgtatatttttaaaaattcactctgaagtgttatggatgcttttctttgagttctaaattttggtgggaattactttatgtctcccagttaagaagagtctccattttccagaaaatacagctaagcaagaaaaatatcttttaaatactttgcctttaaaacactttttattttgtttttctattttaaaaataaaatattattttctgaatttcttctattgggtaatccagttagaccatattcctctacaaataaaaactatgttgatttcatagtaaagtaagttgtaatagagataattatttttttctgttgttagctgcttatgaaacttttattgtatttttttaaagttatgctactcctggccgggcatggtggctcacgcctgtaatcccagcactttgggaggccgaggcacgtggatcacttgatgnnn

SEQ ID NO: 21788 - DNA, 1255 bp, Homo sapiens
  misc_feature 1, 1175, 1251, 1252, 1253, 1254, 1255: n = A,T,C or G
nccacaagagaaactgcatgacataatctatactgtgttttttctttttctacatctgctgggggctctactatcttcttctcatgctgtcgtgtaacgttccacttatgtcttagcatttcagtgtccacgagcagcatctatttcctgtctggctcgactccctgtctaatacgtctctcatgcccggtgtcgacgctgatcatctatcatgcaccatgttgagccccctgtctgccactaggccttcctttaagtgccgttatgcgcttccttttctgatgttctgctcagcatgttctgggtgcttctcatctgcatcattcctttcagatgctgtagcttcttcctcctctttctgcctccttttctttttcttttttttggggggcttgctctctgactgcagttgaggggccccagggtcctggcctttgagacgagccaggaaggcctgctcctgggcctctaggcgagcaagcttggccttcattgtgatcccaagacgggcagccttgtgtgctgttcgcccctcacaggcttggagcagcatctcatcagtcagaatctttggggacttggacccctggttgtcgtcatcactgcagctctccaagtctttgtttggcttctctccacctgaagtcaatgtagccatcttcacaaacttctgatacagcaagttgggcttgggatgattataacgggtggtctccttagaaaggctccttatctgtactccatcctgcccagtttccactaccaagttggccgcagtcttgttgaagagctcattccaccagtggtttgtgaactccttggcagggtcatgtcctaccccatgagtgtcttgcttcagtgtcaccctgagagcctgagtgataccattctccttccggccgaggcctttgccttgagtccatccatgctttagcagctgctcctcagcaaacttcatcccacgactcttgacctctggggtgacattcatggtgagaaaaaagtctctatcctcagactctcaccagagaagaagaggtgatatcatccgtcattgctgggtccgctccgcggaaacatgtgccggacctgacttgtgcgccgccatcttccccggcatgccgctgcccgcccggcccgctcttagaactgagtggatcccccgggctgcaggnaattcgatgatcaagcttatcgatacccgtcgtacctcgagggggggggcccggtacccccagctgtttgttcccnnnnn

SEQ ID NO: 21789 - DNA, 860 bp, Homo sapiens
  misc_feature 1, 2: n = A,T,C or G
nngaatttaggtgacactatagaagagctatgacgtcgcatgcacgcgtacgtaagcttggatcctctagagcggccgccactactactaaattcgcggccgcgtcgacttttttttttttttaaacacacacataaatctaaagcaaagggtatgccaagattcagctggggccaggtctgacccccactctgagcatctcattagcttcccatcagtggaatacaatggagacatattccacttggtctggcaatgtcctcctggggtgatgaaaagggggcatgttggtgtagacagcaaagtcgtcctccttctggggagccaggttgatcacgttggaatatatggcatcagcatggcaggaaagatcctttagagatagaaccctggttagaggcagatggctgggcaccagggacttccaaagacaaaacaaggcattgggctgtccctacaggacagcaagtagaatgctgagttcttgctgcacaagccctagatctcagttttcataggcatttcctccagatctgacccgccgcctcctcccaccaccctttgtgtggggtctaggtaaggaagcagccagaaggccaggatccccctctctacatgcgactggactagttccttaccgaggacttgtggggaaagttggtctgatgcctcagttgtttcttaaatagtcctagaaaaatggataaactcagagtcagtctgagttgggttaataaccatctttacttggttgtttgctgggtttagggcttaactttgaaatgcaaaatccaccacactcagcccattgggcctctgagactaagttaaattcccaggaagacacaggggaaatgagt

SEQ ID NO: 21790 - DNA, 300 bp, Homo sapiens
  misc_feature 156, 157, 158, 159, 160, 161, 162, 163, 164, 165, 166, 167,168, 169, 170, 171, 172, 173, 174, 175, 176, 177, 178, 300: n = A,T,C or G
actgctttttctattccctgtgagtttataattatttcacaataaaagttcaaaaacacttattggatggacgtcacagtcagaacataatagaagacagaatcagtgaattataggtctgtttaatagaaatgactcaaactgacacacaaagcnnnnnnnnnnnnnnnnnnnnnnngcgggtctgtaatgatactgattatgaaatgtcccctcaaactcattgcagcagataacttttttgagtcattgacttcattttatatttaaaaaattatggaatatcatctgtcattatan

SEQ ID NO: 21791 - DNA, 6927 bp, Homo sapiens
  misc_feature 6924, 6925, 6926, 6927: n = A,T,C or G
cgacccacgcgtccgatcctcccttcactgggcacgagcttctctcccagggcggtgcgacccggagctccagcgcccgagtctccacttcgtttgctgaaacttgctttctaccagctaagaaccatgctgcgagtgattgtggaatctgccagcaatatccctaaaacgaaatttggcaagccggatcctattgtttctgtcatttttaaggatgagaaaaagaaaacaaagaaagttgataatgaattgaaccctgtctggaatgagattttggagtttgacttgaggggtataccactggacttttcatcttcccttgggattattgtgaaagattttgagacaattggacaaaataaattaattggcacggcgactgtagccctgaaggacctgactggtgaccagagcagatccctgccgtacaagctgatctccctgctaaatgaaaaagggcaagatactggggccaccattgacttggtgatcggctatgatccgccttctgctccacatccaaatgacctgagcgggcccagcgtgccaggcatgggaggagatggggaagaagatgaaggtgatgaagacaggttggacaatgcagtcaggggccctgggcccaaggggccagttgggacggtgtcggaagctcagcttgctcggaggctcaccaaagtaaagaacagccggcggatgctgtcaaataagccacaggacttccagatccgcgtccgagtgattgagggccgacagttaagtggtaacaacataaggcctgtggtcaaagttcacgtctgtggccagacacaccgaacaagaatcaagagaggaaacaaccctttttttgatgagttgtttttctacaatgtcaacatgaccccttctgaattgatggatgagatcatcagcatccgggtttataattctcactctctgcgggcagattgtctgatgggggaatttaagattgatgttggatttgtttatgatgaacctggccatgctgtcatgagaaagtggcttcttctcaatgacccggaagataccagttcaggttctaaaggttatatgaaagtcagcatgtttgtcctgggaaccggagatgagcctcctcctgagagacgagatcgtgataatgacagtgatgatgtggagagtaatttgttactccctgctggcattgccctccggtgggtgaccttcttgctgaaaatctaccgagctgaggacatcccccagatggatgatgccttctcacagacagtaaaggaaatatttggaggcaatgcagataagaaaaatctcgtggatccttttgtagaagtttcctttgctggaaaaaaggtttgtacaaacataattgagaaaaatgcaaacccagagtggaatcaggtcgtcaatcttcagatcaagtttccttcagtgtgtgaaaaaataaaactaacaatatatgactgggaccgtcttactaaaaatgatgtagttggaacaacatatctacacctctctaaaattgctgcctctggtggggaagtggaagatttctcatcttcgggaactggggctgcatcatatacagtaaacacaggagaaacagaggtaggctttgttccaacgtttggaccttgttacctgaatctttatggaagccccagagagtacacgggattcccagacccctatgatgagctgaatactggaaagggggaaggagttgcctacagaggcaggatcttggttgaattagccacttttcttgagaagacaccaccagataaaaagcttgagcccatttcaaatgatgacctgctggttgttgagaaataccagcgaaggcggaagtacagcctgtctgccgtgtttcattcagccaccatgttgcaagatgttggtgaggccattcagtttgaagtcagcattgggaactatggcaacaagtttgacaccacctgtaagcctttggcatcaacaactcagtacagccgtgctgtatttgatggcaactactattattacttgccttgggcccacaccaagccagttgttaccctgacttcatactgggaggatattagtcatcgcctggatgcggtgaacactctcctagctatggcagaacggctgcaaacaaatatagaagctctaaaatcagggatacaaggtaaaattcctgcaaaccagctggctgaattgtggctgaagctgatagatgaagttatagaagacacgagatacacgttgcctctcacagaaggaaaagccaacgtcacagttctcgatactcagatccgaaagctgcggtccaggtctctctcccaaatacatgaggcggctgtgaggatgaggtcggaagccacagatgtgaagtccacactggcagaaattgaggactggcttgataaattaatgcagctgactgaagagccacagaacagcatgcctgacatcatcatctggatgatccggggagagaagagactggcctatgcacgaattcccgcacatcaggtcttgtactccaccagtggtgagaatgcatctggaaaatactgtgggaaaacccaaaccatctttctgaagtatccacaggagaaaaacaacgggccaaaggtgcctgtggagttgcgagtgaacatctggctaggcttaagtgctgtggagaagaagtttaacagcttcgcagaaggaactttcaccgtctttgctgaaatgtatgaaaatcaagctctcatgtttggaaaatggggtacttctggattagtaggacgtcataagttttctgatgtcacaggaaaaataaaactcaagagggaattttttctgcctccaaaaggctgggaatgggaaggagagtggatagttgatcctgaaagaagcttgctgactgaggcagatgcaggtcacacggagttcactgatgaagtctatcagaacgagagccgctaccccgggggcgactggaagccggccgaggacacctacacggatgcgaacggcgataaagcagcatcacccagcgagttgacttgtcctccaggttgggaatgggaagatgatgcatggtcttatgacataaatcgagtggtggatgagaaaggctgggaatatggaatcaccattcctcctgatcataagcccaaatcctgggttgcagcagagaaaatgtaccacactcatagacggcgaaggctggtccgaaaacgcaagaaagatttaacacagactgcttcaagcaccgcaagggccatggaggaattgcaagaccaagagggctgggaatatgcttctctaattggctggaaatttcactggaaacaacgtagttcagataccttccgccgcagacgctggaggagaaaaatggctccttcagaaacacatggtgcagctgccatctttaaacttgaaggtgcccttggggcagacactaccgaagatggggatgagaagagcctggagaaacagaagcacagtgccaccactgtgttcggagcaaacacccccattgtttcctgcaattttgacagagtctacatctaccatctgcgctgctatgtctatcaagccagaaacctcttggctttagataaggatagcttttcagatccatatgctcatatctgtttcctccatcggagcaaaaccactgagatcatccattcaaccctgaatcccacgtgggaccaaacaattatattcgatgaagttgaaatctatggggaaccccaaacagttctacagaatccacccaaagttatcatggaactttttgacaatgaccaagtgggcaaagatgaatttttaggacgaagcattttctctcctgtggtgaaactgaactcagaaatggacatcacacccaaacttctctggcacccagtaatgaatggagacaaagcctgcggggatgttcttgtaactgcagagctgattctgaggggcaaggatggctccaaccttcccattcttccccctcaaagggcgccaaatctatacatggtcccccaggggatcaggcctgtggtccagctcactgccattgagattctagcttggggcttaagaaatatgaaaaacttccagatggcttctatcacatcccccagtcttgttgtggagtgtggaggagaaagggtggaatcggtggtgatcaaaaaccttaagaagacacccaactttccaagttctgttctcttcatgaaagtgttcttgcccaaggaggaattgtacatgcccccactggtgatcaaggtcatcgaccacaggcagtttgggcggaagcctgtcgtcggccagtgcaccatcgagcgcctggaccgctttcgctgtgacccttatgcagggaaagaggacatcgtcccacagctcaaagcctcccttctgtctgccccaccatgccgggacatcgttatcgaaatggaagacaccaaaccattactggcttctaagctgacagaaaaggaggaagaaatcgtggactggtggagtaaattttatgcttcctcaggggaacatgaaaaatgcggacagtatattcagaaaggctattccaagctcaagatatataattgtgaactagaaaatgtagcagaatttgagggcctgacagacttctcagatacgttcaagttgtaccgaggcaagtcggatgaaaatgaagatccttctgtggttggagagtttaagggctcctttcggatctaccctctgccggatgaccccagcgtgccagcccctcccagacagtttcgggaattacctgacagcgtcccacaggaatgcacggttaggatttacattgttcgaggcttagagctccagccccaggacaacaatggcctgtgtgacccttacataaaaataacactgggcaaaaaagtcattgaagaccgagatcactacattcccaacactctcaacccagtctttggcaggatgtacgaactgagctgctacttacctcaagaaaaagacctgaaaatttctgtctatgattatgacacctttacccgggatgaaaaagtaggagaaacaattattgatctggaaaaccgattcctttcccgctttgggtcccactgcggcataccagaggagtactgtgtttctggagtcaatacctggcgagatcaactgagaccaacacagctgcttcaaaatgtcgccagattcaaaggcttcccacaacccatcctttccgaagatgggagtagaatcagatatggaggacgagactacagcttggatgaatttgaagccaacaaaatcctgcaccagcacctcggggcccctgaagagcggcttgctcttcacatcctcaggactcaggggctggtccctgagcacgtggaaacaaggactttgcacagcaccttccagcccaacatttcccagggaaaacttcagatgtgggtggatgttttccccaagagtttggggccaccaggccctcctttcaacatcacaccccggaaagccaagaaatactacctgcgtgtgatcatctggaacaccaaggacgttatcttggacgagaaaagcatcacaggagaggaaatgagtgacatctacgtcaaaggctggattcctggcaatgaagaaaacaaacagaaaacagatgtccattacagatctttggatggtgaagggaattttaactggcgatttgttttcccgtttgactaccttccagccgaacaactctgtatcgttgcgaaaaaagagcatttctggagtattgaccaaacggaatttcgaatcccacccaggctgatcattcagatatgggacaatgacaagttttctctggatgactacttgggtttcctagaacttgacttgcgtcacacgatcattcctgcaaaatcaccagagaaatgcaggttggacatgattccggacctcaaagccatgaacccccttaaagccaagacagcctccctctttgagcagaagtccatgaaaggatggtggccatgctacgcagagaaagatggcgcccgcgtaatggctgggaaagtggagatgacattggaaatcctcaacgagaaggaggccgacgagaggccagccgggaaggggcgggacgaacccaacatgaaccccaagctggacttaccaaatcgaccagaaacctccttcctctggttcaccaacccatgcaagaccatgaagttcatcgtgtggcgccgctttaagtgggtcatcatcggcttgctgttcctgcttatcctgctgctcttcgtggccgtgctcctctactctttgccgaactatttgtcaatgaagattgtaaagccaaatgtgtaacaaaggcaaaggcttcatttccagagtcatccagcaatgagagaatcctgcctctgtagaccaacatccagtgtgattttgtgtctgagaccacaccccagtagcaggttacgccatgtcaccgagccccattgattcccagagggtcttagtcctggaaagtcaggccaacaagcaacgtttgcatcatgttatctcttaagtattaaaagttttattttctaaagtttaaatcatgtttttcaaaatatttttcaaggtggctggttccatttaaaaatcatctttttatatgtgtcttcggttctagacttcagcttttggaaattgctaaatagaattcaaaaatctctgcatcctgaggtgatatacttcatatttgtaatcaactgaaagagctgtgcattataaaatcagttagaatagttagaacaattcttatttatgcccacaaccattgctatattttgtatggatgtcataaaagtctatttaacctctgtaatgaaactaaataaaaatgtttcacctttaaaaaaaaaaaaaaaaaaaaagggggggccgaacccaatcgcctattggaggggtatccaaataatggccgctttacannnn

SEQ ID NO: 21792 - DNA, 1056 bp, Homo sapiens
  misc_feature 1055, 1056: n = A,T,C or G
gtttgtgacgccggctgtgagcgcccgagagtctttttgcctttcagagttaaggcctaactggcctgggaaaataattgctgccttttgcatccgcgttggctccgtcccgcaggatcttcccggttcacggacctggcgatttctgagtgttccggaatcacaataaccctgtttaaagaggaatggagattgccactgtccatttagattaatgaggtgtcctgaagtgatggtgacatcaatgaaaggagggttctgacacgttctcacctcgcgggatggcagctgctgatttgtcccatggattcagtgacctttgacgatgtggctgtggacttcacccaggaggagtggactttactggactcaactcagagaagcctctacagtgacgtgatgctggagaactacaagaacctggccacagtaggaggtcagatcatcaaacccagtctaatctcttggttggaacaagaagagtcaaggacagttcagggaggagttctccaaggatgggaaatgcgacttgaaacccagtggtctatacttcagcaggactttttgaggggtccgacatccattgggatacaattggaaggaaaacacaatggaagggaactctgtgactgtgagcaatgtggagaagtcttcagtgaacactcatgccttaagacgcacgtgagaactcaaagtacagggaacactcatgactgtaatcagtatggaaaagatttccttaccctgtgtgagaaaacctctactggtgagaaactttctgagtttaatcagagtgaaaaaatcttcagcctgacaccaaatattgtataccagagaactagcacacaagaaaagtcatttgaatgcagtcactgtggaaaatccttcattaatgagtcataccttcaggcacatatgagaactcacaatggagaaaaactctacgaatggaggaattatgggccaggttttattgactctacaagcctttttgtgcttatagaaaccctcaatgcaaaaaagccctacaaatgtaagggaatgtggaaaaggcnn

SEQ ID NO: 21793 - DNA, 375 bp, Homo sapiens
  misc_feature 374, 375: n = A,T,C or G
acaaactgttaaatttgtcaataagtgacaaaagaattccacaaaatcatggaactctcaaactcaagtaaaccaaaaaatagttaaccaaataatgatctccgtcagacagtgatttgaatgagagatcatatcctaagtttaaaaagtaaaattcaaatgcaatgtgattgaaatacctctgtgttttacattactcctcatctgtttaataaaagagaggatgagtgtgttaaagtttagagacatttcaaaggtcatactgtaaatggatctgtgtatgtggcagaactgaaggaacaagtcttttaagcctctcaggcacatttgacactaatgccaggaactgaagtatttgaaggagctgcagacann

SEQ ID NO: 21794 - DNA, 3244 bp, Homo sapiens
  misc_feature 3243, 3244: n = A,T,C or G
gtacgcgtcgggaggcggagctggcgctgtcccggctctcttgcggggaagcaactgagggggcggcgcggcgggccccggcggccgaagaggctggcaggtggcgccgtggggtgggtgctcctggtgagaggagtccactccgtgcgtgcgggcggaggccggcccccgagagccgccgacatgaagaaagacgtgcggatcctgctggtgggagaacctagagttgggaagacatcactgattatgtctctggtcagtgaagaatttccagaagaggttcctccccgggcagaagaaatcaccattccagctgatgtcaccccagagagagttccaacacacattgtagattactcagaagcagaacagagtgatgaacaacttcatcaagaaatatctcaggctaatgtcatctgtatagtgtatgccgttaacaacaagcattctattgataaggtaacaagtcgatggattcctctcataaatgaaagaacagacaaagacagcaggctgcctttaatattggttgggaacaaatctgatctggtggaatatagtagtatggagaccatccttcctattatgaaccagtatacagaaatagaaacctgtgtggagtgttcagcgaaaaacctgaagaacatatcagagctcttttattacgcacagaaagctgttcttcatcctacagggcccctgtactgcccagaggagaaggagatgaaaccagcttgtataaaagcccttactcgtatatttaaaatatctgatcaagataatgatggtactctcaatgatgctgaactcaacttctttcagaggatttgtttcaacactccattagctcctcaagctctggaggatgtcaagaatgtagtcagaaaacatataagtgatggtgtggctgacagtgggttgaccctgaaaggttttctctttttacacacactttttatccagagagggagacacgaaactacttggactgtgcttcgacgatttggttatgatgatgacctggatttgacacctgaatatttgttccccctgctgaaaatacctcctgattgcactactgaattaaatcatcatgcatatttatttctccaaagcacctttgacaagcatgatttggatagagactgtgctttgtcacctgatgagcttaaagatttatttaaagttttcccttacataccttgggggccagatgtgaataacacagtttgtaccaatgaaagaggctggataacctaccagggattcctttcccagtggacgctcacgacttatttagatgtacagcggtgcctggaatatttgggctatctaggctattcaatattgactgagcaagagtctcaagcttcagctgttacagtgacaagagataaaaagatagacctgcagaaaaaacaaactcaaagaaatgtgttcagatgtaatgtaattggagtgaaaaactgtgggaaaagtggagttcttcaggctcttcttggaagaaacttaatgaggcagaagaaaattcgtgaagatcataaatcctactatgcgattaacactgtttatgtatatggacaagagaaatacttgttgttgcatgatatctcagaatcggaatttctaactgaagctgaaatcatttgtgatgttgtatgcctggtatatgatgtcagcaatcccaaatcctttgaatactgtgccaggatttttaagcaacactttatggacagcagaataccttgcttaatcgtagctgcaaagtcagacctgcatgaagttaaacaagaatacagtatttcacctactgatttctgcaggaaacacaaaatgcctccaccacaagccttcacttgcaatactgctgatgcccccagtaaggatatctttgttaaattgacaacaatggccatgtatccgcacgtgacacaagctgacctcaagagctccacgttttggcttcgagcaagttttggtgctactgtttttgcagttttgggctttgctatgtacaaagcattattgaaacagcgatgatataaaaagaaatactgtccctaccaaaaacaaatacttttatgtacattctgaatgctttaagttctgctagaattattgagatatttatacatgcagagttactttattaatatttgtaattcatgcataagagtattttaatgatagttataactgcagtattggctagcatatggaaagaaaacagctaacagccaaactaaaatggctaaattccagaggccaaaagggaatattttgtaaatatatgtacatattcaggcaagatatggtctcccaagctgagttctagaaatgatgtttctagacatttctaagtggtattgttagtgctcacttggctcactcttctaggtttaagttagcccagagattgtatttactcatggatcactttatttatttcacatttactcagaatgatcctttgggttctataaggacataaggtacaatttgccattgtctctccatttttaaaaacatacaagtcagtgtcagcttaccaacatgacattttttcagtcagttgtggtaggccagccttgaagccatcgcacagtctagaaacttgtgtagctgagtgtgcagctcacctttaagggtgaagttaggtaaaagcaattagcagaggcgttatctatgtgattatgttgcttccttgtcagtatgttgaattttatagccctttcaatgaaataaaaaaaaaatttgtatattaccaatgtttttagtttaaataaagagtcacccttactactgttgaatttcatcccaagtgtaaatcattctataatggctgtgtctgttatagtatattacagtaactgcatgtgtcaccaagtgttctatatcaggctaggataacctagaggcagtaattttttaaatgataaaataaatctaatgaatataaactctcatgataaacctattttttccatcatcagccttttcaagtatttaaataaataactgctgtgtactgaaaaattataaaaaaaggggggggcgaaaatccccggagggccatagacacaccgctgtgaaaagggcccacaggagcgaaaaaccgagacgcgccacaaagcgggggcacacggaccggggacaaccgtgggtcggacgcccagaaacgcacaaagtcgacacgcagcgacataaacacaaaggcaaacacgcaccagcgggccacacacnn

SEQ ID NO: 21795 - DNA, 5262 bp, Homo sapiens
  misc_feature 5147, 5202, 5210: n = A,T,C or G
tttacttcccactgtgttacctggagtgcctactgcctccttacttggtggccacccgggactagagagtgctcatgccagcagcttgagccacttagcgctagcacaccagcaacaacaacagttgttacagcaccagtcacctcatcttcttggacaagcccatccttctgcttcatataatcagcttggactttatcccaattatttggcagtatccaaatggaacacatgcatactcaggacttggtttgccttcttctaagtgggttcacccagaaaatgcagttaatgctgaagcttcattaaggaggaattctcccagtccttggctacatcagcccacccctgtgacctcagcagatggtattggattacttagtcacattcctgtcagaccttccagtgcagagcctcatcggcctcttaaaattacagcccattccagtccaccattgacaaaaactttagtagatcatcataaggaagaattagaaagaaaagcttttatggaaccattacggtctgttgcatccacatcagccaaaaatgacctggatctaaataggtcacagactggaaaagattgtcacttacataggcattttgtggatccagtattaaatcagttacagaggccaccccaggagactggagagaggttaaacaaatacaaagaggaacaccgtcgaattcttcaagaaagtattgatgttgctccctttacaactaaaatcaagggacttgagggtgagagagagaattattccagagtggcatcatcatcttccagtcctaaaagccatatcatcaaacaagatatggatgtagaacgctcagtatcagatctttataaaatgaagcactcagtgcctcagagtttaccccaaagtaactatttcactacattgtctaatagtgtggtcaatgaaccaccaagatcatacccatccaaagaagtttcaaatatttacggtgataaacagagtaatgcccttgcagcggcagcagctaatcctcaaactctgacttcatttataacatctctttcaaagcctccacctttgattaaacaccaaccagaaagtgaaggtttagtaggcaagataccagaacatcttccacatcagattgcatctcactcagtaacaaccttcagaaatgattgtaggagtcctacccatttgacagtttcttctacaaatacactccgcagtatgcctgcattacatagagcaccagtatttcacccaccaatccatcacagcctggaaagaaaggaaggcagctatagtagtctttcccctccaactttaactccggtgatgccagtaaatgctggtggtaaagttcaagaatcacagaagcctccaactctaatacccgaaccaaaagactcccaggcaaattttaagagttcttcagaacagagtttgacggagatgtggagacctaataataacctcagcaaagagaaaactgaatggcatgtggagaaaagcagcggaaagttacaggctgctatggcatctgtcattgtgcgtccatcttctagtacaaaaactgatagtatgccagcaatgcagttagcttctaaagatcgagttagtgaaagatcttcagctggggcacataaaacagattgcctcaaactagcagaagccggagaaactggaagaatcattttgccaaatgtgaattcagacagtgttcacacaaaatctgaaaaaaactttcaggctgtctcacagggcagtgttcccagttcagtcatgtctgctgtaaatacgatatgtaataccaaaacggatgtaatcacatctgctgccgatactaccagtgtttccagctggggtggttcagaagtaatttcctctttatcaaataccattttggcctctacatcatcagaatgtgtatcttcaaaaagtgtcagtcagccagtggctcaaaaacaagaatgcaaggtcagcaccacagcaccagttacattagccagtagtaagacaggaagtgttgttcaacccagttctgggttctcaggcacaactgattttatccatttaaaaaagcacaaggcagcattggctgcagctcagtataaaagtagtaatgccagtgagactgaacctaatgctataaaaaatcagacactttcagcctcccttcctctggatagcactgtaatctgtagtacaattaacaaagcaaactctgtaggaaatgggcaagcttcccagacaagtcaaccaaactaccatactaaactgaaaaaggcctggctcaccagacactcagaagaagataaaaatactaataaaatggaaaattcagggaattctgtatcagaaattattaagccatgttctgtcaacttaatagcctctacatctagtgatatacaaaatagtgtagatagtaagatcatagttgataaatatgtaaaagatgataaagtcaacaggagaaaagccaaaagaacttatgaatctggctctgaaagtggagactcagatgaaagtgaaagcaagtcagagcaaaggactaaaagacaacctaagccaacttacaaaaagaagcaaaatgatttgcaaaagagaaaaggtgaaatagaagaagatttgaaacccaatggagttctcagcaggagtgccaaagaaagaagtaaactgaagttgcaaagcaacagtaatactggcattcctcgttcagtattgaaagattggcgtaaagtcaagaagctgaagcaaactggggaatcctttttacaggatgactcctgctgtgagatagggcctaatttacaaaagtgtcgagaatgtagacttattcgcagtaaaaaaggagaagaaccagctcactcaccagtattttgtagattttactactttagacggttgtcatttagtaaaaacggagtagttagaatagatggtttctcttctcctgaccaatatgatgatgaagctatgagtttgtggacacatgaaaattttgaagatgatgaactagatatagagacttctaaatatatcttggatataataggtgataagttctgtcaattagtaacatctgaaaaaacagctttgtcctgggtgaaaaaggatgccaaaattgcctggaaaagagcagtgagaggagtccgggagatgtgtgatgcatgtgaagcaacattgtttaacattcactgggtctgccaaaaatgtggatttgtggtctgcttagattgttacaaggcaaaggaaaggaagagttctagagataaagaactatatgcttggatgaagtgtgtgaagggacagcctcatgatcacaaacatttaatgccaacccaaattatacctggttctgttttgacagatcttctagatgccatgcacactcttagggaaaaatatggtattaaatcccattgtcattgtactaacaaacagaatttacaagttggaaattttcctacaatgaatggtgtatctcaagttttacagaatgttcttaatcacagtaataaaatttctctgtgcatgcctgagtctcagcagcaaaatactcctccgaagtctgagaaaaatggtggcagcagcccagagagtgatgtaggcacagataacaagttaactcctccagaatcccagtcaccactgcactggttagcagatcttgcagagcaaaaagccagagaggaaaaaaaagaaaacaaagaacttacccttgaaaaccaaattaaagaagaaagagaacaagacaactctgaatctccaaatggcagaacatcacctcttgtgtcccagaataatgaacaaggctcaaccttacgggatttgctgactacaacagctggaaagctacgtgtggggtctacagatgctggcattgcctttgccccagtatattcaatgggagccccaagtagcaaaagtggacggactatgcctaacattcttgatgacataattgcttcagttgttgaaaacaaaattccaccaagtaaaacctccaagataaatgtaaaaccagagcttaaagaagagcctgaagaaagcataatatctgcagtggatgaaaataataaattatacagtgatataccacattcttggatctgtgagaagcatattttatggcttaaggattataagaatagcagtaattggaagcttttcaaagaatgttggaaacaaggacagcctgcagtggtttctggtgtgcataagaaaatgaacattagcctatggaaggcggaatcaattagtcttgattttggagaccaccaagctgatctcctgaactgcaaagatagcatcatttcaaatgccaatgttaaggaattctgggatggttttgaagaagtttcaaaacggcagaaaaacaagagtggagaaacagttgttttaaaattgaaagattggccttcaggagaagacttcaagactatgatgccagcaagatacgaagatcttttaaaaagtctgccattgccagaatattgtaatccagaaggaaaattcaatttggcctctcatttgccaggattttttgtacgtcctgatctaggacccaggttgtgcagtgcctatggaattctcaagaaatttgaggaagaagatttggatgacattttaaggaaaagattgaaggactcaagtgaaatacctggtgctctgtggcatatttatgctgggaaagatgttgacaagataagggaatttcttcaaaaggtataagttagtttgcaaataatatctcttcccctcaagcaaggacttattcattgttgccgtaccttcacttggcattcaacaatataagaccattacataatttttacttcaaagtagatgggagtttttgttgaaagtcaaaaccctgtttctcttgctcctctttgaaagtctgttaacattttgagggttttggaatggtgatttgttcccagttggtagtgtgcctccattccctgttaataaaagactgatctgttcttgagccagatattagttgggtggcgaaaagtagctatctggagtcgcgggatgtaaaaacaaatatttcatggaaacgtctaaagaaggtaggatctttattttctttgaatctgatagatatttttggctgctgacctaggggaatgattctactctatncacatctggatactatggatacttactgagtaggactccaggatttttgagtaantcataccntggactgttaggttgtccatatactctggaaagaaatttatattatccaccc

SEQ ID NO: 21796 - DNA, 621 bp, Homo sapiens
  misc_feature 1, 617, 618, 619, 620, 621: n = A,T,C or G
naactctgtgaatggactaaaaacattgtatttatatacactttaaattactgaagtgtacagaatgtaaattatatctcaataaagctgatatgtgcatacacacacacacacacacacccaacagcagaagaaaatacctaaaaggtaatgaacaaaagcattcagattaaagcatgagaatctgaaggtttggtcatctacatcttgttccatagataagcatagactgtctactaaacacagttgtcaacttgatccaaaaatcttcgctggattctgtttctttcaagactgtttctagaggggtccacaaataattatctttgaagtttctgattaggacatctttcctgggattctaagattatttatgcctctttaattaaaagactttaaggatcaatatattggagttgccctcttgtgtccattattagcagtatttgatatcaactttttcattcgtgttctagagctttttctcttatttctttaagtcagaacaccagatcttcaggtttacgatcatgcaagtttttaggaagattatgagaaaggttgcctgtgcctgtggatcataaggttgaatgtgttgcattaattccttgcaatannnnn

SEQ ID NO: 21797 - DNA, 3561 bp, Homo sapiens
  misc_feature 3561: n = A,T,C or G
acgcggggacctgaggggggcacttccggtctcgtgccgccttcccaggaccctcagggagagcgggcagccttccaggtggacagaaatggactcagaactcaaggaagaaattcctgtgcatgaggaattcattttgtgtggtggagccgaaacccaggttctaaaatgtgggccctggacagacctctttcatgatcaaagtgtcaaaaggcctaagctgcttattttcattattcctggtaacccaggtttttctgccttttatgtgccatttgcaaaggctttatactctttgacaaacagacgctttccagtttggactatcagtcatgctgggcatgcgttggctcccaaagacaagaagattcttacaacatcagaggattcaaacgctcaagaaattaaggacatttatggactaaatggacaaatagagcacaaactagctttcctgagaactcatgtgccaaaggacatgaaacttgtgctcattggccattcaataggcagctatttcacacttcagatgctgaagcgagtccctgagctcccggtaattcgtgcctttctgctctttccaacaattgaacgaatgtctgagtcacccaatggcagaattgccactccacttttgtgctggtttcgatatgttctctatgttactggctacttattattgaaaccgtgtcctgagacaatcaagtccttgctaatcagaaggggccttcaagtaatgaacctagagaatgaattttcaccattgaatatattagaaccattctgccttgctaatgctgcctaccttgggggccaagaaatgatggaggtggtgaagagagatgacgaaaccataaaggagcatttatgtaagcttacattttattatggtactatagatccttggtgtccaaaagagtactatgaagacattaagaaggattttccagaaggagacattcgactctgtgagaaaaacatacctcatgctttcatcacccattttaaccaggaaatggcagacatgattgctgactccctaaaggatgacttgtccaaaatgtaaattggcctgaggaacaagcccccactgccagtacatggaggcagtcagtgtactagacttagtaggtaaatgtttaattttgaagactgatattagaaatgaagaaagtgagaacctttgtcttacaaaccaactctccgctcgccatgttataggctgaagtaaacacagttgatgaatcattccataggtttaaccatacattttccaagactcagggaacacagtgatctacacagagtcttgtgtttgcacaagatgcccagtggcaccatatggtttattttggtaggcaggatctttgcagatgaaaaaaaaatctacatgtacttgattttaattgagttacattgtagaataggctcctctggaggaaattatgaaatacctactagaaaatgtaaaataaatcagtgaatgttaagagtatagttagatatgtgaagtgtatgagattatgacaaggatacactcatgttccaggagcaggaagtgaacctgggtctcctgtaagacagaagatgaagatgagcccaggctaacttagcacagatcttggctgagatcatcaatgtgacgtctaatgtacctgcactagacagagaataaagttcaccagacattactctggtcagctaaccagataaagaattgttgaaggaccccaactgtgcctcctgccacaggacaaccagcaagttctatgctgagccttagcctcccaggttataagctccctgcaggctcctcctctccagagccaggatggagaggcactgggctgtcccaaagcaggcttggatgtgccaacgtacagttgctccttctgtaattcttgcactaaaactccattaaagaccatcaatgagccaaatagtgtgctagccattgaggatggagttcttagctacttaatgattcttttcttctggaaatcttctagtgaataatttttaaaagcttcttttaaactgctcagtaaaacattgccatacattaactctccatttctgcattaacttcatttgctggaaagaaattattttgttaatgaaccaaacccagccattaagttatgtgaattcaccttctctagacacattgaggtatggcagagaagacacatattccctggcctagagtgggctgacaatattgctgcctcccctaaattgactcaatcttgagaaccacatactgcagtgacagttgatcatggatcagaaatattcctttttctcctagaggaaatccctcatggcattatcattccctaaggacaatgagatgtccctccgctcaaatcctaaagccccctgatgaaagatttggctctgatttgctgccaacttattggtaagtgctgaatgagttactgtgctttggcatagcttctacatcacagcaagtgacttctcagaggggaaaagccaagctccagacaaggagtgctgttagcccaaggggaagagctaatagatacataggccgtaagcacagggctgtacacagatcctttattggcatctgcatgagaggcctagaaatcggatgttagaagctaggaatcatggctctgagcgccttgcatacaggagatactcactgatactaaatcaaggcatgtaaacaatactgggtaaatcatacctaccagaataaagagtaacattcagagcttttcttttatctgttattttaaatgttactccatatttcaaaagtctgcacgtatgaaattgtgtcttatttctggtttttagagcctaagaaagatactcattcttaattcctatttatcatctgaaaaccaaatgaatttttgaaataaatgttttaccagcatttctgacctggtctggcctgatctctgtgttgggcaagagagggtacaatttgagcagttctcctgagttagactcggctcaaagtctctctttttaaagtgaaaagccacctttctcattgcttttttcataggtggaagaatcagatttcaaagaagactgaaagttcattctgttccattaggggattagactcaaatggacaacagtggcagactccatttccagaagcagtctgctggtattttccagtcaccacatgggtgggcttgggaaagttatcacttcctgcagagtaccaatgtcagggattgagcttgacaaacggtttgtgcccaaggtggtccccagcaaaaagagattcacaaaggcccctgtggcgtggggcctgaggcccaggcacccagggcgctcttacacaatgggctctacaaacacgctggtggagaaagggcgcccccaacgagggatttttcccgcaccatcttatcaacacgtgctggtctgcaacagagtatgcaccatgagtgaagaggcgactcatcgcgtgattacaacgcagctaagctgcgttctctataccaaagatgggctcgtcttagctgctaatcagcagcctagatacggcggatcggtagctcaaatcan

SEQ ID NO: 21798 - DNA, 609 bp, Homo sapiens
  misc_feature 1, 2, 3, 4, 53: n = A,T,C or G
nnnnaatattagaataatgggtaatttaaagaaataggtattctttaacttanattgaaatgaagtaatattagcagttttttctttgcttagaagaattatatgtaggccgggcgcggtggttcccaaagttaatctcagcctcccacctcagcttcccaagtagctgggactataataggcgccaccactgtgcccagttatttttaattaaaacttatggtttgtttagttataaataaagttgacattttaaaaaacagactagtttcttgctagaaatacatgtttatgtatgtgttgtgaacatatatatgattgtgttttaaaacagatatgaccacattctgaagtgggaactcttccagctggctgacctggatacataccagggaatgctaaagttgctcttcatgaaagaattggagcagattgttaaaatgtatgaagcatacagacaagcccttcttacagagttggaaaaccgaaagcagagacagcagtggtatgcccaacaacatggaaaaaatttttgagctgattttttaaaaatttaagttttgtaagagctttaaaatattttcacagataaaaaaattgcaaacaagt

SEQ ID NO: 21799 - DNA, 6690 bp, Homo sapiens
agggagtcgacccacgcgtccggctggtgacctctttttgctaataggaaaatcacattactacaaaatggggagaaaactgtttgcctgtggtagacacctgcacgcataggattgaagacagtacaggctgctgtacagagaagcgcctctcacatctgaactgcatactgagcgggcaagtcggttgtaagttcagtaaaaccctctgatgatgcaaaaaaaaaaaaaaagtattaagtttcacaagctgtttgtactcaaatatattttctcagtttcagatcctctgctattttattgagtggaaagtcttgagctaaaagggttcaagaagaataatgttgcatttccttatgtctcaggaaacactttttatggtaacttgtcagattgtctatgaacaaacccacttttttagacattgataaagtcttcttcacgtgatattttatacaagaacacttcagatgtattagatgtgactgattttaacaaatcctattagatttgtatcaactagttacatgttctattcatagtcttttgtgaatcattgcctttttgtttaaaaagatggcctattttgagcctttgtataggtacattcctgtttttgtgacaaaagaaaaactttaaaattgtcccaaacagaaaaataatggctatcagaagtatgttttgttttagtgtgagttaccgttactgtatttgtttattgtaaaggtggacatttagcgttcagtgcagttttcaataaaaagtaattaaaatttgttaagttctgaaattcaagtacatctcactaatgtaaatgttctctacttgagatgtttaaggcagttgcattgtcaattagccaatttccagctcttgttactacagggttccataaccagactcaagaccgctgacaattaattacctgtgataacaaaaagtttaattgaaaaatcaaaacctcacacaagtccatcattatcacgtcatgccgtccttaagatgcaatggtgggttagtgctaaatcaattcaaaaaaaaaaacaaagttgctcaacttttagagttctgactttaatctaccccaaagcaaaatgacctggacctggttcaagggagggaagtgaaccttgaaactgttttgccaataacctaacaaacaaaatgatatttacaaagaagtgttgcaaatagtcccatgagttaagagcttgatttaatggatcttctttttaaatagaattaaacctttatactaaaagtatttgcaagtgtcaattaagtccaacaattccaggtatgaaactccctctgagctcttccttatacttcccttcccaattaaaacaaaacaagaaaatcatggtgtcttaaagcctttggcttgcctggccttgtctgctcactcattttaaggtggtggccccatcccaactctaccataaaagtgtctattaacacaagctcacatggagagagacggcgctcatagttactgacctattaccccagggaacaaaaaggtagtttaacgtcttcgtaaccactcatcaaagaggcaatgaaatatgcgtgaaaaggaggccaagcgcacacagaatatcttaccttcacgaatatgtgaagaagtctgggacacgatgaacctaagagtcaaaacataaaaggcaggtctgaatccatggtccacctgggttttaattattagatcttggtcgcccaaacaaaaatttatatatatatatatataaatttgaccccaaggaagaacaagtcaaaacaaaatgccacgctctgtttgctctagaaaaagaaccatcaagtccacagagtgcaggtatgacttactctccagagtcagtcattaatgtctgtcacctagccacgtataatcatctttgaaaaaggactatattctatctatcttgggacaataattatggctgttttaatagttcaagagcataatatagcattgatttaccaaaatttttggcctttaacagccagtctatgaaaaccatttagagccccattcctctctgtagcctaggaaatggaaccatctttaattctttcccacagggaagaatgctgcacctatcacactatgtggtcagggtcactgattgataataaataaataaataatagagcgctcaggggaaacaacactcaccagaccacaacacacagtagaagctaagtgctgagcgtgtactctctggacaacgctggctgcaatgcagactgcaatggctacatgcttttccctctaacaattctctttggctttttcaattgggagggcagattttgcttaacaggcaactagaacaggatctctgcccactaaaaaattatccctatacatagagaaattactacagatgctaagtagtcagaatgctaacattttctacaaacttgattacttattggccaaaatgaaagcaaacagccaatttttaacaacacattcaccacttgaaacaaacagcagcatttacattatatcaaagattcatttctacagaatcgtactaaaaaatcatttttcctgcaagatttagcatgcagcaaaaaatgatcttttcatcctgggaacacctttttactgagttttcggggggaaagaactaaagacatgacagttttgtgggtatttttctatttttagtattctggcagcaaatttgaggttgtacacatttcattatcaactaaacaaaacaagaagcaagcaaatactttaaggttttcacagcctttttcatcacagggaaggaaaaaactgtgtgtgtgtgtgtgtgtgtgtgtgtgtgtgtgtgtgtgtgtgtgtgcgtgcgtgtgtcgtctttccaaattcctggccacatcaatagtctagaaagtgcttatcaggacaccaaatatttctgtgttcctgagataggtctgaaatttttacccagtattgaatgtatacctgaagtggtcaaataatacttcttataaaaaagtttttctacctaagattatagttttaactttaaattaaagaatggccacaattaaccaacatgcaaaaattctcagactaaacactgagaaattcttcatacaatgcatttgccaccttattgcatttttaaaatctttattctgtagtgaattggtattcccaatctgcctaagcaaaggcatgcccttctaacaagatttgcttagagcagaggtgatagaaggaagaatccgaagaccctctggcatggcaatctgggagcagcacattgttgatggagtccaagtgagcacatttcacacaattcatttagtgacaagtgggcttgctcccttttcatccaggaaaaaaactactcacagaccactgcccagaatctggaataagaaccctcattttaaggtattcttcccaacaaataaatatctaaatattgaaagggggcatatcagaaaacttaaaagacacaataaccaaaaccaaaaccctcttcaaaacaagtaagcaatgtctgtatttagttcactctaaaacattcttagcttttcttgcagtttgttcctaaaagatttgattgggcacaagaggaacgaaattgttaataaaataaaagcttatttttgttttgctgtggataatcggtacaaaacgtttccagatctgagacttagatggatcttttaaggtgaaaggagaatgccaggttctactgaaataatatctgaaaggaacaaagagccatttgccatgtgctttttctaagtgcccatgctggaaaaaattttctcaataatatgaagatgctggtacaacttttcctattaaacaatgtcttacacaaccacatgcgttacatttatagacagatttacaatttggaaggaaaaaaagttctgtcttaataaaattagttttttttacaaactgtagtccaactaaagttctctgtctcctcacgcagcagaggcattatctccataaggtgtgtgtggtccaggaaaacacttccccgagcagatcctgccagatttggttcattccatgatgtcgactctgcttggagcaccacactaactttagggtcattacagatctgatgccttggtcttctgctgtttgattttttttttcattcatcttcatcatcctcatcttcctctccatcagacagggatgtacacggccggatctgtcggtagcggtcaagccatttttctaccatctgagtgaccagggggtgatttcgccgccgagaactcttctgcatggcaaccagaactcccccctccgtcacacagcagtccagccactccctgagcagtttttcttgctgttcctcattacctagctcctgagcagaaaggaagtgcacatggagtagcttcctttcactgtcaaccagaggcaaaaatgtgatggtgacatcatcatcggtattgagattagcaccagcacctcggttgccatagccatcattttccatggcaaccaaagcagagaagtggcccctcgtataacccagagcaatcggacttttccaacaaaaactctgttcccacaacaaaggcagataaacaccttgaaaccgagtatatcctaaagtttctccccggaaactcttgtaatattttactccataaactataattggtcgtctaagaatatgtgccagtacaaaaatgtgcgtctgctccaagcttgctccaggctgactagcaagagagagtataaatgcccagtcttcttgccattgttcttctctcaaggaaaaatgtaaaccaaagctctgagaataccatgattcccaatctttccagcgtgtgtaaaaccaatgtgaacagtcatgcaggctgtcatgcagggctttccgaagcactgagtccttgtcatagatgccccaggtagcttgtagaactgaatcaagtaggcagtctcctgcagtccggttccaaagtgcatacagtcgactgtccaaacgtgtagccaattccaaggaccagttaataattggagattcttcttctaattctttttgaacgtctctatcaagcacctcatcaaataatttttcttggactgttgggggcaaatcttcaatatctgctggcaatgtaaatgttacaaggtcagtcagaaaatagcaagcaaaatccccctttctctgatgaagagaggcagctatctctctccggatttgttctgtcagttcaggacacaccattgctggaatacactttgctgcttgttgagacacctctgtaagcaatattgctagcatatcctgcctctgaaaacgtatagccaagtgtacaagagtatagccaacatcaaaggcagaaggacgattcagcaagcgtacttcatctgcggtgagctgacgtgcaatgtctcctcctgatgacttgtatgcttctatggcagctaaatcaccttctacaaccctgaggacttcacagctactatggaaccccactggttagaatttagagctggctcatagatatttagaaaacagacttattttttcccccatatatggcacagttttcaaagttttgccttattttcctttatgacataaaattataatggttattaactttgaaaagaatgccaaatggtaaaaaaaaagccaggacttacctgagcccacatgggccagcccaacactaccctggagttccatggtagctgtgacatcacagcatggtttatgctgtggggtcagggtggacctggagtcggctggcacaatttcaggaacccttaaagagaaaagttagttttaagtggtaatgttcagaatgtcctttaccatggtcagagaaagatgcagatgtggttttcctctagccagagtttaactcatttaaccggttttcatattaaaaggaaactataccacccagtaatacttttttatatcataagcatttggctatagtttaatcctgaacctggagatattcacagcaaactctttcaaaactaatgagctgttttttaaataaaatgacttcaatattttttaaagtgtaccttcaagtaggcaaaagcacaggaacaatctcagaaataatttgagcaggccaaaacacctcctggttgtattttccacataataatagcaacaagttaagatccactatttctattcctagtaacagtgctacaaaacaatagcctattcaaaaaatcagatgaaaatcaaaattataaacaaattcttaaatttaatctataacatatcaagactagcttctattcaacaatctcactgtccattactaaaacatcctctttagaaaaataaaagattcaatgagagaaggaagtcaaatagtcactaattaaagctttctaaattatctgtaagttgtgacaaactatgtcaaatatagtctatactactgagctcttttctccttacatctttgatcagagtgttaacaacccactcttgtgaaaatataagtccccaaagtcatgaaaaaatacctaacctaacagataacttcgtaagaaagaagatcctgccaagcaggaagaattgctactgaaagcaacatggcaggacttaaaggaaacatgccacaaagttatctttgggacaagtgatcagagatggggacaaatgttaacagggctgaaacagatgaacatgagttcacatcatgagcggacgc

SEQ ID NO: 21800 - DNA, 436 bp, Homo sapiens
  misc_feature 41: n = A,T,C or G
gagacagagtctcgctcagtcgcccaggcagagcttgcagnggcagagatcacaccactgcactccagcctgggcgactcagggagcctccgtctcaaaaacaactttttttcatccatggacaattgttgtcttgttttggtcctctttaggaggtggttttataatcagctataaaactccaataggtgctcttgaatgcaggtttctgataactttggagattgtgacaacagaatagaggaagaaccttcaggactcatggagagctaaatgttcatgagtatcaagcaggaattaacaggaattaactgcatggactgaaccaatcttttttactttttgctcaaaatatttgctgggcctttgttttgcgtttccgagtcttatgacttttcttttgagctacctgacagattttaacaatttaagatac

SEQ ID NO: 21801 - DNA, 948 bp, Homo sapiens
  misc_feature 1, 2, 3: n = A,T,C or G
nnnccgcttgaaggcggcgggcgggcgcccgcgaggtgctgaaaggacagttcccgccgccgaacttagcccgcgggtggggcggcccgggagccagcggggcacgtgagcgatggagaccatctggatctaccagttccgcctcatcgtgatcggggactccaccgtgggcaagtcctgcctactgcaccgcttcacccagggccgctttcccgggctgcgctcccccgcctgcgaccccaccgtcggcgtggacttcttctcccgcctgctggagatcgagccgggcaagaggatcaagctacagctctgggacacggcgggacaggagcggttcagaataaaggttctcctcagtttgaaggacaaatggggattttatgcgccccgatcggttttgaagccttttaccgcccaggaatctggttaccaaaaccagcagtgaggtttgatcctgttttccggatgtgccatgcccagtctgtcctcttggggatgataaaggccccagcaaaaaattcatcaggctttaaaagaagatatttcttgagtttattaagcaggcacaggcacttatgcttgatacatggaatgagtcaatcttttcaaacataaaaaacagactccaagatagtgcaatgaagctggtacatgctgagagattgggagaagcttttgattctcagctggttattggagtaagagaatcctatgttaacctttgttctaatcctgaggataaacttcaaatttatagggacaattttgagaaggcatacttggattcaacagagagattttatagaacacaagcaccctcgtatttacaacaaaatggtgtacctacacagggcccctacagcatggtatcgtctactcaggaggttcttctgatacgatctgtgacctgttgggagccaagggaaaagacattttgtatattggaga

SEQ ID NO: 21802 - DNA, 2556 bp, Homo sapiens
aagtatttttacattgcagcacttgttttgcttgttggtgatgtttgcttatttaatacattccgtcagggacagaaattacatgcttttttttctttctaggaagtgtgttgagttccccccttccccgacatttttttcttttttgggtggtggtgatggtagtggttatgtctgtttaaatgaagttgcttttacagcaccaaagacttaatcatccatttcctatataaaggtagctactttttgcatagacctcaagtatattgtagtgtaaaggtggaatttaaggaaaggtattaaattgaggctgtgttttagcttacaggcaagtaataaattgtatcatttatcttgaatgtatcatagataagctgctatataacgattgccacttcagatagctgtgaaattaggtgattaactagttgttatttagccttctaatttctgtataagtctaattacatgaatagaaattggggttttgattttttactttgcttttctgtttggagtgtcattgtaactactgtattgtaaatggtggaaaataattgcatttgttactttggggtgtgttatttgcatcagtattttatctctattaatgtttgtgctcatcactgcatattaaaaaaacttggatgtatcagtgtaacttaattttttattttcatactggcattgtagacacttgagaaagctgtatcttgcaggcttgacttaacttttttccttaaaaatctggaatataatcttacagcatttactggaataaacagtacaaagcattggagtgtaaaactctagatgttttggatttacagcgtttctttgataaatgaattgtataccactagtacagctctagtacagcgttcacaataagctaataatggataagttttcttcactccattaacacaagcagtgttttatttaataatcatcaatgaaataaatgtgcctgaaattgattttaaaaattacagtattagatcataaagtaaaaaccagcagtacatttttagtcacactgaaaatgaaggacttaattttccccacaagtttcagtgtttttagtaattaattctatgcattttatacaaatagaaatatatatatataaaaaattaaatgtttaaaaaggagtagcctaagattaatttaaaagattatttacagatgacacatttatggggtcactatttaagtaaatttgctgccctccacagccttctaattttatttatatgttccagcagattattaggatctgcttacttcttaggaaagaatcaatgctggcaacacattgtttcagaaacaccaagtgcaaaggattgattgtatcacaacaggtacaaaactgacagagttttctttttgtttagggccatgtttactaccctgaaatgttgtattttttgtctttaatttccaagacttaaagcagtcttgttaaattgacataaatggtaaacttcaacattttcataatacagtattaatgtttgataaaggtatatcccagttaactacactgctctttaattgcaatcatgggcattttaatgtattttaaaataaatttcaaaattctgctaaattcttaatttagcatattgacaaagtaatctggatttataccttttaaaaaccattttgaccagttttcttcggttttaatgctttcttaaataaaacactgcatgatttccaagttgcatatttgcatactattttaatttgcaaaatgttttttaaatcaaatatcctgatatttagttgttttttttttcctccagcgtgtttaattaaatatgttactgtattagcaaaacattttcatttttaaaatctgctaattttaaacttggactgtgttaagtaaaagttaaatcatacactgcaaggtgtaggaagatttgttttaatgaatccagtgatacagatttgattactaagtttgaactgttaattgtttaacaattttagacttgtggctttctttctttggtttatttgtttttgcttttactcctatgctacactagtttgccatgtagcaattgcactgtgcaatattacaataaggactgggaaaattttatggatgtaatgtctattacggtttgcgatagtatttctctctagttctcagtgatttaaatgtgaccaagccttctgtactttgtcacaaaaagcgggttttccaggtgactattttggtgagtgtcaaaataagaatttatggtgtattactgtcgattcactttgaattaacctctcttttcgcacaacaagtactaaacaacaaaagggggggggctaaaaaggaacccgagggccaagtttacgctcccccgtttttctgcacaggggcccaaagggggcggagtaaaacgcagcacagcgcgggtcaacaccccgtcggggcaacccggaactgcgctctgggaagacccactcgtcgcgggcgacttggacaacccagaataagccaggaataacatgtcacgtgaacccgcaattgggaaatgcagtatgatc

SEQ ID NO: 21803 - DNA, 3073 bp, Homo sapiens
  misc_feature 1: n = A,T,C or G
ncaagggaaaggccccgctgggaccccgggaaaccggcccaggacaaacaaggggggaccaacgcaggctttaagctccaacgtccggaaggcccgaagggcagccccccattgtgcagggacccaacccgtggggacaacgcccatggggcacaaacctgccgcccgacattctgagaggaaacggcagcacgcttcccaagaaaagagaagtgatcggtctccaaaagttcgcaccaggggggggcaagtgagggacctaacggaaatacctaaactgtggggaataagaattaaatctatttcaagcacatgcaacttggaactcgccaaaaaaaaaaaaaaaagaaagaaagaaagaaagaaaaaagagtttgggagggcccttaactaaaatgtgcttaagacagcttcatgagagagctgccttctttcaaatttgaattttgaacaaggcaaaataacaattaggtgatatatttccctgcagcatgggagtagttaacttcccccaggcaaaatgatctcaataatcattatttattaatgaaaggaggaggcaaattggtgaattaagttgatctaggagatggtggctgacatacactaacggaaatattaggattgctttataagtgaaataaacagtctggtctgtggaacatctccacttcagagagaggaaaaatgcacaaagctcctcaagtgaatctccagctctttcttactctcatgggacagatggcatttttaaaatgacagtctccctttcagttaagaaaaacacaacaataaaaggaaaaggaagataaataaatagtgtgtggatgtctttagatgagactttaaatgttctttaaataacttttgataatgtattttaaatcattacatacaactgccactgcagtgacaatattccagtaggggcagcattttgctaaatgtaaaagattgccatttaaaactcatacatatacatgtgtatatacagttatatcaacactatttatatacatatatatctggagagcaatatttcattgcctttgaatatctatatatctactcccacaatatatactagagacatactgtgtgagtacatacgaaagcatatgtacacatgctctgacatgtatatatacacttttgtctgtgtgtgcataagagctttaaaggcacaatatatagggatgcaagttttctagagagctgcagcaaagttaatacagaatgtcacaaactgagaaaagtcaaaaggaaatatagcagaattcatcacacaggaattcatcaaagcagtttcatcatgagaaaaatgagttagttacagaattcaagaggctaacatgtgaccttgtatgctttccattaaaatgtaaatggtgaagttatgattaaactacaaagcaaataaaaatatgtaaatgacaaattaatgacagtaagtgtggaaataaacctaacactaatatcgatcataaaatcataattatgttcttttgtaatttaagtaaaatgtccccaaattattgagctaaaactttcaaatttgttttatttgaaggttggctttctgtttgtttttgagacaaagatgaatgcccaagtctcaaaattcctattgataatattaccaaaacttgtatcttctgggaaaatttcagagataaagatctttaaaagaaataacagagaagttgatgaaatatgcttaagccagatgcttctggctagaagagacagaattaagggggaaaaaaaccacaatgatgtgtgattttttttttttttttaagtgatgaaagactgaccagtagaaggtggtgaagatgaagaatagtggaactggcaagtaagaactgttcagacaagcattcattgtgtaatatccataaacaaaactataatccaaaggacttccattttagtatgttctgatgatgtactctagactgtcacctcctctggcttacagaataatccagaactttccatagacattaatcttgcttaacaaaggctgtttacctattatacacacacatttttaagggaaatatatgtatatagctttatctatacacacacatatacatacgtgtatatatagatttatacaaatgtataaataaacataatacttttcaatctttccattgacaaggcaagttcacattcagcaaagtgccaccacatcccatatacacatctctgtacagatatacacataagggtctgttttcacccttcaaccgggagaattttttctagcaaatcccattaaccagcaactgaagggagaaatggcaccagtacaaactcccttctttcatttgcatgcatatgtacaagaaatatgcagatctaaaaacaaaatcccaaaacaagagtgaatgaaaccaggagatgctgcaaaaatacaactgtagaaaagaacagcatatagagctttcctagatcttcactatatctaagatgaagtaaatgatgctcaagagacaactacaaattcaggtatattatcagaagttgctttgacatatttcaaagtacatgattttttaagtattaaaaataaatgtcattggaacatttaataccaactctacttttgactatttcagaccaccagatactccagtaataaatgtatagcaaaataacaacttaaaactcaaaataaagggatgtatttttttttaattccatatgaatcaggggtagcacaattttcctatagctgaaatatggggatgggagcactcttaagttaataaataacagcagaactgagtaaaagttttttgaaaaattttggaaataaatgaaatcaccccagctttgaaatatgcacggtgaaatgatcccaccaactccttaaacaaagcagccccttccaaaaattgtttatgaaaggcctatactttttcttaacttcaccaagaaaagatgatcaacaatattttcttactcgaatataaagaaatctataattaacataaaaaagattcaatagatctgtggtcccatcaccacaatagataaacacagctcatgtcggggctgt

SEQ ID NO: 21804 - DNA, 960 bp, Homo sapiens
  misc_feature 932, 933, 934, 935, 936, 937, 938, 939, 940, 941, 942, 943,944, 945, 946, 947, 948, 949, 950, 951, 952, 953, 954, 955,956, 957, 958, 959, 960: n = A,T,C or G
cctgtttctgtcttgaatgtagagggtatttttatttttattttttctgtttctctcttgagtgtatagtgtagagggggtttctgtcttgagtgtaggcctggagatttcccttatatggtacaaaccagcaatgaattaagaggtctcttttctccaagatctagtggttttgtactaggagaactctataaagtatctattccactgtagtgccaaagtacaaatttatttggatttattttttgccatcttattttttaatatatttctttttctatgttgcgcttctttcccacctttatctctcctcctatcttttgggatcagttgggttttctatttaatcatatattttccctttactgatttggaatgtgaatgttacaagtccttttgattatccttaaacatctaaaaatgctaccctctttccaaacaacacaaaggtattgaaataacattaattctaattaaattccacaagttctttattaaatctccaaattggatattattagtattttatatagtcaatgtttatttttttgatgggacatggtgggggcttaccttttttcttgtgtgtcagatgttccttctaggtagaattctttataccttctgaaattatgtccttagagctgtagatttagaactgacatctcttgagctgttctaagataatatcttttactttggagatacgcagtttttattatatgtctagctatagatttatcatggatttaggttcattatgaatctgcagatttgtgtcttccatcaaatctggattgttttcaatattaaaaaaacttctattttaaaatctgtatatagaaaggtacataaacataaatgaacatgttaatgagtaattgtaacaactatgtaactgtccaagtcaagaaataaaacatatcaagtannnnnnnnnnnnnnnnnnnnnnnnnnnnn

SEQ ID NO: 21805 - DNA, 1108 bp, Homo sapiens
  misc_feature 1, 2, 3, 1108: n = A,T,C or G
nnnatgggcagggcgtgggagtggcaaataaaatatttagcccttccttggtaggtagcttctctagaatttaattgtgctttttttttttttttggctttgggaaaagtcaaaataaaacaaccagaaaacccctgaaggaagtaagatgtttgaagcttatggaaatttgagtaacaaacagctttgaactgagagcaatttcaaaaggctgctgatgtagttcccgggttacctgtatctgaaggacggttctggggcataggaaacacatacacttccataaatagctttaacgtatgccacctcagagataaatctaagaagtattttacccactggtggtttgtgtgtgtatgaaggtaaatatttatatatttttataaataaatgtgttagtgcaagtcatcttccctacccatatttatcatcctcttgaggaaagaaatctagtattatttgttgaaaatggttagaataaaactatgactctataaggttttcaaacatctgaggcatgataaatttattatccataattatagtaataataaccttaataagcataagaaaaacagagtcactctggatttcaaaaatgtcaaaaaatgagcaacagagggtccttatttaaacataagtgctgtgacttaggtgaattttcaatttaaggtagaaaataagtttttaggaggtttgtaaaagaagaatcaattttcagcagaaaacatgtcaactttaaaatatagtttattttcatatttttttcttttaaacttggttgataagtggaattaggagtatatttgaaagaatcttagcacaaacaggactgttgtactagatgttcttaggaaatatctcagaagtattttatttgaagtgaagaacttatttaagaattatttcagtatttacctgtattttattcttgaagttggccaacagagttgtgaatgtgtgtgggaaggcctttgaatgtaaagctgcataagctgttaggttttgttttaaaaggacatgtttattattgttcaataaaaaagaacaagatacaaaaaaaaaaaaaaaaaaaaaaaaaaagtgcggccactcggatgcccggacn

SEQ ID NO: 21806 - DNA, 645 bp, Homo sapiens
  misc_feature 644, 645: n = A,T,C or G
acgcgggggctaggaccatgcaggatgtgggcaaacaagaggagaaggctgcctctcatgttcctccccctcggtccccacagttgagcccctgtgggggattcgatgggaaagctgtatggcaacgacttcagccagaccaccatctcacgatttgaggccctcaacctgagcttcaagaacatgtgcaagctcaagcccctgctggagaagtggctgaatgatgcagagtcctctccgtcagacccctcagtgagcacgcccagctcctaccccagcctcagtgaagtatttggtaggaagagaaagaaacggaccagcatcgagaccaacatccgcctgactctggagaagaggtttcaagatgtatctccctcagggtctctgggccccctctctgtccctcctgtccacagtaccatgcctggaacagtaacgtcatcctgttcccctgggaacaacagcaggccttcatctcctggctcaggactccacgccagcagccccactgcatctcaaaataactccaaagcagcagtgaactccgcctccagttttaactcttcaggatcttggtaccgatcgaatccctccacaggggatcctctggaacgactagcaccaagacacgagcactgccgtcnn

SEQ ID NO: 21807 - DNA, 1919 bp, Homo sapiens
  misc_feature 1, 1905, 1906, 1907, 1908, 1909, 1910, 1911, 1912, 1913,1914, 1915, 1916, 1917, 1918, 1919: n = A,T,C or G
ncgtgctgaatgctatgaaccacctcctgacaaagccaggttactgcggcagtatgataatgagaaaaaatgggaactgatttgtgatcaggaacgattccaggtgaagaatcctccccatacatacattcaaaagctcaaaggctatctggatccagctgtaaccaggaagaaattcagacggcgtgttcaagaatctacacaagtgctaagagaactggaaatttctttgagaactaaccacattggatgggtcagagaatttctgaatgaagaaaacaaaggtcttgatgttctagtggaatatctctcatttgcacagtacgcggtaacttttgactttgaaagtgtggagagtactgtggagagctcggtggacaaatcaaagccctggagtaggtccatcgaggacctgcacagagggagcaacctgccctcacctgtgggcaacagtgtctcccgctctggaagacattctgcactgcgatataatacattgccaagcagaagaactctgaaaaattcaagattagtgagtaagaaagatgatgtgcatgtctgtatcatgtgtttacgtgccatcatgaattatcagtatggtttcaacatggtcatgtctcatccacacgctgtcaatgagattgcactaagcctgaacaacaagaatcccagaacaaaagcccttgtcttagaactgttggcagccgtttgtcttgtcagaggcgggcatgaaatcattttatcagcatttgataactttaaagaggtttgtggagaaaaacagcgctttgagaagttgatggaacatttcaggaatgaagacaataacatagattttatggtggcttctatgcagtttattaatattgtagtccattcagtagaagatatgaatttcagagttcacctgcagtatgaatttaccaaattaggcctggacgaatacttggacaagctgaaacacactgagagtgacaagcttcaagtccagatccaggcttacctggacaatgtttttgatgtaggagctctactggaagatgctgaaactaagaatgctgccttggagagggtggaagaactggaagaaaacatttctcatttatctgaaaaactgcaagacacagagaatgaagccatgtccaagattgtggaactggaaaagcaactcatgcagaggaacaaggagctggatgtcgttcgggaaatctacaaagatgcaaatactcaagttcacacattaagaaaaatggtcaaagaaaaagaagaagcaattcaaagacagtctaccctggaaaaaaagattcatgagctagagaaacaagggaccattaaaattcacaagaaaggggatggggatatcgccatactgccagttgtggcttctggcacattgtccatggggtcagaagtggtagcaggtaactctgtgggacccacaatgggggccgcttcctcaggacccttgccccctcctccaccaccactgcctccctcatcagacacacctgaaacaggtaagaagccttggcaggaggactgaggaagttttggaatatttgtatttcttcttttgccaactgtccacttctgtcctttgtccgtttttgttggcatgttctttaagaattgggtttcttgagtagttcttaactgtttacattttgagattaaatttataaatcctcatttcacatatgttgaaatatttttcccacatgtcaatgaggacattttttggtttttgaaaacagtcctttgtccttttaagtgtgttgttttcagatggctttatatgcacatggcttattgcaggaaagccattcccgtattttcaaagtccatctgtttcttttttctttgctagtgcaaaatggtccagtaacaccacctatgccaccgccnnnnnnnnnnnnnnn

SEQ ID NO: 21808 - DNA, 1281 bp, Homo sapiens
  misc_feature 1, 1275, 1276, 1277, 1278, 1279, 1280, 1281: n = A,T,C or G
nggagtcgacccacgcgtccgattaaattttgctttggcttgtcatgtagagtagccttctcaaatttttggttttaatggctgtcaattcccataatcattgcatgagcattcaccatcactgaatgctggtgctgtcgctcctaattttcctttctttttaatttattattatttctaacttttttgttttgttttttaacttgcagtgcaagcttcacataaagcctggccagccaaggatgttcccgcattcacctgcttttgcagtaatatcgtatctctgccatgtgtgttctttagttttattttattttattttatttttttacccttcctcaaacaccagtaactattattaactcgttttgctgaatgttgttgggtggtagaaaatgatagaacaagggaataaccgcgaatgctctgtgcagttggactctgtttccggaaagtaaatgatttgctttttatgcctgttctgatgcagcacgaagcaggcccgttacttgtatgtcgctttggacagaggaaagtggggtaaaatgctacctgtacgtctgacatgaaaacttctcaccgcctcagcagctgaactaaaaacctgaatagccatgacaagagtttgcattttcttgatgattcatctccatgagtgcacaatccctgaactcactgtcttttctccacacttgtcctaagccaaggtagatttgtacgtagacagactggtgagcaagcattatattttatttttacccttgcatgacattttcattttaatcaataacattatttggcctgagcttgtgggtctgttcagactgtctcctctcatggtttgaaactgcatctgaatgcctgccttcaagtcctggccaagttggagtagactggtatgagaaaactatgattagttcacatttactggtgcatccttgatcctctcacagatagaggtcttaacaggttggatcatgtaacattgcttagtagaagaatcttcttctaaggatgatgggctttctacagcctgttaccactaacagtagaggcatcctttctataagacacaccctcagtttggtcccgcagtggggttaagaagggagggacctgaatgacctgattcccaggataactggtcccttctaataaacattttctcactcgaccccttgggaaacatttccgcagaatatatccccctttaaaaaattgcgttaaacccggtgctatgggggccaccatatggcgacgccccggcaaaaaaannnnnnn

SEQ ID NO: 21809 - DNA, 799 bp, Homo sapiens
  misc_feature 1, 2, 3, 798, 799: n = A,T,C or G
nnnaatagtatgagcatggtcattgaatgacttctatagttcattgctagaatagctaaaatattttggagaactagaacagaataactggaatttccctaacaattttaataaaaagtatgctggtgttgattcagtattggacaataagtggaaagaataacattcggaaataaacattcagaagataagcccagtatatgtaagaatctaataagataaatatatttcaaattaatagggaaattatagttattctacatttacagaagattttggaagaaggtgctggctatttgttatggggaaaggatggattaattgctaccccatacttaagtatgttcttttttccttttttgtaatggcagtttgtcagtgtgaaataaaatgttcttttttaattaaaatctaaattaaaaattaaacatggagacaaaaggaaaataggctggcatttttacagtgtcagggtgggttagcaaagacatgatatcagaagcagaaaataaagtgatccgtttgactaaatagaaacaaaacatatagcagagacttgtaaataaaattgaaggcaatcagtaaactgggaaaatacatttgtaattttattgacaaggggtcaacattcttactatttaaagagcccttacagatgaagaaaaagaccccaacacctcagtagaatgcaggctgaagaacatgagccagcagttctcacaggactaaatataaactacacatatatagatattcttttgatttaataatcctacatgtaggcatatgttctaatann

SEQ ID NO: 21810 - DNA, 429 bp, Homo sapiens
  misc_feature 1, 2, 429: n = A,T,C or G
nngctcttgcattgaaattggttttactgtgctgagctctgtgcaaaggagaaaagtgaagtttgaaattcactaacacctgcagaaaatctcttactgctctttaacacacaagcaccaggacttgactcacattattacaactcaatccacttgaacactaattggcctgcctgcttcatgccaggcctataaataggtgatcaaaatgatcatcaaaatgaacagggagtgccaaggtcctgagcagagaacggaatgacagcaaaggaaatgagaccttgggtgaggtgaaccctgggtggacgctcagcagaggagaagggcaccagggctctggagtcctgaactacccaaagaaaagcggagaacaatgattaggcactgaggactcagagaaagccagagtccacagggaaaggggaacan

SEQ ID NO: 21811 - DNA, 1033 bp, Homo sapiens
taagcttgcggccgcttaattaaagatcttttttttttttttttttcaacgttttcaagttttatttttaaaatatattacaacatcacattaaaaacagtagaggaaaacaagcaaacatgatagaattacttttttccaactcaatagtacttagctttacctagaattttcatacagttgatgctaacttcttctgaaccctttctgactagtattttaccttatgtattctttatagtatttccatataatctttaccgagacctattcagagcataacatagacagggcagcacaagcaactgacacctttgttggtagtacagtgttttttcaaccagtttatgagagaatgaaaagaatgaaagtgaaaattttacttaacttagggttatgtagctctaggtaatctcttcagaactcccctgcttcaccttctcaagttaatcaacagtggctagtttataactagaaaccacttaccaaattgcctaaacaagaaaactttttaaaataacaatttgctgatctgtccaataactccaataaagttgaatttgctttatttttccaaaaattatgttgtctagataaagactctttgtaagtgtaaatgtatgatatattgagttgatttttagtccctattagagagttgttagacaagttattaaagtttaagaaaatttggattctaaatttccacctgataacatatatgaaatattttatattttcaatatatacttacttatattttgcacactgtatataaactaggagattagaaatgttttaagtcccttctctgtgtgtatatctgcactatataaagaaaaaaagaaagggtagaaagagacttaactttttttctatcttccataagaaaacttcaaaaatgtttctttttaaaattgaatttttcaaaagggaaaaaatattatcctgtttgatgggaaatcacttgttttaacaaaaggtaaaatactggcatgttaaccacaaggtggtgctataattccatgctggt

SEQ ID NO: 21812 - DNA, 1468 bp, Homo sapiens
tatagggagtcgacccacgcgtccgggcaagaccaaccaagatgagtgccctgggagctgtcattgccctcctgctctggggacagctttttgcagtggactcaggcaatgatgtcacggatatcgcagatgacggctgcccgaagccccccgagattgcacatggctatgtggagcactcggttcgctaccagtgtaagaactactacaaactgcgcacagaaggagatggagtatacaccttaaatgataagaagcagtggataaataaggctgttggagataaacttcctgaatgtgaagcagatgacggctgcccgaagccccccgagattgcacatggctatgtggagcactcggttcgctaccagtgtaagaactactacaaactgcgcacagaaggagatggagtgtacaccttaaacaatgagaagcagtggataaataaggctgttggagataaacttcctgaatgtgaagcagtatgtgggaagcccaagaatccggcaaacccagtgcagcggatcctgggtggacacctggatgccaaaggcagctttccctggcaggctaagatggtttcccaccataatctcaccacaggtgccacgctgatcaatgaacaatggctgctgaccacggctaaaaatctcttcctgaaccattcagaaaatgcaacagcgaaagacattgcccctactttaacactctatgtggggaaaaagcagcttgtagagattgagaaggttgttctacaccctaactactcccaggtagatattgggctcatcaaactcaaacagaaggtgtctgttaatgagagagtgatgcccatctgcctaccttcaaaggattatgcagaagtagggcgtgtgggttatgtttctggctgggggcgaaatgccaattttaaatttactgaccatctgaagtatgtcatgctgcctgtggctgaccaagaccaatgcataaggcattatgaaggcagcacagtccccgaaaagaagacaccgaagagccctgtaggggtgcagcccatactgaatgaacacaccttctgtgctggcatgtctaagtaccaagaagacacctgctatggcgatgcgggcagtgcctttgccgttcacgacctggaggaggacacctggtatgcgactgggatcttaagctttgataagagctgtgctgtggctgagtatggtgtgtatgtgaaggtgacttccatccaggactgggttcagaagaccatagctgagaactaatgcaaggctggccggaagcccttgcctgaaagcaagatttcagcctggaagagggcaaagtggacgggagtggacaggagtggatgcgataagatgtggtttgaagctgatgggtgccagccctgcattgctgagtcaatcaataaagagctttcttttgacccaacaaaaagaacactgaaaactcgagtcgagttctctcctgg

SEQ ID NO: 21813 - DNA, 1395 bp, Homo sapiens
  misc_feature 1, 2, 3, 43, 44, 45, 46, 47, 48, 49, 50, 51, 52, 53, 54,55, 56, 57, 58, 59, 60, 61, 62, 63, 64, 65, 66, 67, 1393,1394, 1395: n = A,T,C or G
nnnaaagtgattatcatgcttcagcttcttaatcatctgtatnnnnnnnnnnnnnnnnnnnnnnnnnttttttggatgcactggctgtacctttattatttttacctcgttcactaacagctccgtgacgcaaggttaccacacacagttagatagtgtctgcattgcacatctaaggctatacagcaaaagaatcagaattagtacaaatacaagaactatatttacagtctgtatactcaagctccaaacatcagataatatttacaaaataaaacatgaaaatgaaaatccaaaattaatgtacattgttgctaatgtgctcaactccttcacgggggagagatcagtttgcaaagtcttggttcaaaaaggccacttatgcattatgggttttgttgtcatgtgtgaggatggtgacaagagacttgaaatctcaacagacaggtactttagagccacaaagtctaagacgatgccttaaatacaagaaggctgagggactcctcaagtgagctgatgccagaataggcagaatgaaaaaaaatgaactcgaagacatgaagaacaacacacaacagccacggtttggcaagagaccaacctcagctcagactttccatctgagcacagccgtttggctatgagctttttactgaattttatagcaactctgatttcttcctttaaatgattggaggctttttaaagatcttatggggctcaaatactaacttcataaatggccttttgaataacagcagcaaataatctctcagctgatatttcaatttactaaggaagcacaaattaaaacattcctgctacacagtcatggtctggccacacactggggtgaatcactggccctggtgaacaactgtagtgcacacaagttagagtcctatgtaaacacatccagcaaaccttctgggagcagcagcatcatgaatcttttctttttttttgagacggagtcctgctttgtcacccaggctggagtgcaatggtgcagtctcaactcactgcagcctccacctcccaggttcaagctattctcctgcctcagcctcccaagtagctgggaccacaggcgcctgccaccacgcccagttaattttttgtatttttagtagagatggggtttcaccgtgttagccaggatggtctcgatctcctgacctcgtgatccgcccgcctcggtctctcaaagtgctgggattacaggggtgagccactgcgcccggccaggttttgtaagtttgaaagggggtctcactctgttgcccaggctggagtgtgatggtgccattaaggctcactgcagcctcaaactcctgggctcaatcaatcctcctgctcagcctccccagtagcagctgggactacatannn

SEQ ID NO: 21814 - DNA, 1540 bp, Homo sapiens
  misc_feature 1, 2, 3, 4, 5, 6, 7, 8, 9, 10, 11, 12, 13, 1537, 1538, 1539,1540: n = A,T,C or G
nnnnnnnnnnnnnccgctccctcttcttgtgcccaatgtcctttgtttgttccgcgggtcgcctgacttgccgccgctgcgtcgtgcctgctttttttcctcttttgcctgcaatgtttttccctgctgccctgccttgtggatcgcctgactcccgctcgcctatagaccgtcctgggctgatgcttcttccggatccccctcccagtgaatatcctagatctgtatctaatgggccatcaggtgtgaaattctcaatccctgtgtgtcacacgatcctccctagttacgggctcctgaagtccatgagtcgatcatcaatcagcacaaatgctatactagtttgtaactgcggggtcagttgtgaaggggaaggacagcagcttatccatatacaaggaagccacagtaaactgctcgacatgctcaaaacgacagcaagcccctgtcagctacacagcgtgatcttagcaggatttcatttttgtttattcatatatatctatgtgtgtgtttatatatatatatgtacgtatgtataaaaaccgtgcccttgttcactgccaacacaacatctgggtggacatgaactcattacaacaaattcttatgtggatgttgtaagaagtcactcaatgtctgtggatttaataagtcacttcacaccacagaaaatatttaataaatccaaaaaaaggaaagaagaatataacgacagaagagcttctgtctcagttctctgaaactgagtcccctataggaaactggtcccaaagttctcgaggggtcattgaagaaacttcggtttgctaatttttttcatccttttagtgttcaaaagttctagaaagactcctcgctgttttcagtttttaaacagtcaaatctccatctcccccagaaggtaacagtctggtgcagatccataaaaacgtgggaggaaggcgcgctggggagaggcctgtccctcttggaaggggccccacctctacatccgcaggaagagaaggaaccaaacagggctccagcacctctctcctgcaaacgagctccctttaaatgccaaatccagtcacacggcagttccttaaacacaggtacatttctgagtaaccaggccagctctaagaggaaacaaaccatgagttgagagaaaaggactcatgacggccatatggtcacatatccacgtgatccatcaataacttaccagggatcgggagctgctggacatatgaagtggaaaggctcagaccgacctccgcggaggtgcgccttaaataggcaacgaaaggagtgcaataaagaaagggcacaaataaacacggcggcagtgcgtccgagaatgcaaaagcaaaaagaataacagcgacaaaaacaagaggtacagagatagaacatcgactaccccggaatagaagcaggccccgagaccaacgatatatatatcatacaagcaagctcgaaacgaaaaacaacaagaaagagagataaaaatagaaagaatacaacaagaggaaaagaaagacacaattannnn

SEQ ID NO: 21815 - DNA, 1414 bp, Homo sapiens
  misc_feature 1, 2, 1406, 1407, 1408, 1409, 1410, 1411, 1412, 1413, 1414: n = A,T,C or G
nnccgcggactcgtgggtggctgtaccgctcgatctaggttctgcggcacgggatggcggaggcgcctcctgtctcaggtacttttaaattcaatacagatgctgctgaattcattcctcaggagaaaaaaaattctggtctaaattgtgggactcaaaggagactagactctaataggattggtagaagaaattacagttcaccacctccctgtcacctttccaggcaggtcccttatgatgaaatctctgctgttcatcagcatagttatcatccgtcaggaagcaaacctaagagtcagcagacgtctttccagtcctctccttgtaataaatcgcccaagagccatggccttcagaatcaaccttggcagaaattgaggaatgagaagcaccatatcagagtcaagaaagcacagagtcttgctgagcagacctcagatacagctggattagagagctcgaccagatcagagagtgggacagacctcagagagcatagtccttctgagagtgagaaggaagttgtgggtgcagatcccaggggagcaaaacccaaaaaaagcaacacagtttgtatacagctatggtagaggaccaaaagtcaaggggaaactcaaatgtgaatggagtaaccgaacaactccaaaaccggaggatgctggacccgaaagtaccaaacctgtgggggttttccaccctgactcttcagaggcatcctctagaaaaggagtatggatgggtatggagccagacgaaatgagcagagaagatacccacagaaaaggcctccctgggaagtggagggggccaggccacgacaggcagaaatccaccaaaacaggagggccacgacatacaaacgcaggacacagaaacaacatgggccccattccaaaggatgacctcaatgaaagaccagcaaaaatctacctgtgacagtgagaacttggcagtcatcaacaagtcttccaggagggttgaccaaagagaaatgccctgtacggaggcaggatcctcaagtagtatctcctttctcccgaggcaaacagaacatgtgctaagaatgtggaaacgcacacaggttctctaattgacaactaaaacagaaaaatacgagtgctggtgtgtgtgaatggtcgggtaggccagtgtggagtgtaagtgttacatgtgtgaatttgaatgtagaaggcagttcaggattagggatgcctagggtgaggtgctgatgtaataggttgaattttctataatacatgtatgggagaagaactgatgaaaaaaatacaatggggattaaaaaacaggaatagataatgatatgaagactaagcattaaaataaggaaaaaaaggagtaagaaagaagaaagagaggaaataaataagattaatacactagcnnnnnnnnn

SEQ ID NO: 21816 - DNA, 1650 bp, Homo sapiens
atagggagtcgacccacgcgtccgcggagacacgcggcggtgtcctgtgttggccatggccgactacctgattagtgggggcacgtcctacgtgccagacgacggactcacagcacagcagctcttcaactgcggagacggcctcacctacaatgactttctcattctccctgggtacatcgacttcactgcagaccaggtggacctgacttctgctctgaccaagaaaatcactcttaagaccccactggtttcctctcccatggacacagtcacagaggctgggatggccatagcaatggcgcttacaggcggtattggcttcatccaccacaactgtacacctgaattccaggccaatgaagttcggaaagtgaagaaatatgaacagggattcatcacagaccctgtggtcctcagccccaaggatcgcgtgcgggatgtttttgaggccaaggcccggcatggtttctgcggtatcccaattcacagacacaggccggatggggagccgcttggtgggcatcatctcctccagggacattgattttctcaaagaggaggaacatgactgtttcttggaagagataatgacaaagagggaagacttggtggtagcccctgcaggcatcacactgaaggaggcaaatgaaattcttgcaggcgcagcaagaagggaaagttgcccattgtaaatgaagatgatgagcttgtggccatcattggccggacagacctgaagaagaatcgggactacccactagcctccaaagatgccaagaaacagctgctgtgtggggcagccattggcactcatgaggatgacaagtataggctggacttgctcgcccaggctggtgtggatgtagtggttttggactcttcccagggaaattccatcttccagatcaatatgatcaagtacatcaaagacaaataccctaatctccaagtcattggaggcaatgtggtcactgctgcccaggccaagaacctcattgatgcaggtgtggatgccctgcgggtgggcatgggaagtggctccatctgcattacgcaggaagtgctggcctgtgggcggccccaagcaacagcagtgtacaaggtgtcagagtatgcacggcgctttggtgttccggtcattgctgatggaggaatccaaaatgtgggtcatattgcgaaagccttggcccttggggcctccacagtcatgatgggctctctcctggctgccaccactgaggcccctggtgaatacttcttttccgatgggatccggctaaagaaatatcgcggtatgggttctctcgatgccatggacaagcacctcagcagccagaacagatatttcagtgaagctgacaaaatcaaagtggcccagggagtgtctggtgctgtgcaggacaaagggtcaatccacaattgtcccttacctgattgctggcatccaacactcatgccaggacattggtgccaagagcttgacccaagtccgagccatgatgtactttggggagcttaagttttaaaaaaaaaagtcctcagcccaggtgaggtggggtccatagcctccatttgtattagaaaggggtttttttaaaaaggatccagcccccccccccggtttttttttcaattaaagttttggaa

SEQ ID NO: 21817 - DNA, 527 bp, Homo sapiens
  misc_feature 518, 519, 520, 521, 522, 523, 524, 525, 526, 527: n = A,T,C or G
actgcaaacagacaccagagggtgcaagagactgtagactcctgaaaaagaaaccagaaaactttgtctggttgtgaaattacacacataggctcagaaaaaattcatcttctgtaaaaggtcctgagagacctgccagaatctctagcttgggctgattggcgaagatctttttccatccaaaaccagtctgtaaagactggaagaggtgaccgtttattcaaatacaaaaattacaacaaaatataaggcacacaaacagggaaaatatggtccaatcagaagaacaaaataactgtccgtaaactgacccaaaagaaatggagatctatgaattacctgacaaatagtttaaaaggaacattttaaattagtgcactacaagaaaacatatacaatgaaactgtgaataaaatgagaatatcaattaagagatggaaactgtaaagatccaaacaggaattctaaataactaaacaggaaattctgaagctgaagaatacagtaactgatttgannnnnnnnnn

SEQ ID NO: 21818 - DNA, 471 bp, Homo sapiens
  misc_feature 343, 470, 471: n = A,T,C or G
acccagcctgcattagtgaattctttataactcaaaaaaagataactccctcattaaatgatcgaaagcatggaatggggggaagaggagctatataatttatttcatgatttaatggaattttggccctaaaacataaaagataatacagcttaaatttttaaaaaagaaaagaaaaaggaaacaaaactgtaagtttcccttacatatgaaacccaactaaacaatatttagatcaaatacactgacctgcctcctatgtagatcagctagcctctgaggggcaaaaaccacactgcttccccattccatgtccccacagaagaataacagctctctgtanttgaaccctgctttgtgctctaccagaagttcccatttcattagctgctcccagcagccctgtgaggtgggtcattgggtatcctaatgtctactttagggatgaagaaaatgaaacccaaccatann

SEQ ID NO: 21819 - DNA, 890 bp, Homo sapiens
  misc_feature 1, 2, 889, 890: n = A,T,C or G
nngatcagaaccgccccccaccctacgtgggtttggttacacacgcgtttcactggtgggagcgaccttttctgcacccgtgctgcgcccgggcccgtagttactgccttgaacatagttgccaaggggtcccttaccaaagaacacatggtgggagtttaaagggccaagacacaaaatatcatagggtaaatagaatcatgacttctaatttcgcctggagttacaaccccctacctatgaagatattattctaaaaggatctaccattcgaaaaatgttgttaattagcaaaattaaatccatattaaaaccacttcgccatttgtaataagaactctccacctaataatgaatgcataaagaaaatgtggtctatacatgcaatgaattattactcagccttaaaaaggaagaaaatcttgccattttgcaggaaacatgcacataccagaaagatattgtgctaagaaataagccaaacaggaacaaagtattacataatcccatctgcacatagtctggatgtatgtattcccctctaattcctatgttgaaatcttatcaccacaggtgatagtattagaaggtgaggcctcagggaagtgatgaggtgagggctcttccctctcgaatggactgggagtatattcattctctgccactcttttgtcttccaccatgtaaggatgcaggaagaagtctctcatcaggtaccagatgacagtgccttgatcctggacttcccagcttccagaacagagatttattcattgtttgctgatcgtgaaatgcacagagcactctggaagcatagctgcagggacaaagacccgaaccccagagttccagaacagcctcttattgcagcaggagccgggattctccnn

SEQ ID NO: 21820 - DNA, 515 bp, Homo sapiens
  misc_feature 515: n = A,T,C or G
acacgctcatgtgcttctgaaacaacgtggtaagaccaaagactagattttaatgcaacttaattacaaaagagaaagagacaaaagataagagacttttctcctctatctatcccacacccctaaaagagctttgggttttaaaaatacagaaaagcactcactcaatgaaattatatcactcaagtgatattttcagtgcatggctacacaaaaatagataccactaaaaactgggctatttagagaaagaggcatatttgttcataactccctgacattgtctcatcttacatttcactatatttattattaaaatggcaacatcatcactctttttgagaaggcaagaaggaattcatctgattagattaaatcaagtatcagaataccatgtctaaggggttcagtaaaataatgtatctaattatttggaaaagacacaaatattttagaggctgaattttctctagtttctagaagtctaatttatagtaccaattccaatcttctan

SEQ ID NO: 21821 - DNA, 1451 bp, Homo sapiens
  misc_feature 1450, 1451: n = A,T,C or G
gtccgaaaggatggagaaatatctaggaaagtgtcttctcagaaaccaccagccttgaagggtacaagtgacgaggaagattctgttttgggtatagccagagaaaacaaggatggagaaaaatctaggacagtgtcttctgagaaaccaccaggcttgaaggctacaagtgatgagaaagattctgttttgaatatagccagaggaaaaaaggatggagaaaaaactaggacagtgtcttctcagaaaccaccaaccttgaaggctacaagtgatgaggaagattctgttttgagtatagccagagaaaacaaggatggagaaaaatctaggacagtgtcttctgagaaaccatcaggcttgaaggctacaagtgccgagaaagattctgttttgaatatagccagcaggaaaaaagtatgggagaaaaaactaggagagtgtcttctcggaaaaaaccagccttgaaggctacaagtgatgagaaggattctttttcgaatataaccagaggaaaaaaggatggagaaatatctaggaaagtgtcttctcagaaaccaccaaccttgaagggtacaagtgacgaggaagattctgttttgggtatagccagagaaaacaaggatggagaaaaatctaggacagtgtcttctgagaaaccaccaggcttgaaggcttcaagtgatgagaaagattctgttttgaatatagccagaggaaaaaaggatggagaaaaaactaggacagtgtcttctcggaaaaaaccagccttgaagtgtcttctcagaaacaaccagcattgaaggctatctgtgacaaggaagattctgttccgaatatggccacggaaacaaaggatgaacaaatatctgggacagtgtcttctcagaaacaaccagccttgaaggctacaagtgacaagaaagattctgtttcgaatatacccacagaaataaaggatggacaacaatctggaacagtgtcttctcagaaacaaccggcctggaaggctacaagtgtcaagaaagattctgtttcgaatatagccacagaaataaaggatggacaaatacgtgggacagtgtcttctcagagacgaccagccttgaagactacaggtgatgagaaagattctgtttcgaatatagccagagaaataaaggatggagaaaaatctgggacagtgtctcctcagaaacaatcggcccagaaggttatatttaaaaagaaagtttctcttttgaatattgccacaagaataacgggcggtgggaaatctggaacagagtatcctgagaatctgcgcaccttgaaggctacaattgaaaataaagattctgtgactcaccggggcttccaccatgttgggcttgctgttcctcagtgtctttactgcatggaaaacatcgacaacattttgccgtttcaccatttcaacaacgatgcctann

SEQ ID NO: 21822 - DNA, 770 bp, Homo sapiens
  misc_feature 1: n = A,T,C or G
ncaaaagcagacaggtctgagctccaacacggcttctcggccccagatgtagctgagcactcctcagggtcaatagtcaaggagataaggagtcaagtgaaggtcccagtccatttaagcagcctcctgggctatgtcagtctgaatcagtttctggcaagatgccccatcaccaacaagatggcccagtggggcacacaagcctgtattgctgagcaggagcagaccttgcagagcttgttttggtttcatcctgtccgtaaggggtcagcgctcttgctttgctcttttcaatgaatagcacttctgttactggtgtccagctgagtttctcttgggtataaaggcttcacagcctcacctctgctccctttccagtgacatccttggcatgtgccctcctcctgctgccctggagcactgggtccagcctttctgaatttccaagggagcagcactgtgtggtgctcaggagcatggactccggagccgggccgtctgggttcagatcctgagcactgaccttatatccactgccagcagattcatcccagggtccctgttcatctggtcaatttcacttcctctgctccagcagaccttctttgttcatgtcctcaagaccctgttttcgggcagcactttgctgtggaccttgctggactgaacaaaggaggaccaaggcgggaataaagacaaagactgaagagtatgttttgaagaagggggtcaggggactccttgcttctagtgaacaagggcccccgcgt

SEQ ID NO: 21823 - DNA, 593 bp, Homo sapiens
  misc_feature 1, 2, 3, 4, 5, 6, 7, 8, 9, 10, 11, 12, 13, 14: n = A,T,C or G
nnnnnnnnnnnnnnggaggggttttttagttcacaagtaaatcttgattaattggtttaaaaatggttgaaaaaataaaattagaaatatcttcaaaagtgtcaacatacattctcacttgagtttactggtcacacagttttatatatgcctctgctagatcttttaatgtaataaggtgataaagcctaaaacaacataatctttaaccctttgataagattaatttaatattgttgctttaataaaatcagccgtgtctcctgacttattgacaggatttatacaataggacttattgacctatgtatttaaccttaaagttcttacttaggtaaattcctgatattaacaggcaataaaattcgttaataaaaacctaataactagctatgtctagtatctcaattttcataggtaatcaaggtataattgttaaaaaataaataaattaggtaattgcaaacagagtaagcatttacaaataaattttcatgtaatttaaaatcttaaagttatgttaaattaaataatactcattaaatgtctgagccatatccaaataagaaaaaaacagaaacaaattgttaagt

SEQ ID NO: 21824 - DNA, 304 bp, Homo sapiens
  misc_feature 302, 303, 304: n = A,T,C or G
atcttctgtgaagccctggcttgacttttcctggaaacttttcctgtgacagtgcatgtatcacaagatggccatttaaaatttaattgcccagatatataacgatctaccactacagcggtagctattagtgcattggggtaattccatggttgattcattttacttttgcagctgaaaaaacctcatgctgagcagagaggcatctaatttgctcatcatccatgctggaagctttttttgtctattagctttgacctttatgacccattggacatttatgcctttaaatgaatggtacnnn

SEQ ID NO: 21825 - DNA, 1770 bp, Homo sapiens
  misc_feature 1, 2, 1750, 1751, 1752, 1753, 1754, 1755, 1756, 1757, 1758,1759, 1760, 1761, 1762, 1763, 1764, 1765, 1766, 1767, 1768,1769, 1770: n = A,T,C or G
nncgtcatttctttatttgtctctgcctatactatttttctctctcctgtttttatcttgggcgagccgagggctcgcactcttctggtctcccaggcccaacccacctgaagaaatgagtggtggattggctccaagtaagagcacagtgtatgtatccaacttgcctttttccctgacaaacaatgacttgtaccggatattttccaagtatggcaaagttgtaaaggttaccatcatgaaagataaagataccaggaagagtaaaggggttgcatttattttatttttggataaagactctgcacaaaactgtaccagggcaataaacaacaaacagttatttggtagagtgataaaagcaagcattgctattgacaatggaagagcagctgagttcatccgaaggcgaaactactttgataaatctaagtgttatgaatgtggggaaagtggacacttaagttatgcctgtccgaaaaatatgctcggagaacgtgagcctccaaagaagaaagaaaaaaagaaaaaaaagaaagctcctgaaccagaagaagaaattgaggaagtagaagaaagtgaagatgaaggggaggatcctgctcttgacagcctcagtcaggccatagcattccagcaagccaaaattgaagaagaacaaaaaaaatggaaacccagttcaggagtcccctcaacatcagatgattcaagacgcccaaggataaagaaaagcacatatttcagtgatgaggaagaacttagtgattaaaatcttgccccagcacagtaataaaaatcaagatttgttagtaacaatcttgaagagctaattttaataaaaataagaaaaattaatactatcatgttaatactattattgtcatcccaagaaaaaagatattttaaaaatttatttgaaaagttcattataagggctttattcatgcctgatttgtttacatgaggacttctgaaattaatccttaaaacaaacttcctgaagaccgaaaagttgaatgatttattgttacttatattaataaacttttcaagagaattttgtctttaaatatgggtgttttgtcatcatatttcttgtagctttatcccaatctggataaattgtaaatacctataaaataaattataaatacctataaaatataaagtaacatagctctaaaaggcttaaaatcaaacccaggtgttaatttggtctggccctacccataggcaccaaattccattccctagaagaaactacttacatgtgcacacatgtagctaaataaagtacatatatttcagtcacttaataaaagaataaaggagaattattcaatctcttatacttctcctaccttcctcaatattcccaatgtggctgtattaaaaatttgggggaatccatatatatcttttttaataaccaagtaaatacttttcatttctgagccaaggaatatgctatgattacgttttttcctagagttaataattgtctattttttttccatgtattgtctttgtatttatgactaaatcttcccattctgtctgcaggtgggtatatggtaatgggattagagagcctttaattttctgctttgtatatttctatattgtttaactttgtaagaatgcccattacttttttaactagtaaaagcaatagaaataagttaatactatcatagtaatattattattgtcatcccaagaaaaaatatattaaaaagatatttgaaannnnnnnnnnnnnnnnnnnnn

SEQ ID NO: 21826 - DNA, 423 bp, Homo sapiens
  misc_feature 181, 254, 422, 423: n = A,T,C or G
acagttgttacataattatataaaataaagcttgtaaaagttctattctatctactctataaagtttatacagattgagcatccctaatctgaaaatccaaaatccaaaatgctccaagatttgaaacttttgtggctctgatatgacatcaaaagtggaaaattccacacctgacatgtntgctttctgatgattcaatgtacctttctgcttaatagttagaaatgagattataaaacactgacattgattnttcttgtgactgattaaatgagtcacactagtttatattcatatcatatatgtatagcattccagagtaaaactcttagacatgtttcaaaggggagtggaacatttgttaaaatcctggttcctcactgggaagttggaaaggccagaattggagctaacagtgaann

SEQ ID NO: 21827 - DNA, 840 bp, Homo sapiens
gtcgacccacgcgtccgctcaaatgtctgctgatagcccctcactcatatttttcatgtgggtttatagctttcatatttctttattattgtaaatgggggctgtggaaggtgagaaaacacatgctttcttaaaacagaagctctctccttcattaatttaaatatttttatcggctctagaaaatgcataaggttagtacaagatcagtagagagaaagtcaaagattacagaagtgctgaagcagaccattcttcctttcttcccaatgtctattaagatcacacataggtaaactgttacaaatccagaatggtgaaagagtccaacaatggctgagggaagtagaggttaagatatagctcaacagtgaaagtagcagggaaagagctgggcaaggccaagaccatcttttgtaccgttggtacagtaggctaaaggtacggtgttccatattaaatacagcaatatgaagaaaaataaattaagtcccttatacctaagacctctatttctctgttgattacatacacagtggcaatggaaagaagggaaaataatggggatagcatttgctcattctctgaccatgcaacactggcagcattctatacttattctattaactgcatcaaccacatcttataaaacacatttccataggccatatgtaataggccttggctttattcattgcatttattggctccttaaattgacaacatataattgttttcatataattttcatcaaataaaattcactttaatttgtatgaacatatttaaagtggaaagtatcttcccaaatggtccatatcttaaagtgtcagatatttt

SEQ ID NO: 21828 - DNA, 1671 bp, Homo sapiens
  misc_feature 1, 2, 3, 4, 5, 1658, 1659, 1660, 1661, 1662, 1663, 1664,1665, 1666, 1667, 1668, 1669, 1670, 1671: n = A,T,C or G
nnnnncagggctgtattatcttgaatatatgtttgcttgttagaacatattaagatatatttatttgccactagtatttaacattttgtgcacattttcataattacattcttacctttcaaattttgactcaaagtggataggctagtgttgatattggagtgcaaatgtatatactccaagagctagttcttaattctgctgagttggaaagccttttattattgtctgtatccttactggttttatctagttcaaaaaaggtgacaacgtctaaattttgatgtggacctctctccatagagagccgctcctaagtgcaagaaattccaacaggtgtcagtaggacttggccctgggggacaacaagtggcaggaacaggatcctttaaaacagtgtcaaacttctcatgcatggagcatgaattcttactaatagagactgtagttttttttcttgtctttggtaaatatataaaagaccttaatttttcttttttaatgaatggagaaaacatgagaaaaccagatggacctgttagtactacatttttaaggcattttatatttgatggtgccgtacttttaataataataaaactgaagttttttagtggcaatactgatttattttttaaaccagaaagataatccatattgattacttactacaaaaaagggaaaatatgccaaaaaataaaaaaccttaaaattcatatgaagcaacgtaacagataactgagcacttggctcaagtggtcagacttttcataatgttactgtgtaagtttggaattacctaataaccccaggctcaggattaacagaaggttctgggtgagttttaaaacatttaatatacctatgatttgttttacaacttgaagaaaaggcaggcagtcttgtgtctaatgagcttaatgcaaattctaattatactgcaaataatttaaagttttgattgcattctacaattgtctgtttggaaaattacatattatgaagtcattatatattttatcaaatcagaaaaagtcagctcaggaactgtagcagcagggagttctaaagatgacatgaactatactataggggtgccctactctatatggcctagggctttggtttgggtcagtcttgttctttcagatacataacaccagcagtactttcgggctcacttcaagaaccagataactctcccaaaccatgatacatgaagtgtataatcaagatttttaattaagctttagaattctttatttgtgtagagtgatggaaatgaccaagaagtaataatataaagcaaaagaattgggagagatcaggttttaagtatataaatattttttttttctcatggcatattctcaaaggtgttttgttacaaaccagattttcattttttaaaaaatgagacttggtggtatttaaaacctacacctaccatgttgctatttcactttcattgctttagttgcttaatatttaagctttgcttcatgctaccttttgtctgtatttcaatcttcataagcctattttgttttgtagacttgaatgataaaaattgtttctcatcttaagtatgctcagagttttaaatgttaaagaatgttgtgtaacctttatccaataaagtctttgattttttaaannnnnnnnnnnnnn

SEQ ID NO: 21829 - DNA, 816 bp, Homo sapiens
  misc_feature 1, 2, 3, 4, 5, 6, 7, 8, 9, 10, 11, 12, 802, 803, 804, 805,806, 807, 808, 809, 810, 811, 812, 813, 814, 815, 816: n = A,T,C or G
nnnnnnnnnnnnggtaactttgaatatgccttttaacatgatgggtaatgtagagaggaggtgccagctgggcttcctgggtcaagtaggggctcagaaagctgtgaaactcactcatttcctgcatcaggacttacttcagtcctggatgaataatattgaagatatacgcttaaaatattcctaacaccaggattcgtgcatgtgttttcttccccaagaaagctataaacagtgaaaaatttgctgtaagtttccctgtatcttctctccctctctcccttcccccgcccctgaaactaaaataaaggaatgttaactgctcatttttctgtgaccagtggaccttatctacactcccaattcagattccttgtaaacatactttgtaaagtcctgtaagatcctgtctcctttgccatgctgctgcaaggtcctaaagtagataaaacctaagttgcaattccggttttcctcaaaatctaagacatgtcacaaaataatttactgcctttgtttccggctcctgtaacaagcttcccacctcatgtatctcccgctttaaagagtttaaaaggcaatcacccaaaaccaacagtggctacccgttcaggacccctcccatgctgtggaagctttgtactttcactctgcttaataaagcttacagttttttctcttctcttggtctgtgtctccatcactcgccgcgggcagccgccacacccaattttttggtgtggctaaggcaagaacgtttggcattacatttaatttcagaaccagcaggaccgctccccannnnnnnnnnnnnnn

SEQ ID NO: 21830 - DNA, 1457 bp, Homo sapiens
  misc_feature 1, 2, 3, 4, 5, 6, 7, 8, 9, 10, 11, 12: n = A,T,C or G
nnnnnnnnnnnnaaccttttaatgtaggtaaaaatccacattattatactttcttatactccttttaccaaaagtatattttactttccttacacaccttgcatataaactgtttcttcaatagttttacattcaggaggcctaattacttttaaattatacaacatttcttgcataaattcccctttataacatttttcacaactttcacagataatcttcaacatgcctcaactttctgacttgttgcaaacatccctttctttaaacaaccagttaatttattttaggacaagaatttaccatataagattctttttatataaattctccttttttaaatgtcagagatgataactattttttaagtgaactttctttacgtctgtggactagactgtctaaggccacaagattagaagttactataatacatgttacactgttaacttttagcaaactttacttttgttgaaaaccttgttagtttgggatttcaattatcctttgctattaataagaccttgtttagtctaaattaacttagaattggtatagatggctttttttttttttttcattagcaaagcagctgccactacagattgaatgcatctgggccatctgcgggttactgggttaaggatttttgataggaaggcctcagtgctttcgggatacgcccttgtttacactgactacactgacaacaaagtggtattagagtgttacagggttacgaagaatacctttaattatcaattataggtttcaaatttaccttggcttttaaaggaatagggtatactgtttttttcttaagtacttgtatatttctttctctttttctctctttgactttctgtctctctctctctgactttccttttgcctctgtctcttcctctttctgcctctctctttctctgtctctctttctcttttcttgactccttctttgtctctctgtctcttcctgtcttttcctctctttgtctctgctggtctttccttgcctctgccagccgcttatgctgctgttctcttaactactgtggcggggaagggggtctaaaaccagctgtaactgtctatgtagggaaactggtctgggtgccttggcttacaggttaccttgtgccatacctttgaaacaagggacctgtctaggcttccttctgatggccaacccacctctaatgctggccagtctatttcacacaaagttctaagttttcctggtgtcatagtaacaccgtaatctcccttaaatcctttcttgaaatttttcaacatagttcctagtagggtgggcttatttgttcctgacccatgcttctttgagacaaaacaccacgctcaccggacgcgtgggtcgagacaaagaacaggtaaagagggcacacacacttttaccgtttataccaaaccaaaatcacgaaattcaaaatccgagt

SEQ ID NO: 21831 - DNA, 947 bp, Homo sapiens
  misc_feature 1, 2, 3, 4, 5, 6, 7, 947: n = A,T,C or G
nnnnnnnctagaaccatttcaaggagaggatagtcattgcttaagtacaaggattttgaagaaaacgaatgtggagattaggccactggactcagaaataaaatccagaataatgtaaaccacattctgaagctgtcactcatatctgagtctcaccttgtgttgcagatagtcgccatgtcctcagcacaggaacagatggctgtcttaatgtcattgatgtgcagacaggaatgctcatctcctccatgacatcagatgagccccagaggtatagtttgtgagttactgggggcgaagacatttacagacatgttcatgatcacttcatttgggcttacattggccagttcaacatatccttccttcatgatgaagaaaggactatttctaaatcattcttgcaggtgctttgtctgggatggaaattccgttttatctggcagtcagtctggtgaactgctcgtttgggacctccttggagcaaaaatcacgtgagagacatacagggccacacaggtaagcagctacttgcagttgccttgatctttgttctcaagataatgaactcaagcctgcctttttccatccagggaacatactctttaagggcaaaataaagccatggatttttccatggtcgtaaacatgttcctggagcctcttgatggacaagtgatctgcatctgtaggttactcagatgaacattatgttaccgcatggatccaaaagagagcttattcaatggagattaaagatcgaagcaaaatcctacaggacacccgcctaagtctagcactgaaacacacacgaaacaaatgtggcaaccagaaaaccaacacgaaggcggcacaagaacaggaagaaaaaggcggaaggacaccaaccgcgcacaccaacgcagaaacaaagcagccggacacaagcacgaaacccaggcccaacn

SEQ ID NO: 21832 - DNA, 952 bp, Homo sapiens
  misc_feature 1, 2, 3, 4, 5, 6, 7, 8, 9, 10, 11, 12, 13, 951, 952: n = A,T,C or G
nnnnnnnnnnnnncggggtacttctagaattaattaacccgaggtacgcggggggggagtggcactcgcagctgcagcaaatctcaaaataaagaggcaacggcctttctcttcctctccatctccctatagcacaccttttatttcttttcttcttttttttaagcctcacgaaagattttacttgtagatcaactttcaaaatgtaggaagtcagaatgggtgacatcatcagaaaaatatgtggagctgatcacaagaagtgaagaacccagagcacgaaagcggttgtgactcctgggcccagggagttgacagcgtctgggcttcagaggagccagcgcctccgagttgtcttgaagtgaggctctgctgtagtcctgttcttctggctctaagatctgaatgttgtgaccactaatttgctctttcctggagggtaaccccagtttggtccacaaggcttgctgcccaatctttgccaacagttgaaccaagactctgaggctgatatgcaatgtcacttacaacattaatcagatactgcatttaagatcttgatgtggaagaaatggaggactcagaaccaaggatttccaagtgattctttcaaagcacaaggaatctcactctgtttaaagctggtctgttctaactgagatgacagtcatgtcctttcaggaactcaaggacgactttcacaagggacacggactctccatctaaatgagcgcgatcgggatttatgcgatggcactatattgtggaagataccaattaagccatggaaggttgaagtttaagctgttttaaattctgtggcgaaaatgttcagcaagctgggggaatcaaggaggttggaaatataatttagcaggtgtaaagaaaatgtccgggaaggatctggagaaggaaacggcatataagggaaaaaagacaggggttacaaann

SEQ ID NO: 21833 - DNA, 1735 bp, Homo sapiens
ccgacctgatattacaagcctgcaccaccacgcccgtctaattttgtattttcactgagaataggctggagtgcagtggcgcaatctcggctctctgcaaccttcacctcccgtgttcaagtgattctcctgcctcagcctcccaaagtgctgggattacaggcatgagccaccgcgtccagcaagaataggtgattttcaaacttggaaacattcagaagttatcgcctcagtttcagattgagtagtctcaaagagattacagacatctaccacaaattctctacttggtgtggtgcaaaatcagtatgatgtaaactttgtctctcagtttcttcaaaggaaagaagcaactggaacacacatataacactaacccttccagctgcattatgagggaccagtacctgtctcaaggcaaaattatgacttagttcatcctcacctctggaggccagtaaaagtgggttatagaagaacaaagaggcatctagatctttcactgggttatttggagagaaacatctcctaccgaaggccagtttaacaagactggtagaggaggttatcttatctaattcacagaaatcaacacattgagtcaagaaaaatgaaacacagaaacactctaaataaaagaagataagtcttcagaaaccaaccctaatgaaatgaagatatgtgattaacctgacaggaaattaaaaagagcaaccataaagagtctcatgggagcaatgcatgaacaaactgagaattttcataaagaaataaaagataacaaaaagtataaagttgaagaatacaataactggactcaaaaatttaatgtgtccaacagaagaatcgatgaagcagaagaaagggctatcaaacttgtagataggccattggaaatcatgtaatgtgaggagaaaaaagaaaaaagattgaagatagtttaagagacttttgagacatcctcaaaggggaataatttatacattaccagatggagaagatagagggaaaaggacagaaaacatatttgaagaaataatgtcagaaaacctcataattctggcaaggaaatagaaatttagatctaagaatctcgaacatcaggtatgatgaatccaaggagactcacaccaaaccatattgtaattaaataaaggttaaagacaatcttcagagcagcaagggaatagtctcttcttacatacaaaatgatccacggaagactgtcagcagacttcaccagaaaactttcacgccagaaggcagtcgtgatatatacaaaaagctgaaaggaaaacactgccatccaggaatactatctccaactatcctgtgtttcaaaaattaaggagaaatataaagttctcaaacaaaagatgtgggagtttaccaccactagacctgcacgggaagaattgctaaagggagtccttcaagctgtagtaaaagagtgctaattagaaacatgaaaacaaatacaaaaaaaattctaaaacttgtatggaactacaaaagacattaaataatcaaagtaatcttgagcaacaaggacacagctggaggcatcactctacctgattttgtaatccattatcaaaaaactgtggtaccagcataaaaacagattcactgaccagtggaacaggaaagcccagacataactcatacatttccatccaattgatttttgacaaaagtggcacacagaatggggagaggacaaataaataaataa

SEQ ID NO: 21834 - DNA, 565 bp, Homo sapiens
  misc_feature 564, 565: n = A,T,C or G
acttttaggcagctcacagagctgatctcaactttgagcaccatgggaggtaaagacctcagggcagttggcctcttgtgcagctaaagtgtttagaaagccagaacgaagtgaaaggaagaccctagagtgggtcagctttctgccaaagatagagaatatagctatagaatgctcccagcctacagtatagagctgttgttgggaagtggctgctcagccagtgcctgtatgccctagcctctcacacagttggactacatgactagttcttgccaatggagtgtgagtagaaatgacgtcagccacttctagaactgtcccataaaaacctcctactatccccctgcctgccagctggatgtcaatactcaaaggcatattaaagccatgtttttaaagggtatgtcagcttggatcactgaatacctgtataaagcagagccctactgtagattggatgttaagtgagcaaggaatatatttctgggttatgttaggtcattgaaatttgacctattatttgtttcagcagttagcataaccttatttggaacagatgann

SEQ ID NO: 21835 - DNA, 195 bp, Homo sapiens
ctttcagatcagttagtaactgaaatacttcgtagttattgagaagcgcagaattggcatccttcacttccatgacgtcccgcctcgtcgcccatagctgccagcagacaaagaacgtcacacttcacagctgtctccgccgccaccaacagcgccaaggtgccagctccgcgcgccaaggtgctctccccgcgt

SEQ ID NO: 21836 - DNA, 1909 bp, Homo sapiens
cagcgcctactgtctcttttttttcctctctctcttcctctctgattatcgcgttctgctctggcccttgctcgcatgccgtcgtatctcgctccgctttcgaccccctacctcgattctttcctttcttttcttatacttgtttttgtgttcctctatgactcgtaggatccacaaggttggacttattatccaggcttgtttacgtcggccagtatctattcggtcctttggttgcgaggcctggtggcgaattcggctcgtggtcgacttgactactcgcatcgcgcactttttggatcggcatctagtctttccgcttcttgaatttctctctgtaaaggagatatataatgaaaaggaattattacaaggtaaattggaccttcttagtgataccaacatggtagactttgctatggatgtatacaaaaacctttattctgatgatattcctcatgctttgagagagaaaagaaccacagtggttgcacaactgaaacagcttcaggcagaaacagaaccaattgtgaagatgtttgaagatccagaaactacaaggcaaatgcagtcaaccagggatggtaggatgctctttgactacctggcggacaagcatggttttaggcaggaatatttagatacactctacagatatgcaaaattccagtacgaatgtgggaattactcaggagcagcagaatatctttatttttttagagtgctgatggagtcttgctatgttgcccaggctgatctcaaactcctggcctgaagtgatcctccctcctcagcctttcaatgctttgggatttacagccatgagcctctgcaccctgcctgtctaagatttctctagttaatcctagaagttggaaaaagaccttaaaacagagactttttgtcttccaagcttggaagagtttgtttctttttgcctttactttctggtgcttttttcttcacttgtagctccacatgttgcaaaataaagtctcatggctgctgtctgtggttattttctaggaaattaaaattttcattttgtggggagggagagattagtattactgattcaggtaatttctacacttaaattgcatagacaacttcactttttgaaactccaccatcctttaaagaaaaagattttctgtttatttccaactttgcttaagaaaaacaactttttttctttcttgcttccatttgtagatgaattcttaatttacagattagctgtggttcacttgcaagtgcattgaaggtaatcagtgatgctaaacttgtagtaacttatcaaaaaattccatcagttttactttgaatattacgagggatttaggagagcaaaagttgattactttggaaatgtaaacagcttaaacccggattgtaaaatcagaagcctggtatgattacaggtacatgaaaagagttggttatttaatatcatttgttaatgcctgggagtgaaattttgagaattgaagaatttagggtcatggtagaatttccagcccagtaaaatttaattgttgcttgtccagtgaatgaatgggcccttttggctaagacatggaaacttaaggtaactgctggaaatccagatattgaaactcttctagcatatccacccttgaaagcaggttagtatgaagagccaactgtaatgacatggagtttagccagagtagtacacatgaaccttttgaggattaaaaaacttgctacactgctacaaaaagcttttattctaacacatataacacattctagtgttaatagtattatatttatgtagtatggttttatattagtctgaaaatttctacaagtgacaggtttgtacttgtaggtttggtgaatttttatgtttatttttttaaaatatgacgatacaagttaa

SEQ ID NO: 21837 - DNA, 3508 bp, Homo sapiens
  misc_feature 1, 2, 3506, 3507, 3508: n = A,T,C or G
nncacgaggggcgcggaggatgaggccgctgcctggcgctcttggcgtggcggccgccgcgctgtggctgctgctgctgctgctgccccggacccgggcggacgagcacgaacacacgtatcaagataaagaggaagttgtcttatggatgaatactgttgggccctaccataatcgtcaagaaacatataagtacttttcacttccattctgtgtggggtcaaaaaaaagtatcagtcattaccatgaaactctgggagaagcacttcaaggggttgaattggaatttagtggtctggatattaaatttaaagatgatgtgatgccagccacttactgtgaaattgatttagataaagaaaagagagatgcatttgtatatgccataaaaaatcattactggtaccagatgtacatagatgatttaccaatatggggtattgttggtgaggctgatgaaaatggagaagattactatctttggacctataaaaaacttgaaataggttttaatggaaatcgaattgttgatgttaatctaactagtgaaggaaaggtgaaactggttccaaatactaaaatccagatgtcatattcagtaaaatggaaaaagtcagatgtgaaatttgaagatcgatttgacaaatatcttgatccgtccttttttcaacatcggattcattggttttcaattttcaactccttcatgatggtgatcttcttggtgggcttagtttcaatgattttaatgagaacattaagaaaagattatgctcggtacagtaaagaggaagaaatggatgatatggatagagacctaggagatgaatatggatggaaacaggtgcatggagatgtatttagaccatcaagtcacccactgatattttcctctctgattggttctggatgtcagatatttgctgtgtctctcatcgttattattgttgcaatgatagaagatttatatactgagaggggatcaatgctcagtacagccatatttgtctatgctgctacgtctccagtgaatggttattttggaggaagtctgtatgctagacaaggaggaaggagatggataaagcagatgtttattggggcattccttatcccagctatggtgtgtggcactgccttcttcatcaatttcatagccatttattaccatgcttcaagagccattccttttggaacaatggtggccgtttgttgcatctgtttttttgttattcttcctctaaatcttgttggtacaatacttggccgaaatctgtcaggtcagcccaactttccttgtcgtgtcaatgctgtgcctcgtcctataccggagaaaaaatggttcatggagcctgcggttattgtttgcctgggtggaattttaccttttggttcaatctttattgaaatgtatttcatcttcacgtctttctgggcatataagatctattatgtctatggcttcatgatgctggtgctggttatcctgtgcattgtgactgtctgtgtgactattgtgtgcacatattttctactaaatgcagaagattaccggtggcaatggacaagttttctctctgctgcatcaactgcaatctatgtttacatgtattccttttactactattttttcaaaacaaagatgtatggcttatttcaaacatcattttactttggatatatggcggtatttagcacagccttggggataatgtgtggagcgattggttacatgggaacaagtgcctttgtccgaaaaatctatactaatgtgaaaattgactagagacccaagaaaacctggaactttggatcaatttctttttcataggggtggaacttgcacagcaaaaacaaacaaacgcaagaagagatttgggctttaacacactgggtactttgtgggtctctctttcgtcggtggcttaaagtaacatctatttccattgatcctaggttcttcctgactgctttctccaactgttcacagcaaatgcttggattttatgcagtaggcattactacagtacatggctaatcttcccaaaaactagctcattaaagatgaaatagaccagctctcttcagtgaagaggacaaatagtttatttaaagcatttgttccaataaaataaatagagggaaacttggatgctaaaattacatgaataggaatcttcctggcacttagtgtttctatgttattgaaaaatgatgttccagaaagattacttttttcctcttatttttactgccattgtcgacctattgtgggacatttttatatattgaatctgggttcttttttgacttttttttttcccaatccaacagcatccttttttttaaaagagagaattagaaaatattaaatcctgcatgtaatatatctgctgtcatcttagttggaccaacttcccatttatttatcttaaaactatacagttacatcttaattccatccaaagaagatacagtttgaagacagaagtgtactctctacaatgcaatttactgtacagttagaaagcaaagtgttaaatggagaagatacttgtttttattaaacattttgagatttagataaactacattttaactgaatgtctaaagtgattatcttttttccccccaagttagtcttaaatcttttgggtttgaatgaaggttttacataagaaattattaaaaacaaggggggtgggtaataaatgtatataacattaaataatgtaacgtaggtgtagattcccaaatgcatttggatgtacagatcgactacagagtacttttttcttatgatgattggtgtagaaatgtgtgatttgggtgggcttttacatcttgcctaccattgcatgaaacattggggtttcttcaaaatgtgtgtgtcatacttcttttgggaggggggttgttttcttctgtttattttctgagactcctacaggagccaaatttgtaatttagagacacttaattttgttaatcctgtctgggacacttaagtaacatctaaagcattattgctttagaatgttcaaataaaatttcctgaccaaattgttttgtggaaatagatgtgtttgcaatttgaagatatctttctgtccagaaggcaaaattaccgaatgccatttttaaaagtatgctataaactatgctactctcatacaggggacccgtattttaaaatctccagacttgcttacatctagattatccagcacaatcataaagtgaatgacaaaccctttgaatgaaattgtggcacaaaatctgttcaggttggtgtaccgtgtaaagtggggatggggtaaaagtggttaacgtactgttggatcaacaaataaaggttacagttttgtaagaaaaaaaaaaaaaaaaaaaaatttgggggcggcccgaaaatttatacattgtgggcggcccggtttgaatgtgtacgtcaaaactgggatgtggttccaaaaggcggggcttaacaagggtggcggttagcagcnnn

SEQ ID NO: 21838 - DNA, 632 bp, Homo sapiens
  misc_feature 628, 629, 630, 631, 632: n = A,T,C or G
cagtctattcaatgtgtagacaacaaggatgtaaacctttatgaaaaccacctccacttaatgaacagtaaatatgttttctcttccttatgacttttcaaataacattttcttttgtctagcttactttgttgtacagaatacacgtaacataaaaaatatgtattaactgtttatgttatcagtaaggtttctggtcaacaggttactagtagttatgttttggaggagtcaaaagttctatgcagattttcaactgcacagagtcgatactgctaatccccaagttgttttagggtcaagtctgtattcaaatgcattcgcaggagttgcctttaacatctacttagactgatttaaccacccctatttactttgccaagaatgtagaggtatattaaaatcaaccaccaacactgtttctaccaatgtctttctgttattcaaatgattatagttttgtcgacttttagtatttggcacatgtgttatctagcttgcataaaataatcttcactgccttgttttaatcattttttattctgtattcgtgttttgtttaacaataatactttccttctccccgcgtctgggctaaggaataacacatacatatttgctaatctgnnnnn

SEQ ID NO: 21839 - DNA, 528 bp, Homo sapiens
  misc_feature 1, 2, 525, 526, 527, 528: n = A,T,C or G
nnaagaattcggcacgaggaaaaagacagtatcgcttcttggccttttggccaagatcaagtgtagataaaaacattgtaagtcatgattcccttggaatacgatcagtattgtgagggaagagaggcaaacccccagcccatcaccacacactgcagctcacacacttcaggttttgtgctcccagacaatgcctgtcctcatgagagcactgttgtctgcgccgggaaatcatcctctgacctgttcacaagtcttctagatgaagattttcagcgggtttggatctatttaaaaagcggtaactgcaaagaggcacctaatccacttgatttgcctgtttttgagaggtactcctggcagttatgaaggtcattaaaagtatcagaataaattgaactttttttttttttgaaacggagtcttgctgggtcggctcactgcaacctccatctcccaaattcaagcgattctcctggctcagcctcccgagtagcttgggactacaggctcatgccaccacannnn

SEQ ID NO: 21840 - DNA, 488 bp, Homo sapiens
  misc_feature 92, 93, 127, 169, 170, 487, 488: n = A,T,C or G
acgcgggctcgaaaatgtggtgaaggtctcagttgttatttcagaaatgaaaccaaaagaaacacaatagcgaataagaaacaatatgagannatcccttaaaagactagaagggttaaaagggagnggaaaattattaaattataaaagaaagggaagaatgatcaannaagcagcaaccactgaagatatgcagagcagatctagcatacggataataggagtcactgaagaaggaaaccaaagcaagaaagcaagccaacactaaaaattataactccaaaaaaaaacttcactgaaatacaagagaaatgtagaactacattttggaagaccagacagtatacctgagaatatggatctagaatgacaaatacctattgatattctagtgaaaacaatactgcactttaaagaaaaaggaaaaagggtcttgcccaggtgcagtggctcacatctgtaatcccagcacttttggggatccaann

SEQ ID NO: 21841 - DNA, 2920 bp, Homo sapiens
  misc_feature 1, 2, 3: n = A,T,C or G
nnncgcggcttgggcggacgtctcgtgagaggcgagccacgcgtccggaactgcattcaaatatcccaggcgcttactcgagagctagctgagcgaatgggccggcgactgtggagttagcgtcctcaatgtggacgccctgagctcccattaggagccgctggctgcggcagcaggggactagcgtgagagttggctaaaaaaaagaaaagaacatggaggcagatataatcacaaatcttcgatgcaggctcaaagaggctgaagaagagcgactaaaagctgcacagtatggtttacaactagtagagagtcaaaatgaattacagaatcaattggataaatgtcgtaatgaaatgatgaccatgactgagagttatgaacaagaaaaatatacccttcaaagagaagttgaactcaagagtcgaatgttagaaagtttgagctgcgaatgtgaagctattaaacaacaacaaaaaatgcacctggagaaattggaagaacaactaagcagaagccatggacaggaagtgaatgaactaaaaactaagatagaaaaactgaaagtggaattagatgaagccaggcttagtgaaaagcagctgaagcaccaagtagatcatcagaaggaactcctctcttgtaaatcagaggaactgcgcgtaatgtctgaacgtgtgcaggaaagcatgtcttcagagatgctggctcttcaaattgagctgacagaaatggagagtatgaagaccaccctcaaagaagaagtgaatgaactacaatacagacaagaacagctagaacttcttattactaacctaatgcgccaggtagaccggcttaaagaggaaaaagaggagcgagagaaagaagcagtttcttactataatgccctagagaaagctcgtgtagcaaatcaagatcttcaggtacagttggaccaggcactccagcaagccttggatcccaatagtaaaggcaactctttgtttgcagaggtggaagatcgaagggcagcaatggaacgtcagcttatcagtatgaaagtcaagtatcagtcactaaagaagcaaaatgtatttaacagagaacagatgcagagaatgaagttacaaattgccacgttgctacagatgaaagggtctcaaactgaatttgagcagcaggaacggttgcttgccatgttggagcagaagaatggtgaaataaaacatcttttaggtgaaattagaaatctggagaaatttaagaatttatatgacagtatggaatctaagccttcagtcgactctggtactctggaagataacacctattatacagatttacttcagatgaagctggataacttaaacaaagaaattgaaagcactaaaggtgaattgtccatacagcgaatgaaagcattatttgagagccagcgggctctagatattgagcgaaaactttttgcaaatgaaagatgcctccagctttcagaaagtgaaaatatgaaactgagagctaaactagatgaattgaaactaaaatatgaacctgaagagacagttgaagtgcctgtactgaaaaagaggcgtgaggtgctccctgtggatataaccaccgctaaagatgcatgtgtcaacaacagtgctctcgggggagaagtttatcgattaccgcctcagaaagaggagacacagtcctgccctaacagtttagaagataacaacttgcaattagaaaaatcagtttctatacacacaccagtagtcagtctctctcctcacaaaaatctgcccgtggatatgcagctgaagaaggaaaagaaatgtgtgaaactcataggagttcccgctgacgctgaggccttaagtgaaagaagtggaaacacccctaactctcccaggttagctgctgaatcaaagcttcaaacagaagttaaagaaggaaaagaaacttcaagcaaattggaaaaagaaacttgtaagaaatcacaccctattctatatgtgtcttctaaatctactccagagacccagtgccctcaacagtaaagacttttctttaataagagtacggtgccacttgcctcaaaagttactatggtgcttaagattgtcttgatctgacatatatcaccttctgggttatttactcattgtgccaggacctggcattttcatgtgcctttgaccaagtgttcagaatttgcttgactctaacctggagagcttcttaagtgatgccccttcatggagcttctatgacagtgaataaactattaattgaaggaaaatgttataattaatgtatctatttgctgcattgtatatggattaaatgataaaaaacaagtaatctaccctcagagccatgtatttgagaatgcttcaatcatattttcctatgtacttttttttataaacttagttttagactatgttgtaaaaatgggaaggttgtaaactatgttgtaaaaataggaaatgtggcttaaaatatatacattatattgtttcaggattttgtcagtgtttaaagaaccaatgttcatctttgtatttatatacatgatttaaattttgtctaaaattttaaataaaactgcagtgatttatccttaaaaacaaaaaaaaaaacggaagagtctttttcatttactaattttactaatttattctttgacatacaccaatgtgtgatattgaaaaacagaaagcaggtcataaagatggtcctgtccgataaaggaaatcttttaaaacactttcaaaagctaaaataactaaaactattaagcctattgatagctaagaaaataattgtcttcaataatattaggtggaaccatatgaaactgctgacagtttttaaactacaaatgcagcaatttcatatgtaacagcctaatccatggggttgtacctcggccgcagaccac

SEQ ID NO: 21842 - DNA, 1032 bp, Homo sapiens
  misc_feature 1032: n = A,T,C or G
tatagggagtcgacccacgcgtccggttggaaactgtcaggttgccgtctaggtagcggttgtgcttgctgaggctgcacttgctgacactgcagctgcgacgcggctaagaggcgcagagcgaggagtcgggatttggtcgcgagcggcgacgagcatttgtgcagaatgtcatcagatgaggagaaatactcacttccagttgtgcaaaatgactccagtcgaggcagttctgtctcttcgaatcttcaggaagaatatgaagaactgcttcattatgctatagtgactccaaatattgaaccctgtgcttcacagtcatctcatcctaagggagaattggtgccagatgtcagaatttctacaattcatgatattcttcatagtcaaggaaataactctgaagtaagagaaactgcaatagaagttggaaaaggatgtgatttccatatttcaagtcattcaaagacagatgagtcatcaccagtgttatcgccaaggaagccttctcacccagtcatggattttttcagttcacatcttttagctgactcttcctcaccagcaacaaattctagtcatacagatgcccatgaaatacttgtgagcgattttcttgtttctgatgaaaaccttcagaagatggaaaatgtgcttgatctttggagttcaggtcttaagacaaacatcatatctgaactaagtaaatggagacttaattttattgactggcaccgaatggaaatgagaacaagagaaaggaaaaacatggcggcaccatttaaaacaactgtgtaatcagatcaatgaattgaaggagctgcaaaaaactttgaaatctccccttggggaaagatgacgggattctagctggtcctgcctggcagcaaaggaagttcgtgggacattctcctgccatgccgttaccacgtgttaggacctggcacagaatggaagaattgtctacgggatgacatctcagaattaccacaaatttgagaaaagcagttccaccctgcggtttctctcaan

SEQ ID NO: 21843 - DNA, 1832 bp, Homo sapiens
  misc_feature 1, 2, 3, 4, 1823, 1824, 1825, 1826, 1827, 1828, 1829, 1830,1831, 1832: n = A,T,C or G
nnnnatcccaccccttctctgtgttttcactctgaagctctacaaactttacacctgaatgaacgccaaacctctatggatatataaagggaagcttgaggaggaatttcacagttacagtgcagaagcagaggcaaaagaattaaccagctcttcagtcaagcaaatcctctactcaccatgcttcctcctgccattcatttctatctccttccccttgcatgcatcctaatgaaaagctgtttggcttttaaaaatgatgccacagaaatcctttattcacatgtggttaaacctgttccagcacaccccagcagcaacagcacgttgaatcaagccagaaatggaggcaggcatttcagtaacactggactggatcggaacactcgggttcaagtgggttgccgggaactgcgttccaccaaatacatctctgatggccagtgcaccagcatcagccctctgaaggagctggtgtgtgctggcgagtgcttgcccctgccagtgctccctaactggattggaggaggctatggaacaaagtactggagcaggaggagctcccaggagtggcggtgtgtcaatgacaaaacccgtacccagagaatccacaagaatcactggctgcaagtgcaagaagtacacctcggcagcacaacgagtccagtcacaactttgagagcatgtcacctaccaagccagtccagcatcacagagagcggaaaagagccagcaaatccagcaagcacagcatgagttagaactcagactcccataactagacttactagtaaccatctgctttacagatttgattgcttggaagactcaagcctgccactgctgttttctcacttgaaagtatatgctttctgctttgatcaaacccagcaagctgtcttaagtatcaggaccttctttgggaatagtttttccttttcaagtttttcaagatgtaggtatatccatgaatgcaatttgcatttaaattccacgtatcctgtagttttaattcctcattgttcttaaaagactgttgatactataaacatcagtgaatcattatattttaaaacagaaaagggcttctcagataccctccatctactggcccatcccctctcctaaacaaaactccttcaaaacaggttaaaaaaaatatgttgtcatgaatcttcacagtaacatttcagaaaggtgcttttttggtactcttcatgggaacagtttagcagccatgagtgatcttcctttgaaagagaatgaaagaccctgtgacatttcacttcaaaaataagccctgtagctctttacggtcgcatagtataaaattataccctgcatgctgaccctcgcttggaatggaatgccagaaatgcatggcagcagctaataagtaaagctgattaactatttatttgtcaatgttattatttaatgagctttcacatgtgatttgtttcaaaactttaattttttaatgttttgaaactttttcatggacctaaatattttcctatatgatttgtggttgattagaaatatgaaatacatgttgtagatatgtaaaatgaatattttagtctccttattacatatatgttcatggtgaactttatcaatagtatggatctttttaaatcaataagatgctttgtaaagttgaaataagtaatactttcttgtttaatctgtgcaatcagaaggtgtcttgaccttcaattcaattggtttcttttaacaaaaataaacactgctaaaagttaaaaaaaaaaaaaaaaaaaaaaaaaaagggtgcaaaaattgtagaataaatgtataannnnnnnnnn

SEQ ID NO: 21844 - DNA, 262 bp, Homo sapiens
ccctttcgagcggccgcccgggcaggtacgcgggggaacaacggaggcagaggagctgaagactccagtatgcaactgactacaaggaggtttgtgaggcttcagttgatcgtgagtgtaagtgcttcagtgcgatcaaagttctacgtgcgagagccgccgaatgccaaacctgactggctgaaagttgggttcaccttgggcaccactgtcttcttgtggatctatctcatcaaacaacacaatgaagatattttagagt
